United States Patent Application Publication US 2026/0092266 A1 - sequence listing, part 10

SEQ ID NO: 1622 - DNA, 23174 bp, synthetic construct
  misc_feature 1..23174: note = Synthetic
  source 1..23174: mol_type = other DNA
cgtgctgcacgacacctactacgtcgtcgcccacttccactacgtgctgtcgctgggcgcgctgttctcgatcttcgccggtttctactactggatcggcaagatgtcgggccggcagtatccggagttctggggcaaggtccacttctggatgacgttcgcgggcgtgaacctcacgttcttcccgcagcacttcctgggtctggccggcatgccgcgccgtatcccggactatccggacgcctatgccggctggaacatggtgtcgtcgctgggtgcgtacctgtcgttcgcggcggccgtgctgttcgtcggtatcgcgatctacacgatcacccgcggccagcgcgtcggcgccagctactggggcgatgcggcgaccacgctggaatggacggtcagctcgccgcctccgttccaccagttcaccgaactgccgcgcgtgaagtaagtaagttaaaagaagaccggggaagaagtacgagacatgacggacatcaccatgcggcccgacgccgaggcgtcggtcggcggcgtcgctacaggcagcgtccgcgactatttcgaactactgaagccccgtgtcatgtcgctggtggtgttcagcggctttgccgggatgatcgtggctcccggccacctccatcccgtcttggccctgaccgccatcctctgcatcgcggtggccgccggggcgtccggcgccatcaacatgtggtacgagcgggatatcgacgccgtcatgcaccggacgtcgaaccgtccgctgccggaaggccgggtcgatccggacgaggcgctgtcgttcggcgtcgtcctgaccattggctccatcgccctgatggggctggcggtcaactgggtggcggccgggctgctggcactggcctcattcgtctatgtcttcgtctacacgatctggctgaagcgccgcacgccgcagaatatcgtgatcggcggcgcttccggcgcctttccgccgatgatcggctgggcggcggtgactggcgacgtcagcgtcgcatcggtcctgctgttcctgctgatcttcatgtggacgccgccgcatttctgggcgctggccctgttccggaacggcgactatacccgcgccggcgttcccatgcttccggtcgtggccggcgagcgcgagaccaagaagcagatgctgatctacacgctgctgcttctgccgatcgcggtgtcgccgtacttcgtcggcattgccggactgccgtatctggcaggctccaccgtgctgggtgttctgttcgtcgtgttcgcggtgcaggtctgccgcgacaagacggaccgttcggccaagcagatgttcggcttctcgatcctctacctgttcctgctgctttccctgctgatcggggaacagctttacggaccgctgatccggttcggctgatccgcccgaccaaagaagtgcaaggactaccaccatgaacgccgaccgtattcagatcacccggctgaccgatgagcagaagcgcaagcggcgcggcaagaacatcgccgtgatggtggcgctgctggcgctggtggcgctgctctacgtcatcaccctggtccggatcggggggaacgcatgagcgaaaaccgcgacccgcgggacatgcgccggcgcaacctgaccgtgatggtcagcctggtcggcttggtgttcggcatgattgggctgtcgtttgcgtcggtgccgctctacaacctgttctgcaaggttaccggtttcggcgggacgacgcaggtggcggaaggtccggcgggcgagatcctggaccgcacggtcaaggtgcggttcaacgccgacgtcaacggggcgctgccctggggcttcaggccggacacccacgagatggaagtccggatcggcgagtccgccataaccagctaccgcgccaccaaccattccgaccagccgatcgtcggcatggcgacgtacaacgtgacgcccgacaaggccgggatctacttcaacaagatccagtgcttctgcttcgacgagcagcggctggaaccggggcagacggtggacatgcccgtctatttcttcgtcgatccggcaatggccgacgatcccaagctggacgacgtctcgaccatcaccctgtcctacaccttcttccgggcacatgacgatccggggctggtgtccaaggcggggcctaatcccaatgcagtcaactgactgaaacgtccaactgactcaaacgtcatccaacgataagagcaaagaacgagggttacacagcatggccgagttgaacgcgcacaatcccggcgtctaccccggaggcgtttcggccgccgacggccatggcgccgagggcggtcacacgcaccaataccatctggtcaatcccagcccgtggccgctgctgggcgcattctccgccggcctgatggcggtcggcggcgtcatgtacatgcatggcagcggctggctcctggcggccctgggcttcctgtgcgtcctgaccgtgatggccgggtggtggcgcgacgtggtccgcgagtcggtccacgagaaggcccatactcccatcgtcaagctgggcctgcgctacggcatgtcgctgttcatcgcctctgaggtgatgttcttcgcggcgttcttctgggccttcttcgacgccagcctgtatccgaaggaagcgatcgggggcgtctggccgccggagaacatcgagacgttcaacgccttccacctgccgctgatgatgaccctgatcctgctgctgtcgggcaccacggtcacctgggcgcaccatgcgatcgtcgagggcgaccggaagacggcgagcgtggccttgggcctgacggtgatcctgggcatcctgttcagctgcttccaggtctacgaatacagccacgcccatttcggcttctcggatgggatctatccgtcgaccttcttcatggcgaccggcttccacggattccacgtcctgatcgggacgatcttcctggcggtctgttggttccgggtaaggtcgggccacttcaccccgaagagccatttcgggttcgaagcagccgcctggtactggcacttcgtcgacgtggtctggctgttcctgttcgtttcgatctactggtggggagcctgacgccctgacatcgaacccttaccccaagttctccccggtcgcggcggcgctgaaatgccgctgtccgcgatgcgggaagggccggctctacaaagggttcctgaccgtcgccgaccggtgcgagtgctgcggcctcgcactggcgcggggcgacagcggcgacggtcccgccgttttcatgaccttcatcctgggcttcacggttgtcccggtggccctatgggtcgcgatgtcggtcgattggccgctctggcttcacgccgtcgtctggaccgtcgtcatcctgggcttgtcgctgggcatgctgcggccggccaaggcctacctgatggccttgcagttccgccaccggtccagcgaatacgatctgcccgacctgccgggcgatttcccccgtaaaactcccccgaacccgcgggactgacccatgcctgcgctggttgagaaagaacaagacggacgccgcttccgtcccggtctggccgcaaccctctttacccttgccgccgtcgccatcatgctgggtctcggcacctggcaggtcgagcggctggcctggaagagcgcgctgatcgagcggatcgagagcggcctgcgcgccgccccagcgccccttccgaccgaaatcgagaaccccgccgactgggacttccgtcgcgtcgccgtcaccggccggttcctccacgactttgagctgaaccttgccgcccgcagcatgaacggccagatcggctaccagatcgtgacgccgctgaagcgcgacgacgggtcgctggtgctggtcaaccggggttgggtgccgctagacaggcgcgctcccgagtcccggaccgaggggctgccggagggcaccgtcaccgtcgagggcgtcgcccgtgtcccggcaccccagggctggatgcaacccgacaacgatccagcggccaacatgtggttctggtacgacgtgccccggatggccgcccaggtcgggcaggcgggagcggaccccggagccggcgtcggcgagccgcttcctgtcatcgtcgaggcgggagacgccccgaaccccggcgggttcccgatcggcggccggaccaacgtgaacatctccaacaaccacctgcaatacgccttcacgtggtacagcttggcggttacgcttatcgtgatctacttcgtgttccactggcggcgcggctccgaggatagggagccctgaccgccggaacacccccaacgaacgacttcagggaggctcggatgtccgcctatcagacgctggaacggcgcttcgcccggctcgccgcgatcaacgacgcgctcggcatcctgcactgggataccgagacgctgatgcctcccggcgccgccgacggcagggcggagcagcttgcgaccctgaaggtcctgagccacgagttgctgaccgacgacgacaacgccgacctgctggccgacgccgagcacgagcgcgagctttccaactggcaggaagccaacctgcacgagatgcgccgcgcctatctccatgcgacggcggtgccgggcgatctggtcgaggcaagctcccgcgcgatttcccgctgcgagatggtctggcgcgaagcccgcccagccggcgacttcgcgatgctgctgcccagcctgtcggaagtgctgaacctccagcgccagatcgctgccgcaaaggccgaggcgctgggctgttccctgtacgaggcgctgctggacagctacgagccgggcggcaacaccgaccatatcgacaaggtgttcggcgacctccgggccttcctgccgggcttcatcggcgaggtgctggagcgccagaagagccgaccggacatcctgcccctccaggggccgttccccatcgaaacccagcgggcgctgggcgtccggatgatgcaggccgccggcttcgacttcaacaagggccggctggacatcagcctccacccgttctgcggcggcgccacccatgacgtgcggctgaccacccgctacgacgaggacgacttcaccaaggcgctgatgggtgtgatgcatgagacggggcatgccctgtacgagcagaaccgcccggcggattggctgggccagccggtcagcgaggcacgcggcatgagcctgcacgagagccagtctctcatcatagagatgcaggcctgccgcagccgcgcattcctggagttcgccgctccggtgatgcgcgacagcttcggcgggacgggaccggcctgggacgcggccaaccttcaccggctgtacaccaaggtcgaaccgggcttcatccgggtcgatgccgacgaggtgacctaccccgcccatatcctgatccgctacgacctggaaaaggcgctgatcgctggcgacatgatcctggccgacctgcccggcgcctggaacgagggaatgcgcgacctgcttgggctgaaggtcacgaccgaccggctgggctgccttcaggacatccactggccgggcggcgcctggggctatttcccgacatatacgctgggagccatcacggcggcccaactgttcgacgccgcgacccgagccgacgacaacgtgctgccggggctggcgcgcggcgacttctcccccctggtcaactggctgcggaccaacatccattcccagggcagcctgctgccagccgaccaactgctgaccaaggcgaccgggcgtccgctggacgccagcgtctatgaacgtcacctgcggcggcggtacctggaggaagcctgagggcagggggcttgctgcttggtccgagagccgatgtagacaccccctacaaggccgcaattgtcatcaattgttgcaaaatgtgatgggctgcggtgctgtgacgaggttggccggtgggatgacaggggcaggtcatccgtggaaaaacgcgagcgagtgatcgaatgtcactatcgcccgcgcgcggcggcgggccggtgctgtgtgtgctgttcacgatgtcgaaaatccggcgctgtagcgctttggtcttgtagcacgagccggttaaggaattatgtcctggtgcttgttcgtgttcatttcccaggagagctccccttgcaaaacgtaacgctaaacgttacgttcatcgcaatgatcaagtcctttgccgataagcgcactgccgctcttttcttcgaccttccgacaaagggtttgccagcggatattcgaaagcgggcgcgtgcaaagctgatcgcaatggatcaggcacaggcgctggatgatctcagagtacctctcgccaatcggttggaggcgttgcggggtggcagggctggtcaatactcgatccgtgtcaacgaccgatggcgcatttgctttttctggcaagagggcgatgtttacgacgtagagttcctggattatcactgacttaagggagacaacccaatgaccatttcccgtgcggacctggacgctggccgggtcgatctgaccgatgtgattgaccctgaagcgcaaccggttggtcctattcaccccggctacatcctgcatgtcgatttcatggagccgcttgggctgagcgtctacgctcttgcgcgggcattgagcgtgccacggacccggctgaacgagatcgtcaatgagcggcggtcggtcactgccgacacggcgctccggctgtcgaggcattttggtaccagcgccgatttctggatgggattgcaggctcagtacgatctggaggtcgcgcgccgtgacctgggtgagcggctgatgttggaagtggcgccgcgagccgcataggcaatccatttcgcgcaggcgccacgcatggatcaaaccagatcgtcgaggccgatccggagtgcttccgcgatccgcttcaatgcttcgactgaaccggggttcttgccgctttcgatttccctgagataaacccggttcacgccgctggcgtcggcaagggtagtctgtgtcatctcccgatattcgcgccagaccggcaccagacttttcccggctcgttgggcgtcggtcagcttcacgcccaattcggcagggaacgcttcttcatttcggctcgtcgcggcatcgaaggcttggatatcggtcagcatttcagcgtctttctgcaaatcttcgtagacgtcttccgggacgagaacgaaggttcgaccatccttggtcaggcgttcgaagttcctacccataaggtcgtctcgtcaagccttgtgagcaatgcatgtagcgctactccgggaaacgctcgatgtgggtctcggcggtgcggccaaaatagacgacgcggcggccgaggaacgagacgagataacccgcgcatcccgcccccttcgccttttcgcagaagccgctgtaactgtagtcgggctcgccccgctgtgcccatcgcaccagtccttcgatggctgccgcatcgaaggttgccgcagtgatcccgtccgagtgcggcatgtccagcgccacgctgtcgccgtcgggcaggtaataggtctgggtgttgcggcggtagtcgaccgtgtatccctcgaaccgggcggcaatcagtttgccgacgatggcgggaaagccgaggctgccatcgtgcgccgcatcgaggcatgattgagcaatagagatccgttccgcgtccatggcgcgtttccttatccgatcttgagttgctacggacccggcggtcagtccaccgggatagtcttcagcccacgcctgtcggcgagagttcttaagaggcgatggagcatctcgcgctcctccgtgggcaagatgccgaaatactctgcatcgttcttatcggcgagcgccgccagaatcggcaccttgctccggcctgctcccgtcagggacagggtgtgcgcccgcttgtcacccggattgtcggcgcgggtgatcagccccttgccgagcagccggtcggcaagcttgctgatggcgcctttcgtcattcccatcttctcggcgagcgccgatggcgccatcgcgtcggcgtcgtagagggcacgcatgaaactccactccgccaccgtcacgccttcatcggcaaccttgcgggcgaagtcttgcgagaccgcgttggacaccatgcgcaaccagtagccggtgtgggcagtcaggtcagaggccggcggcataggtagctccattatgttgactaggaaactaccagcgttattatttcctagtcaacttgattctgatcggctgaggaaggttctcgtcaatgtttcggggtgacgtgtcagcttccctgagagcgtccgtacgtagacgcggctggaagccgcgtctacgatgcatgtcaccgcgaaacccgatatgagccttttttcctgcttggcgtgagattgccctttggtgccggagccgctaatctgaccagcaatctgctcaggagccgccgccatgaacaccgtgagcctaaccgacgccaaggctcatctcagtgaactggtctcgcgggcagattcaggagaggccgtttgcatcacgcgccgaggcaagccggttgccaagctgacggcggttcaggctccgcgtcggtctatcgaccttgccacactccgaacccttaccgactccatgccgatgcaggcggaaaccgccggcgaattcatccgccggatgcgggacggcgaacggtactgatgctgccggttgtccgatagcttgccgtcagaccagatatcgatggtacatcaaattctattttgtcgatccaaatacggtctttatctgcgtgcatcgctaatgggtgattatgaaaatctaccacgaagccgacaaaagccgggctatgtgcgaaaacgacgggctggtcactacgacctttgcctaccgcgacgtaccgtttcgtgacggctcgggcattgttaaggacatccttgtcgccgtttgcgacaaatgcggcgatgtcgtcgcaatccccccgcaatcttcacttgcgatcaaggcaactcgcgaaaaggccgccgtgtcggtagaggccaatttgcctgccatctacatcgacacgcttgaccttgcagctctccgtatcgatccgaacctgacgttggatttccgcaaacgccttctcctgtactacgtccacacctatgcggcgaacaggaaactccttgcccagcttatcgagaacctgcgggaggagaatatgttcgtaaccgcagacaagaacagcatgcgcaaacggttgtcgatgaaggttacaccagccatgtcgcgcgagatcgaggctgtgatgcaggctacctcgctcagcaaaaccgaattgatcaaatcagtcataagtcaaatccacaaggacatcgtccaacccgatagacccaagcagatgaagctgcttaaaacgctggctgccgtcgcggcctgataccgtcactcgatatcttcatcagtgacttggccggttcgtagtctggttcgtgatgcatcatgcggaagtcgaggagcccttgggagcggcgtacctgtcccaagggccatgctgcgccttggactgcgacagcaactcggcggcatcaatgctgcggtttcatcaccacaaacaaacgcggcgggccgaggcccgccgcacatcttgtgctgcaaggaacttgcgttcccgagcgtgttaacggaaggaccccgatcccccagcggctacgcaaaggtgattgtctttccgcagcaagaatgcgggatgcattttcgcgtgtcaatagtcagtggtgactttgctggtcttttttagcgccagtaaaacttacatttcaaagtaaatgatcagtaaacgatagccggcttccaaagcttaagtgctcggcatgcagggaaattttcttgcaatcctactcctgaaattcccgtaatggtagttttgtgagccactgccgtcctcccgatccctcaacctcccatttccgagcctttccatgtcgaaccgcgttccctatcgcctcgctctcgatctcggtaccaacagcatcggctggtgcctgctggacctcaacggcaacggggacccctgtggggtccggcgcatgggggtcaggatctttcccgatgggcgcgatccgaagtcgaaggagtcgctggcggcggaccggcggctggcgcggtcgatgcgccgccgccgcgaccgttacctgcgtcgccgctcggcgctgatgaatgcgctggtagcggcggggctgatgccggccgatcgggccacgcgcaaggcgctggaatcggaagatccttgcgaactgcgggcgcgggcgctgttcgagcctttgacggccgggcaggtcgggcgggcactgttccatctcaaccagcgccgggggttcaagagcaaccgcaaggccgccggggaagagaacgaggccggcaagatcaaggccggcatctccgcgctgaaggcggaaatcgaggccagcggcgaaaccaccctgggcgcgtggctggccgcgcggcaccgcaagcgcgagaccgtgcgtgctcggctggacggcgccggggccaaggcgtcgtacgagttctatcccgaacgtggcctggtccatgacgagttccaggctatccggacggcgcaggcgctgcaccatcccgccgtcacggcggagcagtgggaccgggtcgaatcggtgatcttccgccagcgtccgctgcgcccggtacgtcccggcaaatgcacgctgttccccgatcaggaacgcgcgccctgggcgctgccggtcgcccaggagttccgcatcctgacggagatcggcaacctgaaactctatcgccccggtgaggaaccgcgcgaactgtccgccgaccagcacgcccagcttttcgccaagctgtgccgaagcgccgacctgaccttcgagaagatcaggaaggagctgaagctcgaccccggcctgaaggtcaacctggaaggggagaagcgcgaccggctgaagggcgatgcggtgaccagcgcgctttcggccaagaagcgtttcgggccgaagtggaacgcgctgacgccggacgaccggcgcgatatcgtcggccgcctgatcgaggccgaggacgaagccgaactggccggctggctggaatccgtgcatgggctgccaagcgaaaacgccgcacataccgccgcgtctcccggtttgcccgacggctattgccgcctgagcgagaaggcgctggtaaaactggtgccgctgatgcgcgagcaacggctgcgctacgacgaggccgttctcgcgctcaacctgcaccactccgatttccgccccgagggcttgctggatgagttgccgtattacggcgagccgctggagcggttcatcgccttcggttccggcgagccgtctgacccgccggagcagcatcttgggcgctttcccaacccgaccgtccatatcgggcttaacgaactgcggaagctggtcaaccgcatcgtcgagcgctggggcaagccggccgacatcgtggtggaactggcccgcgaccttaagcgcagccgcgacgagcgcgacacgatccagcgcgagcaggcgcagaaccagcggaagaacgaggatcgtttcgccaagatcaaggagctggggatcgatccgcgtcccgactcgatgctgcgtctccgcctatgggaagaactgccgaaggtcggtgtcgggcatgtctgcgtctataccggcgaaccgatcggcatcaggcgcctgctggagggggatgtggatatcgaccatatcctgccgttcagccggaccttgagcgatggcgccgacaacaagatcgtctgcgtccggcgggccaaccgcttcaagcgcgaccggtcgccctgggaggccttcggggtgaccgccgtcgatggatacgattgggccgccatcgcgcagcgggcggaggagttgccgaagaacaagcgctggcgcttcctgccggacgcgatggaccggttcgagggcgaacggggcttcctggaccgccagcttgtcgaaacccgccatctgtccagggtggcgcggcaataccttgccagcatcgtcgacctgaacaaggtccgggtcgcgcccggcaagctgaccgccatgctgcgtgcccgctggggcctgaacaagatactgtccgacggcaacctgaagaaccgcagcgaccaccggcaccacgcgatcgacgccgccgtgctgggcatgatcgatcagcggcttgtccagcttgtggcgcaggcggcggccagggcggaggcgaacgagctggaacggctgttcgacggtctgcccgatccgttcgacggcttggccgcgacatcgttcggcgatcaggtgcgggagaagatacgcggcatcaccgtgtcgcaccgggcggagcacggctggcagggccgcatgcacaacgataccgcctatggtccggtcgaggcggtgaacggcgtccataccgtcgtcacgcggaagccgttgtcggggctgacggccaaggacttccccaatatccgcgaccgcgtgctggcgaaagcgctggaagaccatgtcgcggcggaagcggcggcgggcaggagttttggcgatgcgctgggcagcttcaaatggggcggccagccggtccggcgcgtccgcatgctggatgtcctgggcaacccgatcccgatccaggacccgtcgggcactgtgttcaaggtctacaagggcgacagcaacgcctggtacgagatcctgcgcgatccgcgcgggcgctggaccgggaagatcgtcagcaccttcgaagcctatcgcctgcaccgggaatggctggcggagaccggcggcgattcgggccggggcagcggggtgttcctggactgggcggccaagcgggtggtgggggaggccgggacgccgctgttccgcctgttcaagggcgacctgctggcgctgggcgaagcgccggaccggcggatcgtgcgggtggtcaagttcagcgaggggcaggtggcgctggcgctccatctggaggccggcaacctgaaggcccgcgacgccgacaagggcgatccgttcaaataccagtactgctccccggacagcctgcgcaagcaggcggcgcggccggccggggtcgatctgctgggctatgtccatgacaaaggcccgctggagtaggccatggccgaaggtgctgcgggagtcgtcatcgaaatcgccgagaacgggcgccatctggcgctcgaccggggtttcatggtggtcaagggagacggccgggagatcgggcgcgtccccctggacgatctggccgtgctggtctgcacggcccatggcctgacctattccaacaacctgctgctggccttgctggaacgggattgcgccgtggtgctgtgcggcagcaacttcagtcccgccgccatcctgtggccggtggacggccaccatgtccaggcgcagcgcatgcgtgcccaggcggaaatgacggaggcgtcgaagggccggctgtggcaggtgatcacgcgcgccaagatcaggacgcagggcgccgtgctggagtcgctgggcgtgcccgccggggccttcgtggaactggcgaagaaggtcaggtcgggcgacccggaaaacatcgaggcgcaagccgcgcgccgctactggcccctgctgttcgggacggagttccgccgcgactccgatcatcccggaaccaacagcctgctgaactacggctacgccatcctgcgcggcggcacggcgcgggccgtggcgtccgccgggctgcacccgacgctgggcctgaagcacagcaatcgcggcaaccccatgtgtctggtcgacgacctgatggaaccgttcaggccgctggtggacatccttgtccacgggatggtccgggaaggccgggtcgaggtggaccgcgacgcgaagcgcgaactggcgggggtgctggtccgcgacatgcggaccgaagccggcgtcaccccgctcgcgacctgtctgttccggctgactttttccctggcgcaactgctgcttggcgaacgcaaggtgcttgacctgccgctgttgccgctgccgctggatcttgttgtctcaccgaccggcaaggaggacgcgcatggctctcagcgcgtatcggctgatgtggatgatggtgatgtttgacctgcccgtatccaccaaggccgagcggaaggctgcgacaggatttcgcaacttcctgctggacgagggcttcgaaatgtcgcagttcagcgtctatatgcgcttttgcgccggctccccgcaggtggacgcgcggatcaagcgaatcagagggcaggtgccggccaagggcaaggtgcagatcttgaccttcaccgaccgccaatatcagacgatggtgtgcctggaggcacggacaaaacgagaacccggaaccaaatatgagcagttcaagctgttttgacggtggtttgtcgttgggaactggagaaaaaaggccgcataagccttttgggatcaaaggcttatgcggggatctattgtagccgctgggggatcggggtccagccgcaactgatctcgacctacgccgcgcgaacgaaagattgtagccgctgggggatcggggtccagccgcaactcgatctcctgtgcgtatctctggtcggacattgtagccgctgggggatcggggtccagccgcaactcttcggcgactacatcgccaacggcaccaattgtagccgctgggggatcggggtccagccgcaaccggtcaggatctcggccgcgcttgggtgtgattgtagccgctgggggatcggggtccagccgcaaccgcttaggatggtgaggttggtttgcatggattgtagccgctgggggatcggggtccagccgcaactacggtaccgtcaagaccatgctgaaccgcattgtagccgctgggggatcggggtccagccgcaactgcactactgagggtatgtacggtgatgaggattgtagccgctgggggatcggggtccagccgcaacacaggttacaggcggtcagggtaacgttcgattgtagccgctgggggatcggggtccagccgcaactgaccgcaaagactactgcatcacccataaattgtagccgctgggggatcggggtccagccgcaacgcggttcggccttgttcgggcggtgaaggcattgtagccgctgggggatcggggtccagccgcaactctcaagagttgcgcgttatggacggccccattgtagccgctgggggatcgggggccggccgcaactggggcgtcgaacgtcgtcccggacggggactgccttgcctgctctccggtaatgacggaagctctcggcgtgctcgacgtcatcaggagggccgggctggtggtggtgccacccgatccgaccgatgagatggtggaagccggaattgcggtttccggcatcggggcggaccgggtccgcgccgtcttccaggcgatgctcgcggcggcgccgtagaagcggcggttccctcccgttcggggttacagcggcgcagcaccgccgtcgccgccggtcatccggcgggccgccgcgcgcatcgtcctcaccagggcttcccagggggtgacgccggcgcccagcaggcggcgttcgacccgcgccgctcccaggatggccccagggcggccctcggcgtcgaactcctggaccaggacggcgacgccgtagccggcgggggccatggggacgcgcaggttccgggcggagccggtccaggcgcccatgtcgacgatctcgcgcacgacgttgctgtggcgcaagcgctggccccggttctcgccggccttgaccgacttgccgcgcccaagctggtagcggaccatcaggacgcgggcttcgccgccgttggggccgcgcgggatcgggccgcgcgggatgccgacgccgatcatgcccttgccggcctcgaccgcgatgttcagccggcgggcctggggctgcccaaggctttccgccatcgcttcgccgaccgcgcgcgggcggtctccggcggtctcgaaacggccgtcgacgatcatctgcggagtgtagacgctgtcgcggccaagggcttcgttgtaatcgcgctggcgccgcgtgttgttctccgtcgcgaacgggtctttccagcccatccggtcccaataggtcacatgaaaagacagcgccaatacatcgggcctgcccgccagttcgctcagaagggcgtccgcgacacgggacttcgagcatccttccgacgtgaacagttccacgacggtcggctggtcggcaagagccgagttgaacaggcggccgagcggcagggcaaacaggatcacgcccaacattacttattcctcttcaggtacctggcggtcattcatcttgcggacgacggcttatagcgggccgatacacggctggcatacttgatcgttgtattaagaccgaagatagaaattggcgtcggcggcccgagttttacgggtcattcaggtggcatctgagaattcttcccactgcgaccgggatgtcacacttttgacacccgtttgaatcatttccataactagcatcggacttcgagcgggagggatcgaaatgaataaccaattcgaagtgaacgagatgctgcgccggatcgccggcgaccgcttgatgtcccggttttccgagggacccgaagaacagctgcccgtccagatgcaggcgatcctggcgctgactgccgccgtcgcctgctgggggttcgtgggagccgtgctttacctggggttttcagcgctgcggaccgcgctgggaccgctcagcgcctttatggcctgagccggcttgccggcggcgggcggctggatcgccgggatcgcggtcggtacgatcgcatccgccatcagccgagcaaggcagtggtagctggcgtcggtcatgtgaagctgatcggatgacagcatggtcgccggcgtgaactgccgggtgtccagccagtatttcatcacctcgctccgccggaacaccggcagcccatgggcggcgcccagggcgcggaccgcatcgacataggcggcgtaggtcgcgttgcctgcctgcttgggcaggaactgcggctccagcaggagcaggtcggcgccgctctcccggatgcgccggataccttcgaccgcctgggcgccgaaggccttggcgtcgacgttgcgcagggcgtcgttggtgccgagctgccagatcaccagatcgggatggagcgacagcacgtcgcggtccagcctcgccagcgtgccggccgccgtctcgccgccgatgcccttgttgacgacgtcgatccgagttccggggaagcgctgctccaggatggcgtcaagctgggccgggtaggtccgggacggagcggacgcgccgatgccctcggtgctggacgacccgaccgcgacgacgcgtaggtcgtgcttctggctgagcgccacgctggtgtggggcagctgccgcacggacgccgccgaaaccagcgccggggcggcgcacatgtcggcggccggcgcttgcgcctgaggctgggccggcgcctgggtcggcgattgggccgatacgggcgcggtccccgtcatcaggccggccagaccagcgccgatgccggcagttccaaggcagaaggcgacgaaagctcttttaaccataatcccggatcactcgctcggttgccgttgcaacggacgccaaccggcgccgaccatgcgtattgatccacaatatggttaaaatgtgatttcaggggcaaggaaaagcgttcgcccggccggtgtggccgaaacgcaaccgctcgaaggatgcaaacgcatttccttgcggcaaggttccttcgaaagcgcacaattatcgtttttatcattcgggggaatggttgtctatttgtggtattgaattaccattcccggaataaacatgaacaacatccgttgaaactgctgtgttgccggcgtgtcgaagggccggaacatgattctattcggccgcggagagagagccatgaagcgttttactgtcctggacggactgcgcggttattttcttgtatttatgatgcttaatcatctcctttttcaaggtgatcttttgttgcagaagatcaaccatggagaactcggttatgtccaggacgcgcaggggtttgtcttcctgtccggcatcatcatcgggctgtactacacgcggatgatcgggcagggccgcactggcctgatggacgccaagatcctgagacgcgcctacgacctttacgtctatgcggtgatggtgctggcggtgatcctgatcctggccatggtggtgccgaattcccggccgctgtggggccagttcatgtgggagatgtaccagacgccgtcggtaaccgccgtctcggcgttcctgctgctctaccagccgatcttcatggacatcctgccgcaatacatcgtctacctggtggcgtcgccgctgctgctgcgctgggtggcgcgcggctattggcgggaagtgctgggcggcagcatcctgatgtggctgggggtgcagctcggctggcacctgccggcggtccgcatcgtcgagcagtcggtggcggagatcgtgccgggcttcgtcctgcaaagccacttcaaccccatggcatggcaggtcgtgttcgtcaccgggctgctgctgggggccgccgatacgcggggcgggatggactggaaccgctggttctctcctgaacggaccgacctgctgaaggcgtcgatcgtgatcgttgtcctgttcctgttctacaagctgggcttcacctatggcttcatgccggacagcatggccctgcggttcgacgggttcaacaaccggaccgaactcagcctggtctatctgctcaacttcgtggcgctggcctatctggtgacgtggctgctggtcgcgggccgggacagcgcctttccggcggcgcggcgggcgggggacctgctgaaccggctgttccgctggcgcttcctgaccttcctgggcaagcactcgctccaggtctacgcttggcacgtggtcgtggtctatgtcgtgctcgggttcgacgcccggatcggcccgttctccgaactgacgaagacgctgattgcgctgggcgccatcgccagcctgatcatcccggcctggatccacgccaactatgcgaactggacggaagcggggcgtctggcggcccagccggagccggcccaggggcggtcgcggaactaaccccgaggcgttcgggttgccatggggtgcgggaccaccgcaccacattgctattcgatggaaggctggagatggcgaactcggacgacaggacccccgaacagatcgaacgcgagatcgagcagacccgccgcaacaccgcggcaaccctggctgccatcgaggaccggctggcgccgggccgcctgatggacgaagcctggagttatctgcgcaccagcgggcagggtcagactttcgtctcgaatctctcggcgacggtacgcgacaacccgatcccggtcgcgctgctggcgatcagcctggcatggctggcgattgccagttcgaagaccggtacgcggcgcgaggaattttacggtgatggctaccggggcgacggctaccggggcgatggataccttggggaggacgacgcgatcctgaccgaggatgcgttcaggtcgtcgcatgcgccggcgcattcccacaaggtcgagtatgtcgatcccgatcatcaccacgagcatgtttcgcgctcgcgcgccgatgctccggaaggcgtttcgcccagtgccgacaccctgctgggacgcgaacgcggcaccttgtcggcgagcgaggcggcgaaggtgttccaggcgccgggaagcggtgcctgagcgccggctgagagagcggctgacgaggcagacaaggctgacatgaaaaaggcggcagggtgaacctgccgcctttttcttttgccggcgtgtgccgggtggacgcttactgctgggcgggaggcgccggctgttccggagcggcttcgggggccggctcggcggcgggggcgtcgcggcgctgttccagcgcctggagttcggccgattgccgggcgatctgctcgcggagctgggcgaggccctgctgctcgttcagaaggttctggcgggcttcctggatgcgctggtcgacctcctgaagctccgtcgtccgctgcgtcacctgttccgacaggtcggcgacgtcgcggcgggcggtgacttcggtgtcgcgggcctgcgccgcggcctgggtcagttcctcgaccctagcctgcgcggtctcggcctgtgaggtcaggtcggcgacgcgctgttcggcctgggcggcctcggcggtgcgctgctcgatggtctgggtgacctgggccagttcctgctgccgctgctggagctgggctgcggcctgggtgctctgctgggtgacgtcggcgagctggcgctgggcgttctcgagttcctggcgggcgcccgtgagctggtcgttggcggtggcgagttcctggcgcgactgggcgaggtccttgcggatctggtcgagctgggcggcggcttcctccgcctgctggccggcctgcgcggcctgatcggccttggccgccgattcctggctgagggcggcgatgctgtcgcggagctgggcttcctgcgcgcggacttcctgcacccgctgggcgatctgctccgtctcggcggtacgctgggcgatctgctcggtgatcgtggcaagctggtcgcgcgcggcggcctgctgctggctggtctcgccaagctgagccgtgccgcgctcgatctgctgcgtctgctggcggatctgctcggcgagttggttcgcctgctgctcggcctcggcgcgctgctgctggagcgtctgggtctgcgcctgggcggcttcggcctgggtgttgagatcctgcaaggtctgctggcggccttggatctcctggcccagccggttgacctcgccggtcaggcgctgttcgtcctggacggtggtgcgcaggcgttcaaggtcggcttggaaggtctggcgttcgtcgcgggccgtgtcccgttcggtcgtgaccgcggcgagggtctgctggtgttcgcgctggcgctgggccagctgttcctcgaggttgccgttctggaccgcgtacgagatcgccgcgatcacggcgatgaccgccaccacggccagtcccaacaggtagtatcgcaggtttccctggccagccgccgggcggctgtcgggattttcgtgcgagctggtcatggatatcctctttgctcactggcatatcacccgagaacgcggcggccatcggacttgttgccggccttcaggcgccccgaacggagcgtgccagaagatccagccacagcttgcccgccgcctccaggatgtcggcgttcgatccatggacgaaggcgaagccggagaccatccggccggccacgctgtcgcgtcccgttcccagccgctccagcgagtcccaggcccagcggtgatgggtctcctcgtcgcgggcggcccggtgtagcaccgccgcgacatcggcgggatggccggcggtccgggcgtgccgctcgtacttgtcgcgcgcctgggtctcgttggcgacgaaggcgagcaggacggcgcggtcgccgccggcaaggcctcccaagggtccgaagctggccatcatgccgccgccggagccggccgcctggaccagcagcttgaagatgccggtagggaaatggggcatccggaccggcaggccgccgcgcgcccggatcatgtcgaccagttcgccgatgtgccgttcgtggtcctgccggaagccgatcagggtattacgcaggttcctgtcacgcagtgccgagatcgccagcgtataggcgccgaccgcgtcgtaatcgagctggagaaggtcgttcagctcgccgatcagggccgcttcgcggaccgtcgcggaatgaacgaagggcaggggcgaagcttcgccggcgaaggaagcgattgggctggtcatatcggcaggctcatctggcaattccccataaattcggccctggtccaatcatctggccccggtatccggggagttaaacatctgactgcgacaatggtcccaccacggatacgctacccggctcttgccgattaaaaatgatatggcattcttgtttttgttgaagtgtctagaaaagccggacgcgaatgtgcatcccttgaagctttcagccacctgtcagtgcggtatgggatgagcggatgatcgcgagaatatacaggcccaagatcggcatcctgatgggagagggtaatctttccgtccggatcgcgctgaagtccctgctccaggccgagggtttttccaacatcgtcgacgttcccgacgtgaagaacctgcgctcgctgctggaggaaaggcgcgagccgcccgacgtcgtgatcctggacgccgacctcgaggacgacaacccgtgcgagatggtccggtcgatccgccacggcaggctcggcaccaatccgttcctgaccgtcgtcatgacgacctcgatcgccagcaacgaccgggtccgcgccatcgtggaaagcggcgccgacgggctgctgctgaagccgatctcgcccgccgccgtgatggagcggctggccgggctggtccgccagcgcaagccgttcatcgtaacctccgcctatatcggaccggaccgccgcaaggacccggcgcgcggtccaagctccatcccgctgttcgacgtgccgaacaccctgcgcgccaaggcggaggggcgcccgccccggctcgacgagctggaagcgaccatcgcccttgcgcagaaggcgatcgacgaggagaagcggcggcgagacgccttccagatcaccttcctggccgggctgatcgtttccggcacacccggtctcaacgacgacgccaccaaccacgactatctggagtcgctgatcgacgcctgctccgacttgctggagcggatttcgggcacgcccttcgcccggctggccgaaatctgcaccgaactccgcaacctggcgcagcggatggtgtccacgggcagggtgagcgaaccgcaggcgctgaagatgctccggccgatgtcggacgcgctgatggcgggactcaatcccggcaccgcttcggccg

SEQ ID NO: 1623 - DNA, 15298 bp, synthetic construct
  source 1..15298: mol_type = other DNA
  misc_feature 1..15298: note = Synthetic
cggcaagcccccctttggtggcggcatcgatgtcgaggaggatgtcttccgcgcaccaggttaacaggaactccctgaccaagtgggtcagggggatgtcgcggccgtagaacgcggcttcgatccggctgatcagggcgtcacggtgctccaatccctcaatctgggcgatgtgatccagaagacgccaggaaggcgtgtccaggctcatcgtcgtccggcgggcgggcatgccggtgtgacgcagggtgatcgtggcggttgtggtcttggccgccgtcttgcggacgcagcccatgatccggtcgagcttggattctggggggcttgtgggaacgatgccttttacggaaatcatgcttggctccctggcaggagtgggacggacgcgtttgtcaccggggggctgatgggcacaccccgggcggcctggtggccagcaaggcgggcggcgtcgacgcggctgtcctggacagtgggcgcgcggacgcttgacaggttctgatagcgatcggcgatccagcgttccgccgctgcggccttggcgcgggcgtcggccgattgaagcgcgcacagcttcgtgcagagggtcagcgtcatggactcgacaaaggcggcggcggcgacgcggcgacggttgggcttgcgccgccggtagtccggccggagtttgaagtcggccaacgcgcgggcgatgtgacgggtcaacagcgcgtgcagccattcggccagcaacgtgtccgccgcccgacccgcatagacaacctcaagggattgcgcctggatcaggatcaccgagacctgtgtaaacgcaccgatggcgggccaaagccgatcgatggggcgaaggcgcgcgcggtcaatcgggatgcgcacctcaacgattggatcctcatcaagcgacaggtcgtgttcggttgcggtctgccgggccttggtggcggcggtcagggcctcggcctccgtggcaccggcctcgaccgtgatggtgcgcagcttgcgcagcagttccgctgcacgctgccggttggggctggggcgatcatcagccatttgggcaagcccctgctggcggggcggaggtggtcttgtgagcgtattgctggtgattcgacgactgccgacggcgatgttcgcttttctcgcttagcgcgcggggaagtggctgcctttcgctggtccgcagcgttgtgatgccggtggcgtcgcgtgcggcgatcaaccgtttctggcggtccgcgatgctgatttttccggtggcaaattgtgcctcaatcgccttgcgtaagcggttgaagtgctccagccggtgggatggtgatgtttcttgctgcatcggcttggcgcgcttctggggttgggtgctgtcatgtgggtcatgatggcttgccaaaaatttgcgccactacgcaaatttgttcaagatcgaaatatgcgcagtagcgcaaattctatggcgggcggcgtgatcgcgcttcggctttgatcgctggcataatactgaaaattaagtaccagatacgaaaggcacatggtagtgtaacaatcgttcgaatgatacttaggttgcaaagcgtgctatcgtctcctccaatcccgcagttgaatcaagacgttctaaaatttgtcgatgcagagacgcgcgcaaactctgcaattatcatatacgataataatgatcgcatcgtttgggtcagcgcccggcagcggagcattgctaatgtcactgactatgtgtcagagacgcacagtagtttgttttggcttttattgaacgctggcaagatcggcgcgcgtgtagatcggtccgatccagcggggtggcttgagcaagccaggatatcccggcgccaatgtggcggaatgacttggttggctaagtataatacagaaattatggctgtatctcatagaaattttcaggatgggtactgtgttcagtccagagtagacattgatgtatcatgtgttattgataataaaagcatcaatgacattcagattagacagacaaatactgataaatattcacgttatgctgataaaattgataccctatctgaattttcatatgatggatattgtttgttaaactcaaagatggagataatatatgcaaacaaaatgttctataaatatattgatattagtgatgaattaatcataaaaatggatcttttaattgatggtgttggtgtgtctgatttgccattattgattcatcgtgcggttgatgatgccaatttcagggcggttgtgccgttctcttctggtgctggtgtgatgtctataagctctggctggctttctggaacagctttgcttgtggtgtcgctgcctgagcatgcaaatgctgacgtcttacggcagcttcttggcatcggctcagcggaagctgctgttgcagcgctcgttggggctggcttgtccccagctgaaatcgccaaggcgcgatccacaacggaggtaacggtctacactcaaatccgtaatctaaaagagaaaatcaggaaactgggatttcctgtttctgatttggttggcttatcaaagcttatatctcgtatatccagcgtcactcatctatggaagtgagggttagaatgtcggaaagtgttgtggaagttcatgcttttgactttgggaagcataaggccgccatggtcgatcgtttcgggcactccgaaatgatccgcgatgcaggcttttctcatctcactgcaatcttggctgatgcccaacgtgccgacgacggcacgtactatgctttgccgcacgcggccgatcaggcgatgcacgttcttctgctcgacaatgtcttttgcttcaaaatgggacaggcgctgttcggcaaggggcggatgatcgcccacgacccgttcccgcctgatggaccagctcgcgaagtggcttggcagaacactcaacaagctctggccaaaatcggcgtgagcatgcccgactatcaggacgcccccaagagtgatggcgtgactcccttcggctcggaaggttgctggctctggatcgagcgcttggcggcttgattggttgcccggccagggcgggttcctggccgggcctctcaaggaaggatgaggcggtggagaagaccagccaagaggctggccgactggcaagactgagaaagatgctgtcggcgcttgatgatcgtgacctcgaccggatcgagatgcttgcgaagaagcgagttcttatgaaggagacgaagctttcacgcgagcctcaagaatgacctcaaacgcatcctgctcttgtgggcttaatctcttgagtaagtctaaaattctatcgattttctgcaatcttggatcatcgctatcgtttttttcatcctcattgagaagctcgtgtatcgtcacttctctttgaagtaacttgcttgcgccgaacgccaatttttcatatgtatcggcaagcatgttcttatttttcttatttcgaacaaattcattcaaagtattgtagccaagatcagatgcggctgcccattggcgaatggacttaagctcggacctattctgttcccagaaccgagtcagcgcggcgcgtctgcgatcacgttcgttttctactgtgctcatacccctattgtacggattttgcgctgctgcgcgaatgcgctgtagcgcactcaagaggcttgacgtatttgcgcagaagcgcaaacatggggaatgattcgcgccgctgttcaccgcatccgctcctatttccagactgttggcatgagtcgccatcagattgcgaaggctgccgagttgaactggcgtgccgtggacgaggtgctgtcacccgacgggaatcccaagctcaagaccctcatgaagatcgatctcctcgtgccacccgatttcgtgccgcccaccaatcgtgaggcgggcgaatgatcgtgggaaaccatcgtcccataggttgtttcgtgtggaagcatcgctcgttacgcgcgatttgcgcaagctgaagggtggggcagggcaaaagaatcaatggtgggccaacgggaagggaacaatgaaggatcagaccgattcaacggcctgcccggacatacggtcaattgggggcgtcacagcatgctgacccgcgcccagcaagccgcccgggctgcgtgggaggcgtttgccgcgtccgcgccgcccaccgttccgaagatcgagcggctaatccagtcgcgctatggcgtcgccgatctggccgagctggccgacgatgaggcggacgcgtttgccgcgttcctgcggcgtgcggcgggctatcagcgcgtgatcgcgcaggctttgccgatgccggtccagggacgggcatgacggggcgtcgcccctttcccaaccattcctgtccagatcccagatctatcttgctgatgccgcgatattttcgaacggcctggccgcgtggcccgccgtcgcggcttttcctgggcctccggccgcccccatcgacatcgaggtccacgccgctttcggccgcccgcgcggccgggagcgttgcgtgtctgtgcagcaccggcgcgcctcgcggcggtgaagccttgccctttgtcttgcgggcgcgcaggccgccgcccgggcttcccctttcccgagtccaggcgatcgccaccggcgaccgctgacgcgccttctgtcccccgccgtcgcgccttgtcgtggcggtgaaccctggagctttgccgtgatgccgcgcgccccgccctgatgggggcggccttgccgaggccgccaccccttccggacaccgcaggttttcgacgcccgttgaccgtcaacgggaaacccctgcgcgcgtcccgaagggtatcgcaattcaggaataaaatccgctgttgatttgcagccacccatccgtgcgcccgcaaatcgccagccttgccaccggcgggccgccagccgccgggaacgggacaggtgcgccatgagcgtgagacacgccgattttcgggaaatcgtgggccgattccgcgttgccgtgtttgcagatccccggctgaagccgcgcgacaagctggtcgccctggtgatgctggagcgcgtgaaccgcgagatgtggcgcgggcagggcgacctgctgacctgggccagcgtgggaacggtggcggaggacgccgccctgtccacccgcgatgtggagcgggcgcgggccgccctgctggcctgcggcgtgatcgagcgggaccggccgggcgggcgggggcaggcggcgcggatgcgcttctgcctggattggctggaacgggaggagggcgggccggatgatcctgagccggaggcggcattgcccgacaccggtgtcggcgaccggggagtcggggaaaaccctgattgggcgacagacccttcggctttggccgacaaaaccggggatttttgcccgacaccggtgtcggccaaaccctgtgataaaccccgtgaacctgggcgcgcccccacgcgtgcccccacgcgtgagcgcgtgaggggcggcggcgggcgcgatctggccgacctgatcgcccagcggatcggccgcgaccggcacgcgcagtggttccgggattgccgggtgtcggtcacgggcgaccgggtgctgcggattgatgccccgaatcagttcctggccgaccagattcgccagcggttttccgacgatctggccacgcttccccggatccgggacatcgtgatcacggtccagccccagccccggttatccggccaagcctgcctgtggtcccaacccggcgggagggcctgagccatgccactgaagcccgaggacatttgggaaaacggcgtctaccggttccccgacagcatccgccgggttgtgcgatgcgaccgggtgttcgtgacgtgggagttcctgcgcccgtcctgcgcgccgccggggcatgtgggccagacgccgggctacgtgttcagcagcgaggtgaagcgattcgcggcccaggcgttgggcgaaatctgcccaaccacccggccaaagtccgggaccgatggggcaccggcaagagggccgggggcatgagggcgggggcgcaaatcgccctggatctgggcgtgccgccgctgaccgcgcggcaccgcccggtgaagccccagcgcgagggcttcgctgttgttgtggtggtcgcggcttgcgttcagtcgctggtcggcggatcgaactgcatgggcagttgacgggcggcgctgcgatgctccacgacctcaagtacggtgtattcgctccgcagtccgtcggttgtgcgccattgttccatcagaacgcgacagacgaggatgtcgccctttgcaaagacaacatcgttctgattgacgcgagagagaaaattttcgtcggccatggtgacgttgatggtgttctggccgtcgaaaagccgccatttgttcctgtccttgaaggaaaccgaaacaattgtgtatgcggccttccgctcctcatgaatgatttgctcctcctcaggggaggggacgacgaacgacgatgcgtcgtctttgtcgatgatttcaggaggctgcccacctgctgaaaacgcgatggtatcgatgccggatttttccaacgggcggatcagcgcggccgccgcctttcgaacctccacatcccgcagcagctggatggcctcccggttggtttcaatcgaatcctgatcgatttcgatgcggacaccgccatgttccaggatcaccaaccgggttggtcgccgaccacgaagccatttgatgatgcggatcaacccaaccaccgatccgctcccgccccccagcagagccaggaggttggcggcggcggtcgcatcctcgccaaccaagaagcttttcatttgtgcgaccagggtctgcacaagatcgagatcgacgacgaaggatcccttgcggaaatcagaccggacgagaacggcggccttgattcgttcaccgttgaggacgcgattcgattcttcgcagagctggccaatggccagaagcgccggggcaagatcccgcacatccatggttccatcatggatggcagggccgtcgaacgcaattttcaggcttgctctgctcatttcatccgccaacaccgcgccttcccccaaaagcacgtatccgttggagagaaggctaacagatattccaccaaattggagtccagatcgaaacaatctagttccaagatccgggatggtcaaatccggggcttgcctgtcggctgtcatgcggcatcagctctgtggggcaccaacctgaagtgcattcgcggttctgaggtttagcgcaccggtgcagcaaaccccatcgagcagtacgcaacgggacaaggcggtacccatcccgcgttcgatcaagcggccgatcgttttgggcgctgtgccgatgcgatccctgaaagaaaaatccttgatcacttcctccatttcagaaggaagtgatatttaattgggtgtcgtcacggtctttgatttgaatatggattcgaaacaaatgaaataatatctatttctttaggtgacagaccggccatgtgaagtgacacctgagctttgattgcacttcggatttgttcattttcgatgctatcggctattgattcagctctgcgcatctgttgatctttgcgaagtcgatcatacagctctgtggcgcgttgccgagtttgttcggcttgcttgaagaatatagcagcaataacatcaataataatcccaggtattatttttgctgttgtcgcaagattggcatcgtctattttagaagacgcgtacagaatgtagaaaaatccaacaatcgccgcgaatacactgaataaaaattgaaattttgcttgcgaaagtgcttgctgatgataacttattacaaggccgtctacaagatttcccccatttacgttgcgaatatttccatgagaaacattatcagattttaaatcggtgtttaatccatttattgctatacctgaatcaagggcgctattatatgagctggcgataattgaattctgttttgcaaaatctaattcactgttggataaattttttccattatttcttttctctaatttcgatgaatgagaagaatttcttgaagaaaattcatttttgctaaaaatttcatgcttaactctttgaagcatgaagatgatttggatcactgctgctaatatgccgattagagcggccatatatgagggggagcggtcaagcaaagcatccggcatctgcaaaatacgggaaattatttcggtcatatccaacctataagggatttctgccaccgggagggttattttaaacgcaatggctaaagcataaaaagcgatttcttctcttaagggcgcaatcgttgttgagttcaccccttgacgcctcatcccagcggagcgattattcagctcggagcttaagaacctccaaactaggcggcaggccgcccgcgcgtttttcgcgatgcggctattttcatgcccggagtctgtccggtgcatacccctttgccgggggtcggataatacaacacccgtaaggggaatattccggcctgtcctagtcaggttcttagcccccggcgccagggctgccttaagaagtggtcctccgtcggcaatgccgaactaggggctatcgccatggatgacatgggcgacaacgggcaagtgctgcccgcgattaccaccaccgacatcatcatcatcgacaatgagccacgcgtcaccgatgtgaagctggctgcggccctggggtacgccaaggtccaggaccttcgtcaactggctgagcgccatcgcatcgctctggagcggtttggaagggtttcgacgcaccgtgcgtcgaaacctggacgtggaagtgctggtggacgcccgagcacggggatggccttcaacaagaagcaggcgctttatctgggtggcaagaccgaccttccggcgggtgttgaactgctgatcgccatggtcgaggtgttcgacgccgtgaccagcggcaaggctctgccgcccccgccgcccgccccggcgctgaccaaggccgacctggacgccatcgatcaacgggcgcggcacgcggcaggggtggaggaaagccgggttcgcagggccttgaccgacgccgccctggacgccctgcgccagggcaggccggtggacgccgccctgcggacgacgcggctcaagcggtcggccccgctggcgctgccaccgccggagccgcccgccgcgcaatcggaccggtcccggtcggacctgtcccgggcggcgcggccgctggcgctgacggcgcggttcctggcgctgcctgccgagacgcagatcacgtttgaacgggtgctggagctgctggtcgagatcaaccgggtgctgtccgatctgtgggatgcgaccggcgaggcggacctgcgcaagccgatcggcgacatgctgacggcgaaggccgaccagtggcgcgccggcaatcccaccttcacccgccatcattgatccagggcgggccatccccaaaaagaacgcggcgggccgaagcccgccgcacatcttgtgccatcaggggcgaacccccatgacgtgttaacggaaggaccccgatcccccagcggctaagcaaggaaattgtcattccactgcgacgatgtcatgccttgcgcaacgcgtcaagtgggttgaaaattgaggtccgaccgcaacatactcacgtcctcggatgcaggacgactgtatgatgcttttttgtatgccacgcctgatgaaaagcaaaggcaaactttatagcggcggcatgtgagtatggggggattgactcccacgcagcgacacgataccttcttgttgacgagacaagggagggcggtatcgtgctgcgcatcatcataatatagaactggctgaggtgaactcgcctctcaggcgattcaacgtcacccgtagccgcaggcaacaagctgccacttatgggcgatgaacctctggaacaggttcatcgcccatttctttttctcacagccttgggggaaagtccatcatgtccaagcgtctccgctaccgcctgtcgctcgatctcgggaccaacagcatcggtttctgtctgctcgacctgaacggcgaggggcagccttgccgggtgcggcgcatgggcgtgcggatttttcccgatgggcgcgatcccaaatcccaggaatcgttggcggcagaccggcggctggcgcggtcgatgcggcggcggcgcgaccgctatctgcggcggcgcacggttctgatgaacacgctgatcgcctgcggcctgatgccgcccgacaaggccgcgcgcaaggcgctggaggtgacggaccccaaggcgcggcaggagacggacccctatgaactgcgcgcgcgcgcggtgcaacagccggtgtcggcgcaccagcttggccgcgccctgttccatttgaaccagcggcgcggcttcaagagcaaccgtaaggcgggcggcgacgagaccgaggcgggcaaggtcaaaaccggcatttccgccctgaaggaggagttgaaaaaggccgacgcccaaacgctggggtgctggctggcggagcggcaccggaaccgccagccggtgcgcgcgcgcctgaccggcagcggggccaaggcgtcctacggcttttaccccgaccgcgccctggtgcaggaggagttccaggcgatccgcgccgcgcaggccccgcatcaccccgatctgacggcggcgcagtgggaccggatcgagtcgatcatcttccaccaacgcccgctgcgcccggtgcgccccggcaaatgcaccctgttcccggaggaggagcgggcaccctgggcgctgcccatcgcccagcaattccgcatcctgacggagcttgccaacctgcgctttgaacggaagggcgcggccccctggggcctgtccgccgaggagcattcccgcctgttcgaccggctgtgccacaagggcgatatgaccttcaaggcgttggccaaggatctgggcctgccacccgacaccaagatcaatctggaggacgacaagcgcgaccggctgaagggcgacgccgtggccgacgtgctggcggcggagaagggaaagcggcggcgaatcggcgcggcctggcatgatttttccccccagcgccagcgggagatcgtcggccgcctgctcgacaccgaggatgaaggggaattggcggcgtggctggtgtccgatctgggcttggattgggaactggcgaccctgatcgccgaacgccccggcctgcccgatggccattgccgtctgagcgaaaaggcgctggagctggtggtgccggaaatgcgcgaccgccatctggattacagcgaggcggtggaggcggtgggcctgcatcactccgatttccgccctgaccggctgctggacttcctgccctattacggcgaaccgctggagcgcttcatcgcctttggcacgggcgaagccaatgacccgccggagcggcgactcgggcgctttcccaaccccaccgttcacatcgggctgaacgagctgcggcggctggtcaacgccatcatcgcccgctggggcaagccggaggaaatcgtcgtcgaactggcgcgcgacctgaagcaaagccgcgacgaacgcgaaaggacccagaaggaccaggcgctgaaccagaaaaggaacgaggcgcgggcggcggagctgcgcgcactgggcatcccggtgaagggcgaggcgctgctgcgcctgcgcctgtgggaggagctgcccaagcacggcgatgaccgcctgtgcgtttacaccggcaagctgatgggcaaggcgcagctgttcaacggcgaggtggacattgaccacatcctgcccttcagcaagaccctgagcgacggggccgacaacaagatcgtctgtttccgctccgccaaccgcttcaaacgcaaccgcacgccgtgggaggcgttcggcgtcgccccggtggacccctatgactgggacggcatcctggcgcgcgccgaactgctgcccaagaacaagcgctggcgcttcctgcccgacgccatggaacgcttcaacggcgacaagggctttctggcccgccagctcaacgaaacccggcatctgtcgaagatcgcccgaatctatctgggcagcgtcatcccgttggaaaaggtccgggtggcaccggggcgcttgacggcgctgctgcgggcgcgttgggggctgaacgcgatcctgtccgatgccaacctgaaaaaccgttgcgaccaccgccaccacgccatcgacgccgccgttctgggcgtcatcgatcaacggctggtgcagcgcgtggccgaggcggcggaacgggcggagaacaaggagctggaacggctgttcgatggtctgcccgatccgttcgacggggtcagcaccgagtcgtttggcgatcaggtgcgcaacctggcgcgcgggatcatcgtctcccacaaggccgaacatggctggcaaacccgcatgcacaacgacaccgcctatggcccggtcggcaccctggccaacggcctgcaccaggtggtgacgcgcaagccgctgtcgaacctgaccgccaaggatctggacaacatccgcgacgaccgtctcaaggccgcgctgaaggcccatgtcgagagcgaagcggcgcagggccgcagctttgaacaggcgctgagcggctttgaatggaccgggggcgtcgtgcgccgcgtgcggatgctcgacacgttgggcagcccgatcccgattcgcgattcggcggggtcggtgttcaagctctacaagggcgacagcaacgcctggtacgagatcctccgcgatgggcgcgggcgctggaccgggcgaatcgtcagcacctatgaggcgtaccagcttcaccgggcctggctggcggaaaccggggcgtcgcgggccgaagatggccgccccttcctggaatgggccgggcggcgggtggcgggcgacctgggaacgccgctgttccgcctgttcaagggcgacacgctggcgctgggcgtcgcgcccgaccgccaaatcatgcgggtggtcaaattttcggaggggcagatcacgctggccgcccaccacgaggcgggggcgttgaaggcgcgcgacgccgacaagaacgacccgttcaaataccgctacgcctcccccgacgcgctgcggaaggcccaggcccgccccgctggcgtcgatccgctggggtatgtccacgacaacggcccgatggagtgaccccatgagcagcgcggcgtcgatcgtcatcgaggtggcggaggacgggcggcatctgtcgctcgaccggggattcatggtggtgtccacgcgcggcgcggaaatcggccgcgtcccgctggacgacatcgccgtgctgatcggctcggcgcacgggctgacctattccaacaacctgttgctggccctgctggaacgggaatgcgcggtggtgctgtgcgggcggaacttcagcccggcggcgatcctgtggccggtggacgggcatcatgtccaggcccaacggatgcgggcgcaggccgacaccaccgacgccttcaagaaccggctgtggcaggccatcgcccgggccaaggtgcgcaaccagggtgcggtgctggaggcgctgggccagccgtcgggggcctttgccgagctggcccgcaaactgcgctccggcgatcccgacaacatcgaggcgcaggcggcgcgccgttactggccgttgctgttcggggcggatttccgccgcgacagcgacgagccgggaatcaacggtctgctgaattatggctacgccgtcctgcgcggcggcacggcccgcgcggtcgccgccgccggtctgcacccaaccttggggctgaagcattccaaccgctccaaccccatgtgtctggttgatgatctgatggaaccgttccggccgctggtggacctgctcgtgcatcggctggtcgccgatgggtgcctggcggtggatcgggacaccaaacgcgcgttggcgggcatcctggtccaggatttgcggacggaggccggagtcaccccgctggcaacctgcctgttccggctggcctcgtcgctggcgcacatgttgttgggcgaacggcagggtctggacctgccgctgtcgccgctgccgctggatctcgttcccgctcaccgtggcaagggaggcgcgcatggcgctcagcgcgtatcgtctcatgtggatgatggtgatgtttgatctgcccaccgtgaccaaatccgaccggaaagcagcgacgaattttcgcaatttcctgttggacgaggggttcgaaatgtcgcaattcagcgtctacctgcgcttttgcgccggtgccccgcaggtcgaggcgcgaatcgggcgcatccgatccaacgtgccaaagcgcggaaaggtgcaaatcctgaccttcaccgaccgccaataccagaccatggtgtgcctggaagcgcgaacaaaggaagaacccggcgcgaaacacgaacagttcaagctgttgtagcgggctggatcagcggtttcccacagaaaaattcccggataaagcgttttgcatcaacgcgttatccgggaacctattgtagccgctgggggatcggggtccagccgcaaccgctcggcgttgcgcatgccgaccagcgccattgtagccgctgggggatcggggtccagccgcaaccgccaacgtcacgaccgccaccgggtggaaattgtagccgctgggggatcggggtccagccgcaacgtccccatgtccatgaagagcgcgccgacgattgtagccgctgggggatcggggtccagccgcaactggctcgtcttgtgcttccgcacatttcttattgtagccgctgggggatcggggtccagccgcaacgcgccattcggcccgacgctctttttctgcattgtagccgctgggggatcgaggtccagccgcaacgccttgcgcagggcgacgagctccttctctattgtagccgctgggggatcggggtccagccgcaactgcggcgtgggattcaaccacattccaggattgtagccgctgggggatcggggtccagccgcaaccgaatgtttttgcgctagatttgacgcactagagcgctgtgcctaaaatgtggctcagcacggcgctctaagctttcattgatcgagccgattcacgcgtgaaatcgattccgatttaacgcgatctgctctaacccgccacctcggctgtctcgccgaccgggtccatgtgtggacggcccttccggtgcaagagtgaaatccgtagtgacggtcgataggatgcatccatgtgtccgacc

SEQ ID NO: 1624 - DNA, 24185 bp, synthetic construct
  source 1..24185: mol_type = other DNA
  misc_feature 1..24185: note = Synthetic
gaatattcaaacacatttgtcatatatatacaattagtcggacaagggaaaacacataattgacagaaacaacactttgcaaaatcgatagtaaactttgaaatgtggagtacttttttctttccttgcgaagttacaccagtcttccctactacatcaccggggactgctttaatagtttcaatctcaatacaactaacagggcatgcttttgcgcattggtcacaaccaatacaatcatcaatatttaccgtaattctatttctttccctttcaggtaattgtagtctctgctcaggatattgaattgtaacacttttcttaaaaaaatgtctgaatgtaatagacataccagtaaatatagtagaaaaagcctggtaaatatttttaaaatatcttttcatcaaaaaaaattaatttaaactaaaacaacatataaaccaacgacaaaaagacaaaggaacgcaaaaggaatcatatacttccagcatatagtcataagttggtcaacacgcagtcttggaagtgtccatctaatccatatctggacgaagacaaagaataatcctttagcaatcgcccagaaaaactgcattataggagaattcagaaaaggaattaaatcgccaaaaggagattgccagccgccaaaaaataaagtagaaataattgcagaaacagcgaacatttcagcatactcagcaaagaagaacattgcaaacttcatacctgaatattcaagatgaactcctgctacaatttcgctatccgcttcaacaatatcaaaaggattacgattggtttcagcaagtgttgataaaaataaaatcacaaatgaaattaccataaatggaataagtataattttaaccggaccaccaggtccgccaaatatataccaattatggattccgccagcctgtttctcaattattgtttgcatttgaagactgcctgcaagcataacaacagttagagcagataaagcagttggaatttcataactgacaatctgtgaaactgaacgcattgcgccataaagcgagtatttattattggaagaccagccagcaatcattaacccgattacccctaaagaagtaatcgcgaagaaataaaacagaccaaggtttaaatcaatcccaataaagatactgctgaaaggaataacagcatatcccataaaagcagccgtaaaaacaataaaaggagctgtattaaataaaattttatcggctctatccggagtaataaactctttttgaattaacttaatcgtatcaataatagtttgcagaagcccgaatttaccaaccctgttcggaccaaccctatcctgaatccaggcggatatttttctttctgcccatacagcataaagagcaaacagagcgacgaaaattaaaattggaataggtacgataaaataagaaataacattttcgcctaaaaactgagtaatgtaattatccatatttatatcaaaattcttataataaactaattccagatttttatttacaaatcatctgtcaatttcacctaatacaatatcaaaactccctaaaatagcaatcaaatctgctatcattgcaccttgagaaatctgattcattaaactaacatgaacaaaggatggagaccttgctttaactctgtatgggttcggggttccatcacttacaatataaaatccaagttctcctttcggaacttcagaacggaaatacacttctcctacaggtggttttatctttttggggattgctgattgaacatcgccttccggaatgttatcaattgcctgttctattatttttaaagattcttccatttctctaattcgtaccatatatctgtcccagcaatcgcctaccgtaccaacttctccctttccgactggaatatcaaaatcaaatttatgatatatagaatatgggtcattttttcttaaatcccattttactcctgagcctctcaaagtaggtccacttgcacctgcatttatagcaacatcagcaggtaatacaccaacatttgcagttctctcaataaaaattttattataggaaagcaaatcattcagcatttttattcttgggcgaaaatatttaataaactttttcacctttggctgaaattcctttggaatatcgtgtgataaaccaccaatccatatataattatataataaacgagctccgcaagtcatttcgaataggtctaaaatcatttctctatcaataaagcaatagagaaatggtgtcattgcgcctatatcatttccataagttccaacagcaacaaggtgcgaagcaatcctttgtaattcacacattataacccgaatgtactcaactctttcgggtatttccaatccgagtaatttctcaactgcaagcacataagcgagttcattattcatcgcatttaaatagtccaatctatctacatagggaataacctgcggataagtcattgcttcagcatgcttttcgaaacatctatgcagatacccgatataaggcttaacattaacaacaacttcaccatttaaagttactaccagtctcaagaccccgtgcgttgacggatgctggggtcccatatttattacaatctcttctgtttttaattctatattttcaaattcttttttcaaagctgatttttatttttgttaatatggtactctcattcctttataaaattcaggtactttataatcctttctgagtggataaccttcccagtcttccggaagtaaaatccttcttaaatcaggattaccttcgaaaattattccgaataaatcatacgcttctctttcatgccattcagcagttgcccacacatcatagacagatttaacaacaggatttgattttggaacaataacttttaattttaacttatgcttatgcacgaaagaaaataaatgatatacaactgctaaattgtcattatccaggtcaaccccacttaaacaatttaaaaaatcaaactgcaatcttttctcatcacgaagaaaaaatgaaactgcgttaatcttatctgcatttactattataaaaggttcaacgggaatatcagtttttaattctccaataccttcatcaaatactgatttaagcagattataaatttcggttatttccataaaaacttacttttttttcttaactaaagactgatttcttattctatcctgtaatttcaaaagcccttcaagaagtgcttcaggtcttggcggacaaccaggcacataaacatcaacaggaatgattctatcaattccttttaatacatgatagccgtggtcccaatacggaccgccacaattggcacaactacccatagaaagaatatacttgggttccggcatctggtcatataatcttttcactcttgttgccatttttaatgtaactgtaccagaaatcaaaattatatcacaatgtcttggtgatggtctcggtattattccaaacctatcaagatcataatgtgatgctgaagtagccatcatttctatagcgcagcaggcaagtccgaagaacatttgccacatagacgatagccttgcataattcagcagtttgtccaatgaagttacaactactgcccctgattcaaactgctcaattcgggtatctaatctatctaatattcccataaaaaattagaatttgaaataataaattatttggcttcaaaagtctgtctttcaagttttggaataacaggttcaggtttatcccatcgtaaatcaccttttgccaagacataaataaaaccgaaaatcagaataataagaaagacagccatttcaagaaaagcaaacaatcctaattccttaaaaaccacagcccacggaaaaaggaatacaatttccacatcaaaaattatgaaaatcaaagcaacaacataaaacctgacattaaatctgacccaggtttcaccctgagtatcttcaccacattcgtaagtagttttcttaaaagtggagggctttttaggagcaattaggagagcggcgataaatgcgatagcgacgaaaccaacagccactatcataaatacaagaatctgagcgtagtcagcaatcatataatatgtttttcttggttaacaacttataaaaaaaaattaataaattaaatgcacttctccggaatacatctttattttttcaccacttttgagtaatataataattgcaccatcactttcaatatcaaatattttcccactaatgatttctgaatcactgtctttataaaattccacatcctttccaatcattccggagtattttttccacaaataaacaatcctgtcagggcaaaatatagcatcataataaataaaaaattcttttgtgattttaaatatcaattcttccagttcactaaccctaccactttctataaaaagtgatgttgcattttttgacagatatttgttattggtgagttcttcggggaattcatcctgatttacatttatacctataccgattataacaagacttgctttcactgatgaatcatcagtttccggtatttttctttttattaattcagttaaaatcccgcctgcttttttcccatttataattatatcattaggccatttaagggaaatatgcaattcaggaaaaagtttttttaaaatattatatattacaatacctgtataaaaatttactacacaaacttttctttcttcaatatttaattcctgaactaatgttattgtaatattctttccttctgcagaaaaccagaaattactgaatcttccccttcctttttcctgtttatctgttataattaaagcaggtggatttacaggattatcctttgcaaaatcatttgtagaattaatttcgtgaaggtaaaataaatttaattttaaacaactctctttgaaatatttctgtaatttattttgctccatccggtaaataataacttaacgcaagatacgaatcaactctcccgtgtccataatattgatcccagcctattttatcttctttgggatctccaactctatcttttgcagtattaattatagctttttttaaatcattgcttgtgcaatcaatattttgagataaaagtaatgatgcaataccgctaacaattgctgtagattgtgaagtaccactccaggaaacatcaaatctgtaatcatctaaataatccagaccataaattttatttccgggagcaacaacagaaatatgcttcccccagcaactgccaccaccccaggtaaagactctacatctgctgtcatctgtatcagtagcaccaacagcaaacacaccgggaaaagcagcgggatagtaatttttattatctcccctgttcatcatagcagcaacgacgagtgcatcattagcaattgcatagtcaattgcgagttttaaaactcttgaattatccattccaccttcactcatattaataattcttgcgccattatccacagcatattttactgataatgcccaccattcatactcaccggcattatcatctgataaatttttacaaatcattaatttacacttgaaatttatccctgcaaaaccgatttcattatttgaattagcaccaattatccctgtaacattggtaccatgtccaaaaccatcttcgggtatattatcatcataagcaaaatcccaaccataaacatcatcaacatatccgtttctatcatcatcaattccattatttggaatttcatttttatttatccatattcttcctgaaagttcagggtgatttagttttactccggaatccataacaccaacaattacatcattacttccggtttcaatatcccatgcattaaccatatttatatctgcgccaattttagccattccgcttcctgaagatggctttattttgccttcattatgcaaataccattgcagataaaacttctcatcattcgggaaaaaatttctttcataacaggaattattaatatcccttttaccaccagcatacccgataaatattggttctgaaaattcaacattaatatctttatcataatccattacaacctgtaaaatatccttattataatttgtatctatataaaaaacataaacccgacccattccgagcttattatatacatcagaatttccattatttaaatggaataattttcggattcttgtaattttatatttttgtatttttaaatctaatgattttattccagtaataagagaaatttcccctgtcgcttcagatacttttaaatcatatttagttttaacaaaaaatttattcttaacatatctgaaattctgataataatcattaacagcagcacactttactatttcaaaagttattaatgataatagaagaatagttattataaaaaatgttctcattattctataatcaaaatttactttattttaccaataccattttccctgacttaagaaattctttaccatcataattttgttttatattcagtctgtaaaaataagtacctgatggtaaatcatcagcgtaaaatttaaaattataagtacctgtattctgatattcttctctcagggtttttatatgcttaccattaatatcaaataactcaattttcacaaaagaaggatataaaacctgataccttatggtagtagatgagttaaaaggatttggataattataaacagtggaataatctccaatttcagaatatttattatttataccagaagaacttacactatactttaaaatagtcccctgctcaccaacagcccagccagtatatgaattcgggaaaaccaaacttgttatcattgtactatccggtgattcaatatcctgccatcttgctcccgcatcagtagtgtaaactaatttctctgaaaaaccagatgcaatccaaccttcattcggagtacgaaaatcaatagaaagtcccataccaaatatttcaagccatgaataagtccagttgctaccaaaatcagtagaatgcgatatactgattccgtattcaaaatcacctcctgaagcgaacagattattagaatctaaaatacaaatatcccacaaaggttccgcgccgacgggttgcgatacccaatataaaccagcattagtggtttgccacacaacccctgtaatatctatatacccaccaacagcaatacctgtattctgattaataaaacttattcctgtaataggaaaatttgataccaaaccctgagcaatttcagacggtaaccaatttaagccaccatttgtagtgtaaagcaatacccttggtcttggaaataccaatccaagataaccattagtttcacttgtaaaagtaattacattagcatataccatagtatcagggtaaagataagaagaccagttcaaaccaccgtttgtagtagaaaaaatatatgaaccgtaaatattgtaatcataatgccaggcgagcgcccaccctttatatctgtttaggaaaaaaatatcctgaaaatttaaagatgaattactatactgctgtatccaattttgcccaccatcagaagttctgaaaacaagtccggaatctgcaataatccaaccataaagagaatcaacgaaaaaaaccttttttaaattgtatgttgtaggactattggtctgctttatccaaacagaagcaggttgtgaaaatgctaaatctattaaacaaaacaaaattaaaaatattaatatatactttctcattgctttactgatttaataaaatttttttcaaagaatctaaaaaattatcaatgtcactgaaagtattatacctgccgaatgaaatccttaatgaactcaaagcatcagataaagaaagacctaattcaagcaacacttttgaaggtttcatcgctccggaatgacaagaagaaccacccgaaacagcaattcctttcaaatcaagcattacaatcagcatctctggatctatcttaaatttacgataatctattttaatattcacaatattttgtaaaacatttttctccggcgaattatacgaaattccttctggaaaatttaacgaaagttgatctttcaggtatttattcagttttgaataatgttcaatatctttttctacttttgttttcagaatttctatagttcttttcaaacctgcaattaaagggacactttctgttcctgctctgaaccctttttcctggccaccgccgtgaataaatttctctacttttaatggattttttaaatacagaaccccaatccctttaggaccataaattttatgtgcagaaagtgaagcagaatcaagttttatatcctcaaaatcaaataaaattttcccgatactttgaacagtatctgaatggaaatgaatccctctggcatttgctatctctgatattgatttaatatcattaattgttcccaattcattgttcgaatgcattatggtaatcagaaaagtattttctgttattgcttcatcaacagaatgtggtaaaacccttccttctttatttgcttttaaaatcgtaacattaaacccgaacttttcctttaagtatagaactgtttcaagaacagaaggatgttcaacattacttgtaattatgtgatttttaccagtatttaaatgcctgaatgcaagcccttttatgacagtgttatttgattcagtaccaccacaggtaaaaaaaatttcttctgatttacattttaaaaaatccgctactacatcacgagtatcttcaactaatacctttgctttttttccgaaactatgcacagaagacggattgccgaaataatcctttaaataaggaagcatataatctattacttcactttcaacaggcgttgttgaagcattatcaagaaagatttcatccatagaaacctgaatattaaaattgcattttaaagactaacgggaatatatctaaaatttctttaaatacttttttaattggtcaaattctatatatacctgcggagttcctattgcataaggaccaacctgatactgagaaaaagttatcactactccatctttaagaaaattataaactgaataattttcaggtttaggagatgcgccttctgaaatccaatcatcatcagagatattcatatttttaagttcatcaatacaaatacgggaaatttctttcagataattaccatagaataaatcatcaagagtaataatcttccttaaataaaaatcataattatatgaatacagaggcgttattccgtgtgctccccccaaatattcataagaataaaacaaaatacttatgaaatctctttcactatatacaatttcgaaagaataatgaaattgatacggcataatatcatcatcagtaatctctttaaccatacgctgatagtatttttttctttccttagccatttcttccatctgcaaattaaaatctttggcatattcctgattaacagcatcatacattttcgggatataaacctcaatagaatatttatcggttttttccacaaaatatgcaaccgtatcgattttatactgtgcaaaaaccttagcagtaacgaaaattaaaaagataaatattattttcttcataaaaataaaaatttaatttcttcaatatttaacaaataatataaaaaataaattctaaaaaattatcaaaaatcattacttcaaaaaaatagtaaataaaaaatttattgttattatacttatataagttttcatttatcaaaaacttattatatttatttttttattctataattttatttttaaagtaagggaaaataacagtattaaattggaaaaaaaattatatataaataatgaaagccccaatttaaaaattggggcttttccacaacggaataatccttattgtggttcttgctttcaaatttgtaaaaatctaaaaaaattaaatttaaaaatcaaataaaaaattatgaaaaaaattttaggccttgatatagggacaaattcaatcggctgggctttaattgaaaaaaatgaggaagaaaacaaaggtagaattattgatttaggttgtagaattattccaatgggcgaagataaaagtaactttgaacaaggggcacaaataacaaggaatgcaaagagaagaatgtaccgtatgtcaaggagaaggaataaaaggtttaaacaaaggagaaacaaattaatttatgtattacataaattagatatgcttccagatttcattcatattgaagatggaatacctcctcctgaaaaaatacaaactctaaaaataaagcccataccaaaaggtacaaaacaattaaatgcacttgaaataattgaattaagaaaaaaatcactttatgataaaattgatataaaagattttggaaggattttatatttatataatcaactaagagggtatgcagggggaaatccggaagaagaaaatattactgaaaatgaagaaacagaaataagtattaaaaatgatgagctactgatagaaaaagtaataattaaagcaataaaagaaattgataaaattaaaccaagaaaaaaaagtcaagataaagaaatatccaaatatgagattactgttgaaaatatatatgggaaagaatatacaggtaccactatcattcaaaacctaaaagaaggaaatgaaattgaattagaaattaaaataaaacgagataaaaaaacaggtgatataaaaacaataaattttgttgaacacaaaaaaagtaattggaaaattgaattagaacaattagaaaatgagtttaaatcaaaaggtaatccacacatagcagaattattttacgaaaaattaaaagaaaatccatggtatcgaattcgcaatcatgtaattttaagagatagatataaaagagagtttgatgctatttgggataatcagtcaaaatattacgattttttaaacaataccgataagagtattcttcaggaaattgcagaatatttattcccgggtaaatcgaagagccaaagtgaatatagagaaattatactaaaagaaggactaaaatatctgataaaggaaatgataatttattaccaacgacctctcaaaccacaaatagctataataggtaattgcagatttgagaagaatttaaaagttataccacaaagtcacccactatatcaggaatatagaatttggcaagaaatcaataatttaagtataaatacaattaccaccgtcaatgggaaaaaatattattatgacagacctttatcaacagaagaaaaagaactactatataataaattaaataatcaaaaagaaataaatcatagctcagtatttaaattgttaaatctaagaaaggaaaaagattatttgaatggtatgcatgtaaaatccaaattaaaaggaaatgaaaccttgttaagtttaaaaaaattacttggtgatgatttattcattaagctaaaattagaagatacagcaaatctaactttattatggaggatattatacaattggttaaaagatgacgatttaattattgatactaaaaattatgagaaaaatcccgaaaaatataatatgtataatcctaataatgataatgagtatgacctgaacagtgatagaataaaaaaaataaaagagtatttggaatcgattcttgataatgaaaataaaaatataataaatgatgaaattttaatcaaaattggaaaaataagatttacaagaagatacggttcattatcagctaaagcaatcagtaatatcctgaacctaatgagagcaggtaaatatttcgatataaacaagataagaccggatgtaaaagaaaaaatcgaaaaaataaaaaatgcagaagaagacgaaaatattgataattttttacgcgaatattattcaaaaaatcaaaattgttttgataccggcgggttaatggcttcatattcaatgattttatattatggacaacacacagcagaaatctctgacggtttaaaagattaccatgatataaagacctatgaacaaagaaaaatagaagaccctgaaaatgcagaaaaatatacattaagaaatccaattgtagagcagatattgaatgaaacattacagttagttaaaagtatctggaaacatcacaaaacgaaacctgatgaaataagaattgaattagtgcgtgaattaaaaaataacgctgaagaaaggaaaaaaatatataaaagtgttttggataatgaaaaaaggaacaatgaaataagaaaaaaacttgaagagcagaatattccccagacattaataaatattgaaaaatataaactctgggaagaacaaaataaaatttctccatatacattgaaaacaattgaatttagcaaattatttagtgattattatcaggttgaccatataattcctcactcaagattttttgacgactcacttgcgaataaagttatctgcgaaagtgtaattaacagtctgaaaagtaacagaactgcttgggaatttataaattcgagcgattcaaaattaccagttgaggattatataaatcatgttacgaaaaatttttatggtagaaaaagaaaaaatttattattagcaaagatacctgataattttatagaaagacagaaaaaagatacacaatacattacagttaaagtaaaagaagaattaggtaaaatagttggaacaaataatgtaaaaactacaacaggtgttataacaaattatttaagtcaacaatgggggttaaaagttaaattaaaagaattaacaaaatatagatatcagctaatggaaaaacttaccggtgaaaagttagtagaatatataacagatgaatatgggaatagatatttaaatattaaaaactggagtaaacgaattgataacagaagccatgcaatagatgctttaattgttgcttgtacggaacagtctcatatacaaagattaaataatttaaacaaagaattccaaaaatatctaagagaaaacagtaatctcaataccacagaagatataatgcaagcactttacaatttagatgaaaaagaaagagaggaaacaatcagacaaatgccaagtttcagaaactttccattaccatggaaaaatttccctgaagaagcagaagagaaaataaaatcaatagtaatatcacataaaccaaagcaaaaattattaattcaggtacacccgaaaacagggaaagaatatttaagaattcgtggtgctttacacgaagaaacactttatggaaaagaaaaaacttacagaattccaatcagtaaacttaaagataaaaatgatattcaaaaattcattgatgaaagtattgtaagtgaaacgattagagaaacattattaaatcatcttgagaaattcgacaataacgcaaaaaaagcattttccaatgaagggatacaggaattaaatgaaaaaaggaaaaataaaattagagctgtcagggttttctatacaacaaaagaaaaatcagatgatagtttaatcccattatttaaaggaagcggatatgatataaaaacatatataaaaccaggggataactattgctttgctattgctgataataatggtagaagaaaatatgggataatttcattaattaaagcagtagagcttataacaaaattttataaacaaggtgaaaaaaatataaacaatataattaaacattattttgaaaatttatgcgaaaaaaccaaagggtgcagattactttttactttatcacataacgaccttgtctatttacctgaattaaatagcgacataccacctttaaataagaaagataaagactataatatttattggggaaaaattaacaaaaatagaatattcagagtaattaaattttcaggagatttatgttttttcacaacacatactatatcaggacagttaaaatataaaaatcaatctaatgaaacattcaaagaatttggctcttatgatggttgctgtccctatatttacacaatggataataaattatttcatcaaaataacaaacttaaatctaatgaggaaaatagaatatttattcaagaattttgtataaagattagaatcgatagattaggaaatatagaaccagatatactttaatactcaagtaattgttgtttttaagttgttaattgaaagaaattaaattttattaatgataaaaaaaacactatattttggaaatcaggcatttttaaatgctaaaaacaatcaactgattatcaataaaaaagatgaaaaaacctctgaaaaaaaagaaattcttataccgatagaagatataggtgttgttataattgacaattacggggttacattaactcaatatttattatcatcccttattgaaaataatgtcgctgttgtaatttgtaatagtaatcatttacccaatggaatgtttttaaatcttgattgtaatacattacagtcagaaaaatttagaaatcagatttctgcatctaaaccgcttcttaaaaatttatggcagcaaatagtaattgcaaaaataaaaaatcaaacatctctacttaaaaaaaataatatacctgtaagcaatatgaaaaaatggatttctgaggttaaatcaaatgacagtacaaatcttgaagcaagagcttctgtatattactggaagaatttatttcccaaagatataaattttgaaagagacagatacggtgaaccaccaaacaatttgctcaattatggttacgcaatattaagagcagttgtagcaagaggattagttgcttcaggtattctaccaacaattggaattcatcaccataacaaatataattcttattgtcttgctgatgatattatggaaccctatagaccttttgttgatgagattgtattgaatattgttaaaaacaatgaaaatttttttgatttaaatacagaaatgaaaaagaaactgcttaaaatccccgttattgatatttttattgataatgaaaaaagacctttaatgataggcttgcaaaggactactgcatcactggcaaaatgttatgccggggaaactaaaaaaattatattcccagaacttaaatgagattaaacgaatatagaattgtgtgggtattagtactgtttgatttaccaactgaaacagaaaagcaaaggcggaattatttaagattccgaaaggaactactaaaagacgggttcagtatgtttcaattttctatttatatgagacattgttcaagttatgaaaatgcaaaagtacatataaaaagagtaaagaataatttaccccctcaaggaaacattggaatattaatgataacggataaacaatttggaatgatggaaatttattatgggaaagaaaagataccaactaacccacccccacaacagcttgaattgttttaaaaaaagggtcagcttgaccctttcctttctgaaaatgtaaaaatttttaattctaaaattagtgtaactgtattatttaaaaataagttagcgatattgtactatgacaaatatcgctaaaccaaaatttgaaagcaaaccacaacaagacttaaaaagtattcatttttatatttactatgacaaatatcgctaaaccaaaatttgaaagcaaaccacaacacaaattgattattcaattggtacagatacactatgacaaatatcgctaaaccaaaatttgaaagcaaaccacaacataccatttatcaatcttgcaggtaaagtaactatgacaaatatcgctaaaccaaaatttgaaagcaaaccacaactgttgcttcaaacataactttagtaccaacactatgacaaatatcgctaaaccaaaatttgaaagcaaaccacaacaagaaacaaaagatttaaaaatataactttactatgacaaatatcgctaaaccaaaatttgaaagcaaaccacaacaaaatatacaacttaaccactttcatttaaactatgacaaatatcgctaaaccaaaatttgaaagcaaaccacaactataatatactaaatcctttaataggaacaactatgacaaatatcgctaaaccaaaatttgaaagcaaaccacaacaacaatttattaattattgttggattatctactatgacaaatatcgctaaaccaaaatttgaaagcaaaccacaacgcagatgttggtatcgctgtaaagaatacactatgacaaatatcgctaaaccaaaatttgaaagcaaaccacaacaactcattcacaacttttcaaagccacaacactatgacaaatatcgctaaaccaaaatttgaaagcaaaccacaacatatactcgctcactatattaaccaattcaactatgacaaatatcgctaaaccaaaatttgaaagcaaaccacaacctgtttcaattcctattaataggttggttaactatgacaaatatcgctaaaccaaaatttgaaagcaaaccacaacaatgtctgcaccttcaacatatcttgcaaaactatgacaaatatcgctaaaccaaaatttgaaagcaaaccacaacaccgcagttactgcatataaaggatttgagactatgacaaatatcgctaaaccaaaatttgaaagcaaaccacaactgcatcttttaccttaaacattttttcaaactatgacaaatatcgctaaaccaaaatttgaaagcaaaccacaacactttcacttacatcagatttacttaatttactatgacaaatatcgctaaaccaaaatttgaaagcaaaccacaaccgtagactgaaagatttaggactggatgagactatgacaaatatcgctaaaccaaaatttgaaagcaaaccacaacaggtgataaagacgacatataaactaaatcactatgacaaatatcgctaaaccaaaatttgaaagcaaaccacaacacagtggtaagtagcgatacacctactccaactatgacaaatatcgctaaaccaaaatttaatttttaaattatttttattctaatatcacttaaactcttttaggaattcaagctactttccattaaaataaaactactgaatgaaattattgataagtaaatctaaatttttaattgaaataatagcggataccggcgccggcattccagataaattcggtagaaggggttaaatccatcattggaacaatttctataaataagtcaattggttttgatgttggttcatatgtaatgcctaccgggattctgactgctaattttgtatcctgattcttttctattttctttatctttattctaccaccaataccaacataaagagggacttcactacttaatttggtaatattatataaataatcagcgtgaatgtgcattgcgctatatctgtaattagaccaaccgatagcagcatcaacagaagaagtattatctaaatataattttgcggataatccggttggctcaccgagtataataccaagtccaaatttgctctgtgaataagaagatgctgcacaaacaactaacagaaagaacaagattaataattttttcataggatatttgatttaaaaatttttataaatgagtgtaatttgtaatttttcagttaaatttaaactatataataaattaaatttatacaatatataaaaatgatttaaataaaaaattttttatcaaaatctgaaataacttttaatatttaaactcatagattctgttttaagttctaaatgcaatgaaatcgttatttaataaatgttcagattacataataaaaaattacttaaattaattttaggatttatttaaaaagatacatacaaaatccctgacattatcttataataattttatataaactgttatattataaagaaatatatctttacattataataaaatataaatatattttataaaaacataaatctatgaaaaaaataatattatcacttacaatattaattataacaactgtagcatattcacaaaatagttactggcttaaaactaatggaccatttggtggaaatataagggcttttgttaaggattctttaaacagatggtttattgctacaagcggtgatggtatctattatacaactaatgaaggtaacagctggattcaatccaatagcggattgttagaaacaagggttaactgtttggcacttgattctaacaactatttttttgcgggaacatcaagaggattataccgttctactgatggtggaattcaatggcaggtgatatattttcaaacgaatgaaatcttttcattgattgttgatgcaaacaacagaatatttgtaagcacatctaatactatatgggtttcaactgataacggtattagctggaatgtaagcgccggtggcttggcaagtgcaaattattataatttatgtatctctcccaattactatatgtatgtaagttctggttccggcggtgtttttcgctctactgatggtggtagtaactggctcgctgtaaataatggattgccaagcacatctgtttctgctttaacagcaacatcaaataattatttatttgcaggtatttcatcacaaggagtttatctttccactaataatggtgaaaattggactgctgtcaactctgggttaggtaatatgtatgtaagcgggtttggaagttatgagaatattttatttgcaggaacaaataacggtatatataaaactacaaactatggtactaattgggttgctgcaaataatggatttaacgcaacatatacaggatgcagcagatttgcatttatttcatctactactgtttttgccggtacgagtgcgcttggtgtattgaaatcaacaaattccggtaatctctggttaaattcttcaaacgggattaatgctacttctgtaaaagcaatagcaattaatccacaaaatgaaatttttgttgcaataacaggtggattatataaatcaactgacgcgggtttatcgtttatagcttctgattcagggattaccaacagacatttaaacattttgagaattcatccaaatggttatttatacgcagggtcttttcctatgtcgggaacaccattaagtggaatttttcgttcaactgacaacggtattagctggacggtcgcaatgagtggatttacatatcaatataacaatatacttgattttgcttttgatacaaatggctatatttatgtcgcttcaaatgacaatgtttataaatcaacaaattttggtaataactggtttaaaacaaacaatggaattacaaataatcagatatattcaattgcagtaagtaaaagtaataattatgtttttgctggtacatacggttccggcgctttccgttcaacagataatggcgcaaattggacacagataaataacggactatcagccacacaaataatgtcacttgaatttaatcaggaaaattatttattcgcaggaacaaacggtcagggggtattcaggtctaaaaattttggtctggattgggagcaggttctcggaatgggtttgactatgcaagcctggaaggttgcaattaataagaagggctacatttttgccggtatagttggaggacagatagttaacttgggtgtatggatgtcaacaaataatggtgataactgggtacaaattacaaatggaatttcctatccatttgtagatgcacttgcttttgattcggttggcttcgggtatgcaggaacgcttggtgggggcctttacaagagtagcaattcgacaaaggtaaaaacaagtatttcagaaataccgaaaaaatttattcttgaacaaaattatccaaatccgttcaatcctattacaactataaaatattcacttgcaaaagatggattcgtaaaattaataatttatgatttattaggtagagaaatagaaacaattataaatagttatcaaactgccggttcatatcaatatgtgtttgatggttcaagactttcatcgggtatatacatttataaacttgagacagataatttcacagaaagcagaaaaatgatccttatgaaatgagatatattaaaataaatcacttattgtattaagcatatataacttacctttataaatcaataatataaatagtaggtatacttactattttttaaatagtatagatttttcaacacaccaaatcactaaaatcaatattggattattaccagaaaccagttaaagagaatttcttttgaaatagcatatcgcatattttataaatttttgatttcaataataaaaaacttaaaacataattatttgacatttatcaaagattatggtaatatttttaaattattgttcaactcttcttgttttgtattataaaaaaaggagaaaataatgagcgaactaataaacaacagcagaaagagaatagaagagctaaaaacattattcctgaaactacatcaaggcatagatgtagaaacagtaagaaaacagttatcagagatgctcggaaaagttccatacggagaaattgtacaggcggaacaggaattaatatctcagggaatgccggtgcaggagatacagaaatactgcgacttacattcgcaagcagtaaaaggaaatattgatttctcttttgaaaagattataccagaaggacacccgattaatatatttaagaaggaaaacagcgcaatatctgaagaattatcaaaacttaaagaaatttttattgcagttaagtatccaacagagccaataaatgccgcagaatcagcgatggagatattaaaaatccttaacagtttatctgatatagaaaagcactattctaaaaaagaaaatctgatattcccctaccttgaaaaatacggaataacaggaccatcaaaagttatgtggggaaaagatgacgaagtaagaagatttatcaaagcgtcaaaagaatcattgaaacaaactgaaaaaattacaaatgaagagttaagcagacttattgatactattctggaaccgactgcaaatgcaatactggaaatgatagagaaagaagataagatattattcccgatgtgtctggatagatttacggaaattgaatggtatgaaatatatagtcagattgatgacattggttattgcctatatgtgccggatgtagaatggaaaccggatttagaagtcaaggaagaagaaaataaaatttcaaaagataggataaaattatctaccgggtcattttcaccagaagaactcgaaagtgtattaaatgctttacctgtggatttaacatttgtagataaagatgataaagtaaagtttttctcacacggcgcaaaaagaattttcgaaaggaataaagcaatacttggtagagaagttcaaaactgccatccgccttcaagcgttcatatcgtaaataagattcttgaagatttcaggactgggaagcaagacagcgcaaagttctggataaattttcagggtatgtatgttcatattgcatattatgctgtaagaaatgaaaaaggagagtatcttggtactctggaagttactcaggatatcagggaatttaaaaacattgaaggtgagcgacgattactgacttatgataaataaataagtttagttatttgattaatattaatttttttgtttctgaaaagttgcctgtttttaaattatagaaataaattcctgacggtaaatcatataaatccaaaacaacagaataaatatctggtgaaaggaaatcacagacaactgtttttaattcctgaccgattgaattaaaaattttcagagtaacaaaagtatattccggaatatgaaaatcaattctcgtaaaggaattaaaagggttagggtaattttgcgataacgaataagattgtggattatattcagaatactttttaatgaatgttcccccaccgtttgttgtttttaaaattaaaccattgtatccacaaatccaaccagtattttcatcagtaaaaaatatgtcaaaatatggatcgccataaccctgctgaacagtgaaccagtttataccggcattagtagttttaattaatttataagtcggaatttcaaaccagttacctaccacataaccagtattttgattaataaaaaatacagactcgtatccgatattagaacctaatttctgagagacccaattcaaaccgccatcagttgtttttaaaacagtttcactatcacaaacagcataaccattaaataaatctgtgaaaaagatagatgcaattctcaattgagttgatgaattcattaaactgaaactcataccgccatcagtagtttttcttatcattcccaaattacctgcaataaaacccgtatttgaatttaaaaattgaatagtccatatatcaactccggtaacatatctgtcaacccaattcacaccaccatttgaagtgaacataaatttaccatcaaatccgactacaaaacctgtattttcatcaataaaccatatattaaaaaaataagtggatgtttgataatattgtatagaccagttaaagccactattagttgttttaagaattttggaattaccaaaaccacccatataaccaccgcaaagccagccggtttcattattgataaaatgcaaacccataaaaaaatcatcaggagtagttcctgtgttgatatgttcccaatttaaaccaccatttgtagttctaagcagaagagaactatcaccaattgcaaaaccggtgtttgcatttagcattcttatttttgaaataaagcagtttgtatttgtctgttgcagaaaccattgcggaaaaatattgtaataggaaagaaatatcagagaaattataaaataaaattttctgaccatattaaatttttttaaataaaataatgttaaaataaataaaataaaattcaagatttaattcttttgtttaaattaaataaaataattatttttaaactaaaaatttaaaatatgaagataataccgaagaaacttagaaacagagagtatatttttaaagtgaaattcaactctgaagaattagaaagatacagttcttacggtcatgaagcaaaatgttttttaacacgaacaaagaaaattaacaaactaattccaactgcattagataccgataattactattatatatattcttattcagaggaatatgataagggacgaaagacagagattatattggaatactataataaacttgatgaaaatataatgctgcaaattgtaattgtattcccgagaaaaagaaatttcagtattgcggagacaaagttgaaatataacgggactgaaccatcagagcaggtatttaatgaaacatttattgagaagacaaaagaacacataaaagaaatattcgaaaaaatatttaatcgtgaaaatcaaggaagtatatgcagagagtgtggatatatttatattaaatctgaagtgccacaatgcccgagattatttgttccgaaagaatagaaatgtattgttaaattaataccggaacctgataatttccctattaaatgtatttttcttaaataaataagggggatttattactaatataactttaattataaatcaatataacttttctcttcttctttaaacaaatttaatattttctcttttgtatcagcgtgctgaagtttatctctgaattcatcattattcatcaatcttgaaatgcgactgagtaacttaatatgaatattcaaatgagaatcttttccaatcaaaagaaaaataaacttaaccggttcaccatctattgattcaaaatcaattggttcctttaaaacagcaaatgaagcaacgacatcagaaacactatcagtttttgagtgcggaatagcgaaacctttacctacaccagttgagacaagtttttctctctcaaaaacactttttctcacttcgtcaatatcaataaatttcccggactttgaagcaaggtcaatcatcttattgattgcgtcttccttatctgtcactggtaaatttacctcaatcaaatcttcatttaaaatatcactaattttcatatcacaataaaatatttagttttt

SEQ ID NO: 1625 - DNA, 13606 bp, synthetic construct
  source 1..13606: mol_type = other DNA
  misc_feature 1..13606: note = Synthetic
gtttgtcattgaagcaaagagagctattccgccgagaatatttatataatccggataatcatgacccgtaagaataattgaaccaactacagcaattgctgagattgcatttgttagagacatcaatggtgtgtgaagcaatcttgaaacgcgagtgataactcctaacccaatgaatgatgctaacataaaaacaaaaaacaatccaaagtaatcaggtgttgcaacttctttggattctgcaaaagccgaaccataagtaagtaacactgctgatatagtataaaatatttttttaaatatcattagtaatctcctaagatttaatctctattaaatttttaacctattattaccttgataagcaactaaggcagcactgacaatttcatctttatcatcaagcttataaccaccatccttgcacatatgcaaaattaaagcaagcaaattttttgaatacatttcactggcatttgttgctacaaggcttggtaaatttgcttctccaattatcgtgatgttatgcttaacaaccgttttattaatttcacttatctcgcaattaccgccaaactcaacagccatatcaagcacaacactgcccggtctcatattcttaaccatttcttctgtaactaaaaccggagcttttttaccaggcacaagagcagtagttataacaatatctgcatcggttacgtgtttaaagattacagctttctgtttcttcaaaaattcttctgatgcttcttttgcataaccgcctgcatcctgcatacttgcatcagtttcaacttcaataaattttccgccaagactttgcacttcttctttaactgcagggcgaacatctgagacttctacaacagcacctaatcttttagctgtaccaagtgcctgaagtcccgcaacaccagcacccataattacaactttagccggtttgatggtacctgccgccgtcatgagcatagggaatatttttctgagttcatttgctgcaagtaaaacacttttatatccggcaagatttgcctgtgaacttaaagcatccattttttgtgcaagtgtagatcttggaattagatccatagatataaaatcaatacccttttcagcacaaagctttgatacttcagtgtagtggcgaacataagctaacgcgattaataatgatccttttttcattaaatcaagttcatgtttttgcaaatttccatttacaattggtctttgcactttaagaattatatctgatgattgaaagagttccgaagtatcatctataattttagcgccggcaccagaatatttttcgtttgtaaatccagctttttgtccagcattgctttcaatttgaacactgaatccagctttgatgtatttatttacaacatcaggaataatagccaccctgttttcacctggaagaatttcctttggaataccgataatcaaatggatcctcctatactttgtttaagaaatttctttaataaaacttaaattgaattcatgaaaaaacaaaaatattaaccatcaaatcttcaattatagaatttactaactttaaatgggttgttcgtgtgtgagacaatgcaaggttcccaatccccatactaaatccacagaatgaataccaacaactttcctgtctgtgaatacctcggataaaattcctaatgcctttttgtctttaatatcattaaaagttggaaccagtacaaattcatttgaaatgtaaaaattagcataacttgctggtaatctctgatttttaaaaatgacaggtgatggcattggtaaataaataacttctaattttgaattatccaaaaatgattcagattgaagtctctccttattttctttcagcagtttataattttcatcgcttggattatcctcctgaactaacaaaactttgtttggactgacaaaccggcaaagatcatctacatgaccatgcgtatcatcccctactatgcctttgcctaaccagattactttttgaatacctaaataatccaagaatattttttcataatctttctttgtgaaatttttatttcgaacttggacttttggatcaagcaggcactcctctgttgttaagagtactccacttccattagaatcaatcgaacctccttctaaaactacatgagaagttttataaactgcttgcttgatttttagatccaattttttggagatgaatttcggcagttgggcgtcaaatttataattttcatactttgcccatgcattaaacttaaaattgatcagttcaactttatttgatttggatgattttacaaaaattggtcctgagtctcttgtccaacccctgtcagttttaacagtaaagaattccaagtttgataatttagcattggaatcttttagagcacggattgccttttttttatgctcagtatcctcaacgattattctaaccttttccccttcggaaattttttttacaatctcacaatacacccaaataattggagtaaattttcctggccaatctgatttattatgaggccagccaatccaggttgcctcgtgtttttcccactctgcgggaagtcggtatgttagtttattatttcccaaacccatttagaattaattgtatacagataacacaaatcgaacaaattattacttaaagcaatcttagttaatcagctaaatctgcgtcatctgaatgagattgacttcttcctttcgtaaagtaattattgtaaaaatctttttgtaattccatcgtacgaatcaattcttctgtctcttaaaaagggccagtttcttcggatgtactcaattctttcctgatcaatttctgcaatcaatatttcctctttatccgaagatgcttgagcaataattaccccttgaggatcggcaacgaatgaagatccccaaaattcaattccggcagattttgaatcttgcttttctagtccaatcctatttactgctgctacataaataccgtttgcaacagcatgcccgcgctgtacagtttgccaagattcaatttgcgccttaccatgttttttcttctcatgcggatgccagccaatagccgttggataaaatataacttcggggccctgcaaagcagcgaggcgagctgcttcagggtaccattggtcccaacaaattaaagtggatatttttccaaacttggtattaaaagatttgtaacctaaatcgccaggagtaaaataaaatttttcataatatgcaggatcatccgggatgtgcattttcctatacattccctcaatcaaacctttattgtttattacaacggttgtgttatgataaagcccgctagctcgcttttcaaataaagaagcagcaaccacaactccaagtttcttacaaatattggaaattgcatttgtggaagggccaggtattgtctcggctaaatcaaaattgttaatgtcctccttttgacaaaaatattgcgagcggaataattctgggagacaaattacattagctcctttttttgcagctttttcaatccaactaacagctttgttcaaattgacggaaggactttttccaagctggatttgaattaatcctatattaaatttttttagtttttgcatcttattctttcagtttaatttttcttgaataaatctacccgattcatcaaattccttacttgaaacaagtttgccttttgcataattctcaacaaaccaaagcgacgaatcatttctaaaaattttggtttctccatccagtaaatttgatttgtagttttgctctgtccataaatttccattttcgtagaatgatttcgtgattccctctctaaatccattgatgaaattactttcaagcttaactaatccgttttgataaaattcataaattacaccattcagatgcccaaataaataatttttaattgacattaaactatcattctcatagaattctttcgtttcaccatgcagatttccttccaaataattataaagaccctttaattttccattttcataaaaccatttagttaatccattttgaagattatgattgaattgtgcttcaacttttacctggccatttttataaaaatctcttgcaattccttcttttccaccgtcaacaaaaaaatattcacatttaatttctcctccttcataaaaggatcgatactgattcactagtgagccgttgagataatgcccgacttcattcaatgcgccattttcatgaaatgttctaaattctccgttatatttattttcgatgtaatggacatattctctaagaattcctttctctgaaaacgttaacgatgttccgtgtttctttccatttttataattaactatttcttgaataattcctgtttcagagtaatacctagcttcaccttctaattttccgttaacataatattcgatcttctttaatataccattcgaataaaatgttttgatggaatcggactgcgcaagtattattgattgtacaaaaattaaaattagaagatgaagtaaaaaggaattcatttaataactcttacttgatattaagtttccttgagaatcatactcgcgcgaacgctgcagcactccagctaaatagtactcttctctgctcaaagttccagagatgttataaattttaacccagccatccagtaaattgtttgaatacaattcttctcggtgaactgatccatctttatgaaatacttttcttaagcctactattttcccattttcaagtatttcttctgactgcatgactccgttagtatgataagttttccgactaccattaagttcatcatttctataattggaagaagattctaaaattccgttgggataataggtcaaagcaattccatttttcatgttttgctcataataatattcggctttaagcgacccattttcaaagtattcttttgttattccatgctggataccttttataaaatcaagctctgcttgcagtattccattttcaaaatatctaaaagattttccatgcaaagtatcatttacgaaatgccatacttcttttaaatagccgctgtcataataggtcttcatttcatcttgtttcttaccattgcggaagaatatttcttctttcagcgaaccattttcaaaataattctttaaggttttttcctcctcctcaaattttccttgataatcgtatttcattcgattaacgatctctccattcttgtacaaatcctttacacgtaaatttccggcaccatcgtaaagccgtacttcaccttcaattttgtcattaacaaaattcgcttccaatgcaaccatattactttcgtgatatactatagttctgccgttcaagatgccgtctacgaaatatcgagatacttcgggttttccagacttgtagtaagttgttgatctgtcctgcaataagccatttacataattccattcaccctgcagctccccagtcttataaaatgtttttgtaactccttccaattttccgttaacataaagctgttcagaccaaagttctcctgtttcataataccattttgatatgccttctttaataccgttgtgatagttccactcaatactaataatcccgttctgaaagtaccaagttgaaatgccttcctctttgccgaagtagaatttccactttttccataacttttcgtttgggtaaaactcgagatattccccatgaagctgaccattccaataatcaccttgagttttaatgctgccgcttgggtaataagtttttttaacttgaacagaagaggaatcttgtgcaattattaaggtacttaacaccgaaaacacggataaaaataatatactgcttttcaaaatatccttttttgttgttgcaaaaatctgattaaaatctttgcaaacttaagatttattggtgataagaaaaattgaaatatgcttggataagctttaataaaaaagtttgggaatgcgcttttgaaaaaatgataaataaaacatttccaaaatcgctgcaaaattattttttgttaatgcttcatatgttaagctttgatttttacaactgcaaattgtaagttgtaaacagtaataaaattatgcttctatttttaccttctgacgggaatctgtgtttgggagtacagagtcgattcttaacatctttgaaaactaaaaggaatggtaaaagcatttcaaaatttattttctttaaagaagcaatcccgacacgaagtcgggactactgtaaatgttttcacaacggaataatccttattgtgatttttgctttcaaattacaatgcaattttaatcaatgataaaattaaacgcaatatctgggagagaatatgaaaaaaattctaggacttgacttgggcacaaattctattggttgggctttagttgaaaaacctgaagaaaaaaaagaaataggaaatattctaggaatgggcagccgtatcatttctttaggaaaagataaaactaatttcgagcaaggattatcattaacaagaaatgctgaaagaagaacaaaaagaggtacacgcaaattaaataaacgttataaacaaagacgcaataaattgatctacgtattgaatgaattaggaatattacctgattttattcaatgggaaggtgattttccaaatccagataaaatccagcaactcagccttttgcctattcccaaaagttttaaacaactcaatgctttcgaattgtatgaactgaggaaaagggctctttctggaagaatagagatgaaagaatttggaagattgctttacttatttaatcaattaagaggttacgctggcggtgaatccgagaaagaagataaaaagaatttagaagatgacaacgagagcaaagatgagtcattaaaaaaatatgaatcctttgtcgatagagtaaaaatcatttcacttaaaaaagtaggaaaaagaaaatctagaagaaaaaaagacaacaataaagaaataccggaatatgaagcaaccattcaaaaaagtgacggccaagaattgattggcaaaactattttagaaaatttaaaagaaaatgatgaaactgaattagcgctcacaattcgtagaaataaaaatggagaagtaacttcaactgagttttctcttccatttaaatccagctggcgaaaacaaatggaagatttagaaaaagatctaaaggaaaaaggcgaacctcaactgggagaatacttttatgaaaaactaaaagaagataaatggtttaaggtacgttcacgtgtgatattaagatcacgttataaaagagaatttgacgctatatgggatgaacaagctaaacactatgattggttaaataatacatctcggtcaacggttgaaaaaattgcagacttcattttccctggaacttcaaagaatcagcaaaaatatcacaaagaagctattgaaaaaggattaaaacacataataaaagagcaaataatttattatcaaagaccattgaaaccgcaatttaagttaattgctaattgcagatatgaaaaagaattgaaggttattccacaaagtcatcctctttatcaagaatttaaaatatggcagcaaatcaacaatctcagtataaacactgtagcagaagttaatggaaaaaagttttacaaggatagagaactaacattagaagaaaagaaaacgttatgcgaaattcttcaagagcaaaaagaaataaaccatagttccattcgcactaaattgaaattgaaagataaagtagactatctcaatggtttacatattaaagcaaagctaaagggaaatgagacaaaaataataataaaaaagattctgggagaagaattatatcaaaaactaaaactagaagaactaggtaagctcactgcattatggcgaatattgtacaactggattaagaaagagtatgacgaaaaatcaattgataacaacgagtatgaaaaaaatccttctttttatcacgaatatgatccaaatagtgataatgaatatgatatgaatagcgaaaggataaatgcaataaaaaatttcatatctcgaaataattctagtaaaattgattgtagtaccaatgaggaattaattaagacaattgctaaaataaggtttaagcgatcttatggtgctttatcagaaaaagcaattaaaaatattcttcctttgatgagagtttgggattcagatactacaaatggaatatctgaagaagtaatagtgaaaattgaaaatttgaaaaccggtgaagttgatgataagattgacaaggcgcttagagaatattgcaacagatctaatgttttaagagacggaggtatgatttcttcttatgctacaatgcttgtttatggaagtcatacagcagaaaaaataagtgttgattattccttgaataattatcacgaaattaaaacacttgagcatagaaaagctttagacccgaataatgctgaaaaatataccttgagaaatccagtagtcgaacagttaaccaatgaaacattacaaatagtaaaaagtatttggaagcattacaaagttaagcctgatgaaatccgcatagaattagcaagagaattaaaaaataatgctgaagaaaggaataaaatttataaggcagttttaaacagcgaaaaagaaaacaataggatcagggaaagattaattgagttaaaacattctttaccacttgaaaatacaattgtattaaatgaaaatccttcgttcagcaatattgagagatataagttgtggagtcttcagacaagcgaatattcccctgataaaaaagaaatcgaaaaatataaattgtgggaagaacaaaaacatatttctccatatactatgaatcctatcccattaagcagacttttcacgaaagattatgaagttgaccacattattccaagatcaagattctttgatgattcactaactaataaagtaatctgtgaagcaagtattaatgaagataaaggaaatagaactgcctgggaatacattacatctggttcatcgttacaaaacatacttaaagaagaagattatgttaaacatataaacgagattttcttcggacgaaaaaggaaaaatcttttgctaacaaacattcctaaagattttattgaacgccaaaaaaaagacacacaatacatttcaataaaagttaaagaggaattaggaaaaattgtaggaacagaaaaagttttaacaactactggtgctgtaacagattatttaagacaacattggggattaaatgataaactaaaagaagtaacaaaagaacgttttgcagctatgggaaaaatttgcggtgaagaatggatcagttatgaatttgatgcagacagaaataagaaagtattaaaagttaaaaattggggaaaacgatatgaccatcgacatcatgctgttgatgcattagtagttgcatgtacagaacaaagtcatatccagcggcttaataacttaaataaagaattacatatatggctaaaagaacataagaacttaataccagaaagttcagatgattctggagaagatttgttggacaaattcattagtcttcagaaagaaaaaagacaaaaagtgttggaagaaatgaaagaaagttttgtgcactttgatttgccctggagagattttcctaaacaagcagaggaaaaactttcttcaatagttgtatcacataaaccaaggaaaaagcttattatccaaaaaaatcctaaagatggaaaagatatgttgagaataagaggtggctttcatgaagaaactctttatggtaaaggtgaaacatatagattaccgctcctcaaacttaaaggtaagacaaaccttgagaagtttattactgagaagatagtacagaaacatattgcagacgaactagagaaacatttgaagaaatttggttcaaaggcatttacaccagaaggtgttatagaattcaataagttccgtaagggaaacaatgaacaccctatcaatgcagttagagtgaagtattcaaaggatgagagtggcggtgacgaaggaaaattacaaccattagaaagaaaaaattatccgccaaattcaatctatgtaaaaactggagacaattattgttttgcagttgtcgaacaaaatgataagaggaaatttagcgtgcttaccttttttgatgcagtaaaacttgtgaaagaggaaataaaaaaagacaataaaaacttagacaaaatcattaacaaatatttcaatgaaatttgtgaagaaacaaaaggaggaaaattcctttttaccctttctcaaaacgatcttgtttatcttccaaatggtgaagacgaaattattccattgcaagaagatgatgaaaacttctcggatttttggaacaacaaacttgacagaagtagagtatttcgaacagttaaaatggatgctaaacaaaatctttgttactttgttccacatacacttgctgaggagcttgtatatacgccagtaacaatcgttgatctgctaaataatcaagacgaatcacataaaaataaacgtaagtattatgaattcggttcatataaagactgttccccctattattttgacaacgcttatctagaaaatatgttgagtaataaaagaaaaaaagaaataaaagcgatcaaggaaaaggaaattgataatatttttgctaaatatttctctgttacttctgcaaacgattcaaattcaaataaccttcttttggaaagtttagctgaatttgtcatcaataatcctgacattgacttacttaaatatatacgaagtaaggataaagctattgcacaacttgtaaagaaattaagcgatgaagaaattctaactattaaatccagaaataaatctatgctttctaaaccaataagaatacaagatacatgtatcaaacttattgttgataatcttggtaacataaaaccactcacatgataaaacgaactttatacttcaacaatcccgcttatctttcaaaaaaagatgagcagttggttattaatcgaccagaagttaaagaaatgagtgaaaataccgttgattttgatcccaaccaaaaatacaaagccaggggaaatgaaaacacgattccgatagaagatattggaatattaattctcgatgaccatcaaataacgctttcgcatggattacttgctgcattgctaaataataactgtgcagttgttacctgcaacagcaagcatcttccaactggattgtttcttcctctcgagagccaccaggagcaaagcgaaagatttcaagcacaaatagaagcatcagaacctcttaagaagcagctctggcagcaaaccatcacagcaaaaatcatgaatcaagcaatggtgcttgctaagcggcaaaaggaaaatgataatttaaaaagatgggcgaaaaaagttagatcgggagatcccgataatcttgaaggaagagcagctgcatactattggaaaaatctttttcctactgcattggaatttatacgagatagatatggccagccgccaaataacctattgaactacggttatgcaattcttagagccacggtcgctcgacaactagttgcctccggacttctaccaacacttggaatccatcatcacaacaaatacaatgcttattgtcttgctgatgatataatggaaccatatagacctttcgttgatgatttaatagcaacatttatagaagatggagaagattttactgaacttacaccatcaatcaaaaaacagttattaactattccggcaatagatatttctattaatggagaaagaagtccattaatggttggcttgcagcgaacaactgcttcgctggctaaatgctatgctggtgaagcaaagaaaattatttatccggtgtttggaaattcaccctaaatccctctcttaaaaagagagggacttttaaaaataccacctctctttgtaaaagtaggattcggaggatgagtccaaatattcattttgtctgataagaattcaccgtaatgcttatttttaaaaagatggactcttttataaatattttactaaaagccattagttagaaattcatggccataaggttaaataaatgatttcaatgtacaaccttatgtatttgaactcaccctaaatccctctcttaaaaagagagggacttttaaacataccaccccttctctttgtaagagaagggggcgtgggatgagttttagataggtaacaaattaaaacatatcattatatgagcttaacacgaaaccctaaactagttgaaattgcaaaaatgttatgcagagaattacgcaagaaagccactgagacagaaaagatgttttgggatgccgtgcgtgatagaaaatttttaaataaaaagttttataggcaatatccattattctttgatttctttggtaaagaaacattttacattgcagacttttattgtcatgaatgtaaaactgttgtagaaatcgatggtggttatcatattcggcagaaaaattacgatcagcttaaaaatgaagtcatcaaaactatgggtattaaagtagtgcgctttacaaatgcagaaattcaaaagaatttaattattgttctaacaaagctaaaagatgaattaaaaaatgactcactttaaagtattagtttgctctgaaagatattataaaatataatcttttattccccttctctttttaagagaaggggcaaggggttgagttccttagccaataaaacaactatgaaacttaacgagtacagaattatgtgggtattagtattttttgatctgcctaccgagacggagaaagacagaaaagcgtacacacgattccgaaaagaattgatgaaggatggtttttcgatgtttcagttttcaatttatgttcgtcattgttcgagtaaggaaaataagaatgtacatgtaaaaagaataaaggcgatacttcccgaaaaagggcatgtgggaatattgagcatcacggacaagcaatttggaatgatggaaattttttatggtaagaaaaaggaggaaagcggcttcattgaagcccatcagcttgaattattttaacccgtccagttcctccccttaaataaaggggaggacaaaggagcagttctcagttaatattaaaacctttctaagcaatcagtcctaagcagttactcattttttcaatcctaaaatcgccgtaagtctttataattcaatgaggaactaaggggtatattggtcttaatatcctcaaagaataatttgaaagcaaatcacaacgaactagcacgcggctacctgaatagctttattggtcttaatatcctcaaagaataatttgaaagcaaatcacaactacgtcggtgtctgtttgattctttttagattggtcttaatatcctcaaagaataatttgaaagcaaatcacaactcagtgagcgatatgccttccatatcaagcattggtcttaatatcctcaaagaataatttgaaagcaaatcacaacgtacatc

SEQ ID NO: 1626 - DNA, 23216 bp, synthetic construct
  misc_feature 1..23216: note = Synthetic
  source 1..23216: mol_type = other DNA
cctcccctcgccgacgagaggattggactctttaattttcttccattcatgcggctgttggttcgactctcgctccttctcctgttgccactcgcaacgaatccgccgatgagagcggcggattcgttggtccgctatgaagcttcccatcaggccatgggcacggtttttacggttgccgcttatggctcagacagcgcatatctcgaagaggtgacgcacgaggtcttccaggtcatcgatcaactggatgaccagatgagcaactataagccgacgagcgaactctcctccatcaatcgtgacgctgccgcacatcctgtcattgtggaaccagggcttttcaagctgcttcaggattcgctccaatacagcagggacagcggcggagactttgacatcacggtcgggcctttgatgaaggcgtgggggttctttcgtggtcaggggcgattgccctcaaaggaagaacttgcagaggccctgaagcgaatcggctatcagcacataacgctcaatcccgcgactcgcacgatcagctttgacgagccggggattgaaatcgacctgggagcaattgcaaaggggtacgcggttgatcaggcggtgcaggtcctgcgcgacaacggcattacacaggcgctggtttcaagcgggacgagcagcatctatgccctcgggtcgccgcccggagcagatggatggaagatttcagtgcgcgatcctttggatgtaaacaaagccgtgtgcgtggtgaagctccggaacctctcgctgtcggtttcaggtgattacgaaaagttcttcaaaatcaacggcaaaacctatgcgcacatcatggatccccacaccggaatgccggttgaaaacatgctttcaacggttgtggtttcgccttcggcaactgacagcgacgctctatcaacttcgttctttgtcgaaggccccgggcgcgctggcaagtatctgcgtcgccatccgaacctgacagcggtttttttcctgccagccccttcgggccacgccttcaggcggattacgttgaaatccagcgtgaccgatcttccgcccagttctcttgtaacgattgattgccagtagtttcactgccgcagttcgggatactacaccccagtgccgtcatgacagaggttacctcaggtctaagaatttgagtcaagagtgaaaaaggggaccaccaccggctggggtggcaagtagggcctcccgagacgaaaacctcccccaactgaatgaagagcgcaaggccatcaaaaggtccctgacagggcccttggtatcgtacgagtgtgtgggaaattctatgccccagcggccgaaggtgcccctttttcaatcggcgcatccaccaggttgccccattccgtccagcttccgtcgtagttgctgaccttttcgaagcccagcagatatttcagcacaaaccaggtgtgcgaactcctctctccgatccggcagtatgcaatcgtttcccggtcagcctgcagcccctgcgaagcgtagagattcaacaattcatcatgcgacttgaaggtgccgtcgtcattcaccgccttcgaccacggaatattaatggcggttgggatgtggccgccgcgctgggctgtttccgtcatgcccggaggagcaatgactttgcccgtaaactcgtctggcgaacgaacatccaccaaattagcgtccttcttgtctaagaccttaaagatctgttcgcgctttgcccgtatgctatggtccggactgcttgccttgtatgtggttggtgtgaccttcggaaccaccgttgtgaagggacgaccttccaactcccatttcttgcgcccgccgttcatcagccttacgtccttgtggccgtagtatttgaactgccaaaaagcatatgcagcaaaccagttgttgttgtcaccgtaaaggaccacggttgagtcgttagagacacccgacctgctgcaaagttcctcgaattcccgctggccaagcagatctcgacggacgttgtcctggagctgtgactgccagttccagccgatggcgttctcgatatggcctttctcatatgcggtcgtgtcaacatcaacctcaatcagccgcactttcgggtcattgagatgctgcgagacccaatctgtggttaccagaacctcaggatgcttgtaatcgcccatgctatctcttacctcctgcctgaatttatacggaaaatttggagaaatccgtgggtgagaaaaaaagagaggcttcaacaacaacagatgcaggcgaatgcgcccctaagcaaagctacgcttgccccatctttcagcatggctaagtttatatcacagcggtcccggattagcaatcacccaacaccgggatccttgctaggtcctcttttttgatgggcttgcgtggcccactgaacaacaggtgctgcaaaagacctcaagtccaatgctaacaagggcttaagctccacaggaacccaaggtttcggcccactgtaaataacacgaaacgcacgacttgacggtaagcgacaaacctgctattatggttttatcgcgggacagtaacaattctgcaactggctgggatggttatgattagaggaaccagacaaaagcaagccaggcgatttccccgaccaaggaaggcttcaaccgtccgtaggccggcgagaacctcacaccgcgagaattcccgcagtggcgcgctgacagcgaagacgcgaaccgtcggcaggcccgctttccagacccctccaaagccggaggatttagagcgccaagcagcccttaaggtctttgataacgccatcaggcattttcaaaagaaggactatgagagggcgattcctcttttccagaagcttgccaatagcccggtccgcgagatagctgaccgggcgaggatccacttgcggttttttgaaagcaagcagcgccaggagacccctccgaagactgcagaagcgtattacgctcggggagtggctgcgctgaacagccgggacttcgatcaggcgcttcaatacctcaccaagtccgataaattaaatcccaatcaggagtacattcattacgcactggctgccgcttatgggctgcggggggatgccgaccatgcattcagccacctgaaaacagccatcgaacttcgtccgcaaaaccgcacccaggcccgccatgacgaggatttccaggttttggcaggcgacccgcgcttctcgcaacttctgggagccgacgcccagccatctcgaaactagcgcggccagcacaaactccttcagattggaatttcccagcgcgccaaagcaagtgcacagtatgaaagttgtcgcaatcggcggtggaaccggtttggccgttctcctgagagggctaaagcaatatgtcagcgccggcaatcctgttgttggaccggcaatcactcaactgacggccgtggtcaccgttacggacgaaggaggaagttccgggcggctgcggcgggattttgggatgttgccgccgggtgacattcgcaactgcctggtggcgctcgcggaagacgaaaaaatccttactcgattgttcaattatcgattctccgcaggcgggggtcttcgcggacacagcctcggaaatctgttcctgacggccttgacgaatctgaccggcgacttttctatggcggtcaggcaggcgagtgaagtactggcggtccgtggagagatttttccagcgactcttgctgacgttcacctcagggcactccttgccgatgggaggcgagttgagggagagacccgcatccaccagacgaaagtgcctatccaaaagctctcgattgtgcctgagcaatgccggccgatgccggagactctaaaggccatcgcagaagccgacctgattacgctgggtcccgggtcgctttatacctcgctgctccccaacctgctggtatcccgcatcccacagcagattgcgcgctcgaaggctacgaagatttacattggaaaccttatgacgcaaccgggagagacacgaggttacaccgctgctgaccatcttcaggcaatctttcatcacgtcgggaggaacatctttgactttgcggtcctgaacaatcgagcgtttcctgcctctatgcgaaggcggtacgccgccgaagatgcagagcctgtggtcaatgacctctcgcgggtccgcgaacttggagtatctccggtttgcgttcctttgcttcaggcccaggatggtgtggcccgccatgactcgcagcgactctcgcgtttgctcctcgaccttaccgcgcggcaccagcgccgagcaagggttgctcccacaagcgacaaggcggctactcgagcctcatgctccaaaagttctgccaattcagctgaatagcaggattaagaacactgtgttatcgtttatacgtactataaaaactattcatttcacatcccgccccatgaggcccgaaaatggcatggctggtcggaggggaagtgtctaaacccattgccatggagtacacggaaggcgaatggcggggcggactataccgccgtgaggaacatgatgcctgtggtgtcggcttcgtagccgatcttaacgccccagcatcccaccgtgttgtcgagcaggcgcttgaatgtcttaaatgccttacccatcggggcggagttgatgcggatggcgcaagcggcgacggggcgggaatcgccgttcagcttccatcagaattcttcgcccgtgaggccttccgcctcaattccggctttcaacctcactggcgcacggccgtcggggtctttttcttcccacgcgacggcgtggcccgcgcgcgggccatgtttattgccgaggaagcggtccgcaatcgtggtctctacgtagcgggctggcggcaggttcccgtcaatccggatgcgctcggtccgcaggcgcgcgagagccagccggcgatctggcaccttctggtggcgcagccggccgaccaggaacgcgaatttgagcagaacctctacctgacccgcaaggaaattgagcgccgcttgacggaggcgaagattgggaactgttacatcccttcattttcttcgcgcaatattgtttacaagggtctgatggcaccctcgcaacttggggccttttatcaggatctttccgacccggaattcaaaacttccgccgcgctttaccatcagcgttacagtacaaacacttcgcccacatggtttctggcccagccattccgccttgttgcccacaacggcgaaatcaatactttgctcggaaaccgcaactggatgcgggcccgcgaggcggtgctcgagcatcctgtctggggaaatgaatcggaatggctcaagccggtgattcagcccggaggcagtgattcagccagttttgacaacgttctcgaacttcttactcgttcaggccgcgctgttcatcacgcgctgctgatgatgattccagaagcctgggaaagttcggttgaaatccccgcggacgttgaggctttttatcattaccactcctgcctgatggaaccgtgggacggaccggccgccatggcttttctcgacggcccacttgttggtgcggcgcttgaccgcaacggcctgcgccctgcgcgttataccatcacgcgcgacggccttgtcgtccttggatctgaagtcggtttgctgcctatcgaaccggaaagtgttcaggaaaaaggaaggctcggtcccggccagatccttctggtggaccttgaacacaaaaagatcttcaagaacgagcaactgaagcggcaggtttctcatggccgtaaataccggaaatggattcggaacaacatggtgtttctgccgcgcttcaaggccgaacaggaaagagcggcagacctcacggagtcccgcctggccgctcacgaccgagcaaccttcgtggcattgcagcgtgcggccggctacaccgaagaagacatcgagcttctgattaagcctctcgctgaaatgaagaaagagcctgtaggctctatgggcgacgacacacctcttgccgcgctttcccaccgcccccggcccatttaccattatttccgccagatgtttgcgcaggtgacaaatcctccgatcgacccgctgcgcgagtcgctcgtgatggcgctgaatctctatctgggcgcgcggcattccgtgctggtggaatcacccgagcacgctcggatgatgcggcttgagtcacccttcctgttgaattccgaactcgaagagttgaagcggctgggcgaagagaaattcaagccagtcacggtctcgacgcttttccctgtagcacaggggtcggatggaatgacggcggccatcagccgaatcaggcaggagtgtctggcggccgtgaaacaggggagttcgatcctgatcctgagcgaccgtggaattgatgatgagcacgctgcggtgccgatgttgctggtagtcggcgcggtggtcgagcatctgattgcggaaggcgttgggaacaaggcagacctggtgctcgaaacagcggatgcctgggagtcacaccagtttgcctgcctgatagcatacggcgctgcaggaatcaatccttaccttgccatcgaaattgtggcggatctcgcagcacggggtgagcttggcgagatttcagtcgcgcaggccttggaaaactaccgtggcggcgtcgaatccggtcttaagaagatactctccaagatgggcatctcgaccctggcaagctaccagggcgggaaattcttcgagatcatcgggcttgatcacgacgtcgtaaaggaatttttccctgacactcgctcgctgatcggcgggcgcaaactggtcgatctggccaacgacgtgatcgcccggcacatggaggcatttcctgcccgcgccgagaaacctgagttcgcaggctactatcgcttccgtaaaggctttgaaaggcacgcattcaatccgcaggtggttcgcacgcttcagaaggcagcgaaagacaacgacgcggaaagctacaaggcgttcgcgcatgaagtcgatgaacgcgagcccatgactttgcgcgatcttttccgcttccggcccggcaagccgatacctattgaggaagtcgagcccgttgaggccatctggaaaaggtttacgactcaggccatgtcgctcggagctttaagtcccgagacccagcacacgctggccgtcgcgatgaaccgcatcggcgggagatcgaacaccggcgaaggcggagaagatccgaacgtttactacatcgaactcgaaaatggcgattgcgcggaaaacaagatcaagcaggttgcctccgcccggtttggcgtgacgcccgaatacctggtgcgcgcagagcagcttgagatcaagatggcgcagggttcaaagccgggcgaaggcgggcagttgccatcacacaaagtcacgcccatgatcgcacgcgtgcgccgtgccgtggaaggcatctcgctgatttctccgcctccacatcacgacatctattcgattgaagacctggcgcagttgatttacgacctgcgtgaaatcaacccgcgcgccacgatcgccgtcaaacttgtttcgcaggcaggcgttgggactgttgcctccggcgtggccaaagccaatgccgacgttgtcctgatcagcggacacgacggcggtacgggcgcgtcgccgctcatttcaataaagaacacgggctcaccgtgggagatgggacttgcagaagcccaccagagcctggtggcgaacggcctgcgaagccgcgtgcggttgcgtgcagacggcggtttgaaaacaggaagagatgtggtaatcgccgcgattctgggcgcggatgaattcgggttcggcacggcggcgcttgtcgcacttgcctgcgtgatggcccggcagtgtcacctgaatacgtgcccggttggcgtggccactcagcgcgaagatctccggaagcgttttccgaatgaaccggagcggctggtgaattacatgcgctatgtcgcggagcacgtccgcgaaatcctcgcagagcttggtttccgctcactcgatgagatcgtgggacggacagaccttctggttccgagtgagtacaaagttcccggtcggcgtggccagttggaccttcgtccgctgcttcaccgtcccgatccggaaatcagaccgagtgttcgcacgcgcacaccggcgcgcaatctcgatccgctggccttgcgtatggcggaagacgtcaaagaagcgctcgccacgggcgagtccattgtgcgtgaatacaccatccgcaacacgaaccgcacgatgggcgctcgcgcggcgaacctgatcgctctccggtacggaaaccgcggactgaaagatcaaaccatcgaattccgcttcacgggaagcgccgggcagagtttcggcgcgttccttactgagggtctgcggctggtgcttgaaggcgaagccaacgattacgtcggcaaaggactgggcggcggcgaaatcattatccggccgccgagggggtctgagttcgcatccagtgagaacgtgattatggggaacgcggtgctgtacggtgctacggccggcaagctgtttgccgcgggccgtgccggagagcgcttcgccgtgcgcaacagcggtgccaccgccgtcgtcgagggaacaggcgatcatgcctgcgagtacatgaccggcggcatggtcgtcattctcggagagaccggacgcaacttcggcgcaggaatgacgaatggtgttgcctttgtgttcgattcttctggccgcttcgagcaacggtataatcctgaactcgtcaagattgaacgcgtgatcgaacccgctgattctcagatgcttcgccagcttgtcctcgcgcatgcggaaaagaccggcagcgctgcagcaatgaagatcctcgaaagctggtcgcacagcctgttgtccttctggaaggttgaacccaaatcgaagcccgccggccactcctccgaacccgtgccgctctcttcaaaccaaaccgcaagggtgtagcacgcgacatacgctcttacatgcaaagaaagcctcgttgattcgcgtcagaccttatggcacggcgatgacgattccgcgtaaaaggacggattgcaatctttacacgctgcgcggaatttcaacaaagttcctgccctgaggtgatcagaaaatgggaatgttctataagttattggttatctacaacttacaaattagcattttgatgttgcaaaaatcccacacgtcccatcaggcactacaaatacctttagctagcctacataagagggctatccaggggcaatcccgtctcccttgcctgatgctccccgacggattccgcgagcgctcgcgctgacgaaattctactcggcccgacccctcgaaaggcggtggtcgctctatccccgacttcttgaccgatgcccctgagagcgcagccaagcaacccgccgaactgattacggcctttcacccccgcaccaataaccgccgcatccaggacacgcaatcctcccacgcgtgggacggtggacgcacgggcggcctcgcgagttttggcctccccgaaatgtcctcccgcctgggagatttctgtcggaacttgaactccgggtccgctccattgaggattttccggtcgctttcagtacccggccttgaaacaaataaggtcttatcgcaatcacccagcggagtcatcacgcatctttccggctcccacggggcttgcactccgtggcctgccgaccgccgctaaaacaaaaaaccctccgtcgccggagggtctgtgtgggcagtctttgcgtttcagggttgcccagcccgcacgagataacgcttaggttttgcctgcgataagcgtgatcccgggatttgctacacgctccgaattgtggtaaaaaatccgccagttgtcaagagcgaaaaagcaatatcacgcggggcgccggccccgttcaggagagtgccatggaccgcatatggggatttgatattgggactacttctgtaggcttcgcagttgttgaattcgacgaagaaaaatcggaaggccgaattatccacgagggcgttcgcattttcccggagggccgcgaggaacggaagctcgaaccgcggaaccaggcccgccgcgccgcacgcctgttgcggcggcaggtccgtcgccgtcggctgcggcgaaaattccttcgggaagcctttgccgaggccggcctgctgccgcgcttcaacacgccggaatgggacatctccatgtgcccacgccgcccggctggaggacggttgctccgccccggtccttatgagctgcgcgcccggggtctgcgcgagcgcctcgagcccgcagagcttggccgcgcgctttatcatttgtgccaccggcgcggctttctctccgcccgccgcgtcgaggagcggaaggacctgagcaaagcacgcgaaaaggaagaaggcaagatcaaaggtgagatcaagggcctcgagcagaagctggaaggccgtccgctcggcgagttcctctatctcgccagccttgaaaaaaccgaccgcgaccgacttatgagcgaatggaaagttgagaacacctacctgcgcaaccttgacaagccggagcgcatccgcggccgccacatcggccgtgaaatggtcacggaagaattcgaccgcctctgggaaacccaggcgcggttccatcccgatgtgctcaccaacgagctgaaggaagaactccagagcatccttctctatcaacgccccatgttctggcggctccagacggtcggccggtgctggctggagccaggcgaacccgtctgccccaaaggttcctggctcggccagcagttcctcatgctccagcacgtcaacaatctgcgcgttcgcttcatggggcggccgccgcgcccgctcgacccggaagaacgcaaagtccttctccaaaaactccagcgtcagcaagacatgacttttgccggcgtttcatccgccctgaagaagctctggaaggagcgcgggctgcccggcaaacccgaaatgaatctcgaaagcggcggcgagacccgccttcttggcaatgctgtcgaagccaggcttgcaatggtcttcggcgatgcctgggactcgcacccgatgcgagaacgacttcgtattgaactttatccgcgccttttcgccatctacaaccggcaggttggtaaaaagcgcatcgagctccatcgtaaggacgcgttcaaggacgaagtcactcccgccagggcgcggtttgttgaggaggcccagcgcgacttcagcatcactcgcgagcaggcggaacagctttctgaattcgagcctccctcgggctggctgcgcttttcggagaaggccatccgcaagctgctcccttttctcgaaaacggcctggggcttaacgaaaagggaggtgcactcgacctggcttatcccggctggcgcagcgcgtccagccacacgcttgaccgcctgccttcaaaccctaaggtcatgcccgttttgcggaatcccagtgtgaaccgcgctttgaatgaactccgcaaggtggcaaacaacctgctgcgcacctacggcaagcccaccctgattcgcatcgaactcctgcgcgaattgaagaaaaccaaaaaagagcgcctcgagatcagcagccgctacagcagaaaccggaggagccgcgaggaggcgaaaagcgacctgaaggaaaaaggtatcccggccagccccgaggccattgaaaaatggcttctctggaaacagtccgacgaatactgtccatacacgggcgccaaaatttcgtttgatgccttgttccgccgcggcgacttccaggtggagcacatcttcccactctcgcgctcgcttgacaacaacctgctcaacaagacgctctgcgcaacggacgtgaacaaagccaaaggaaatcaaacgccctatgagtacttccgcagcaggcccgaagagtgggaggccatcaaggatcgcctcgagcgatgggtggagaaaggcacattcccagaggagaaaatgaaaaactttttgcgcgaggactaccccccggggcaggaattccttgaggaccgccaaagggccgatgccagctacattgcggtcgaggcgcgaaagttcctggcgcggctcggcgtgcccgtcgaggtcgtgaacggccaagtcaccgctcagcttcgttcccgttgggggctcgacgccatcctcaatcccggcaatcccgaggtcaagaaccgctccgaccatcgccaccacgccgtggacgcgctggccgtggccctcacctccctcgccttcgtcaagcgcctttcagactattacgcgcggggcaaacggggcgaaaagcccaggctgccccaaccctgggaaaacttctttctggacgctaaagagaaaaccgaagctgtcatcgtctcccatcgggtccaacgcaaagtctccggtccactccatgctctaacttattacggcgatacaggaaaggaagagaccaatggcggtattacataccgcaaattcgtctttcgcaagcggctcaaggacatttccaaatcggaaatcgaagatatagtggacccggaaatcagacgcatcgtcagggagcacgccgaaccatacggcggcgacctcgagaaagccattgccgaaaaaggtcttcccgtcctgcccgacaacaaaaccggcgagaagcgcgacatcagaaaagtccggctctgggttaaacagcaaaaaagactgatggttcctgtctggcccaaggctaaggcaggaattgagccaatgacttttgctgaccccgccggaaaccatcacatggccgttttccgcctggcggacggtgacgttcattttgagactgtgacgctttttgaagccgcaaggcgattgagggccggggaacccgtggttcggcggacttccgaaaatggcggtgaattcgttatgtcactcgcgcccggggacgcgctggaattgccggctgaaaacggggcaaaggcttaccggatcgttacgagcgtgtgggcctcggggcaaatcgtacttgaagaccacacggaggctgcgggcaaggtctggagcaggccgaatccggcttccctattgcgaatgggcgcacgcaaagtccgtatcgaccccatcgggagagtgcgcccggccaatgattaaccatggagtgcggccgcgaagctgccgcctttaccccgcgcgacgctacggcggcgtgcggtggggatactgaacattccaattcttcggaggatctggttccagccggaatacaacgcctttgattccaagcgctgcagctggcgttacccacttcagggagggagaatgatcaagcgtatcattgaaatctcttccggcccggcgcggctctcgattgcttaccggcaacttgtgatcgagcgcgacgggcaggagaaaacgacggttccgtgtgaagacattggcgttcttctggttgatcagcaggccgtaacctacacgcacgcagtgttcgcaacgctggccgaggcgggtgccgcagtcgtgctctgcggggcgaaccacaatcctgccagcttgctcctcccgcttgaaggcaacaccgtgcagaccgagcgtttcgccacgcagattcaagcccccttgcccctgaagaagcgcctttggcaggcgctgatcgcggccaaaatccggatgcaggctgccgtgcttgaggccgccacaggcgaagacgccggccttcgcgcactcgccgcccgcgtgcgttccggcgacccgggcaactgcgaggcccaggccgcgcagcgatactggccacgcctgctcgggccggactttcgccgccgtcgcgacgggcccccaccaaaccttctgctgaattacggctatacggtgttccgggccgccgccgcccgagcgctttgcgcggcggggcttcttcccaccgtcggcatccatcaccacaaccgctcaaacgcgttctgccttgccgacgacatggtcgaaccttaccgcccttacgtggactggcgcgtccgccgtttggtggacggcaaggcacagatcagcgagctggatcgcgagaccaaggccgcgctgctcagcctgttcaacgaggtcattcccgtcggggggcagcgctcgcccatgctgctggcgttccattcaactgccgcttcgctcagcaactctttccggcaaggcgagccgtcgctctcgctgccggagggtctgccgatggctccaaaggaggaggaggaggatgaagaaggaaaggagcgcgtggccccttaggccctttgcctgggaaaccatgtgggtgttggccctgttcgatcttcccgttgacaaacccgagagccgcaaggagtatgcgcgtttcaggaaggaactcttgaaagacggcttcaccatgatgcagtattccgtctatcagcgacactgcgccagcctggaaaacgcccatgtgcatatccacagaatgggcgcggaagtgcctcctcaaggggaggtccgcttcctcattatcacggaccaccagtatggaaagatccttacatttcgtgggaaaaaacgcgcccccgagccgccacagcccacgcagctcgagtttttctaacccatggcaagccctgatgagcgggcttttcagccgcttacgcgcggcctagtgtagcaaatcccggaatcaccgcaaaccgcagcactggagcgagtcgttcatcctgaagataagtgtagcaaatcccggaatcaccgcaaaccgcagcaagctcctggtgttggttgtgcttttggcagtgtagcaaatcccggaatcaccgcaaaccgcagcgcgcttgcgaaggcgtccatcgcgcggagcagtgtagcaaatcccggaatcaccgcaaaccgcagcgcactgtcgtagttaagtgttgaaccccagagtgtagcaaatcccggaatcaccgcaaaccgcagcatccgcattatggaccttatctatgtattcagtgtagcaaatcccggaatcaccgcaaaccgcagcggagcgcgatagccaacgtaactcttgctggagtgtagcaaatcccggaatcaccgcaaaccgcagcccggcgagcgttcgtttgccgctgccttcagtgtagcaaatcccggaatcaccgcaaaccgcagcaaaaattcttcgagtagcaaatggaagcggagtgtagcaaatcccggaatcaccgcaaaccgcagcggcctgccgaagctctccaagggcgaacgagtgtagcaaatcccggaatcaccgcaaaccgcagcacgatccacgggttgtgtaacaggcgctatagtgtagcaaatcccggaatcaccgcaaaccgcagcctgcctctcagtccacatccgagacccgtgaagtgtagcaaatcccggaatcaccgcaaaccgcagcgaggctgcaacgtcaaagtattccgaagcagtgtagcaaatcccggaatcaccgcaaaccgcagcgagcaaggggatgtcttcaatgtgcagttgaagtgtagcaaatcccggaatcaccgcaaaccgcagccagccctggtgcttccgcaatggcgccggagtgtagcaaatcccggaatcaccgcaaaccgcagcgcggtaagcgaaaatgcagatggacattgagtgtagcaaatcccggaatcaccgcaaaccgcagctgtaaccggacaggtgaccctcaactcgccaagtgtagcaaatcccggaatcaccgcaaaccgcaacccggcgagcgaagctcaaggcatggggggcgccatggcaagtttataattccgaggctgatgggttttcgaattccaaggcggtagctggcgctaccgcgctccaaggaggaggaagctatggccgactggccacacggtccgatgcatcgactgactgacgcaggggcttacatggtgacgtgcggcacttacttgaagcttcaccacttcctcggtgcgaagcgcctggggcttctctgtgatgcactgctcacggaggctgcgaagcatgggtggaatttgcaggcttgggcggtcttccccaaccactatcattttgtgggcatggcttcaccccagtcgaaaccactgcctcagttgatcaagaagctccattcagaaaccgcgattgccgcgaacggatgggacggcacgccggcgcgaaaagtttggtttcagtattgggaaacgagattgacttatgaacgttcatacttcgcccggctgagttacgtccatcgtaacgctgtccatcatgggctggtccgcgagccgtcgctttatccgtggtgctcggcagggtggttccagcggcaaagcttcacggctttctacaaaacgataatgacattcggcatcgagcgactgaaggttccggacgaatttccagtggactggtcgcccgacgagccgtagtcccttggagtgcggcagcgaagctgccgcctttgccaacgcggtgttacagactcaggccgatgctgggcaaacacatggttatgattgcaagccaactgcagggattttgacttgcaaggcggtagctggcgctaccgcactccaaggctgccaccttcaccaacgcggcgttacagactcaggaccgtgtcgcgcaagcgcatggttgtcgtcgcaaggcaattgcagggaatttgattccaaggcggtagctggcgctaccacactccaaggctgcagcttttgccaaagcgtcgacttcccacttcgaaacggaatatgtgatactgatcactctgatttgtgatgcaaatcactgtgcagaggatatggttggtagaaagtagctatttaaattcgaacgtacagaaataacagttagaacgaaatattcagaatattcgaagcattcgctatggagctgacgaaagcaaccgagaaatttgtggctctgtggggagaaatggctacgaggtggggcgtgaatcggactgtagcagagatccatgcgctcttctacctgtccagccagcctttgaacgcggaagatgtcgccgcggcgttgtccttttcccgctccaatgtgagtgcaagcctgcgggaactggagaactggggtctgattcatcccgtgcatttccgcggggaccgcaagcaatactacgaggcgatcaaggacccttgggagatgttccgggtgattcttgatgagcgcaagcgccgcgagatcgacccgactgtggcgacgttgcgcgcctgccttgaggaagtcacggcatccacgccggcggatttgtatacgcaggagcgccttcgcgccgtcctggagttttttgaggtcatgattcctttatatgacgagctccggcgccttccgcgaggtcccattcagaacattgccaagctgacggcaaaaataagggaggtcatcgggtgagggttggattcgaccgccccgggaccagggcgtcagttcttcccgcggagccaccgacaacgggttgcacaatcagcgaccggaagacttgatcgttgtgctattgcggctgccgtcgcgcgggcgcaccgagtacttgaagaaatcgaagatactcaagttggaggaatgttgcatggttttcataaagcgtttcactaagttaataggaataggtattggagtcacagcattggcattcatcggcaactcgaaagcgctggcaattaccagctttgcaaggcaaactggattgccgtgcagttcctgccacacgattccgccggaactgactccctttgggagagcattcaagttgaatggctacaccttgacaggtctgccccagatcacagccaaacccgcccgtcaggaggcgggcctgagccttagccgctatatgcctattgcagcttttattcaattctcggaagcaggaaccaatcgccctcaggcgggtacggagaactggaactttgaattcccacaggccgcaagcctgttcctggccggagccatgtcagaccatgttgggagctttattcaggttacctatgacgcccaggccgaccacttcagttgggacaacactgatgtccgctatgccaatcgaaggacatttgcgggcaaagatctggtatatggcattacgttcaacaacaatccgacagtggaagacctttggaatgacacgccagcctggggtttcccttgggtcgctcccaaccaaacccctaccccaatggccggttcgctcatcgatggcgggctcgcgcaggacgtcgcaggtttgggcgcctatgcgatgtggaatgaccatctttacggcgcggctgcgatttaccgctccgaacacatcggcaatccgcaacccaacaccggcgtcaattatggcatcaatatacgtggcgcagcgccttactggcgattcgcgtggcagcaaacgatggggaacaattatctggaagtgggaacttacggcatgcatgttgcctccacgccaaatgcggtggtggggccggaagactttttcaccgacgtggccgtggattcccaatacgagcgcattctaccctcgttgaacaacaacacgatttcgatccatacgacgtacatccacgaggcctctgacctggatgctacatttgctgcgggcggggcagcattcccacaccacgatctaaacactttcaaactggacggcacgtatcacttccggaataagtatggcgtcacggcgggttacttcaacacgtggggaaccgcagacccggtgctttacgcccaggccccggttagcggcagcaacaacggagatcccaagagtgacggatatatcctgcaagttgcctattggccgtggcagaatatcgactttacagcccagtacacgggatacttgaagtttaacggggcgagcacaaattacgacggcgctgggagaaacgcttcagacaacaacgcggcatatttcacggcatggtttattttctgacagtcgtgcatgttgctttgccgcacccacaaagcaacatgcatgacttccgggctgccatcgagtcaatgggaagcagagatgcgttgcgcattgaggatgagggccattggagtcgatggtaacgcctttgggcaaaccgcctctgccattcttgagtgattaatgaagacgatttgcacaatggctgaggccaggagaatttaaatttccagagaggcaagtcaagcatcatccaggtgactctgatcccgtggatgctaatctaatttgataattcttgagcagttcgaaacttttgcgggggttaatacgagaatgaagataaaacaatttacttggatcctcaccctgactgccatttacttatcgatatggggcttatcaaatagcgtcttgttagcggggaacgcgccgggttcaccgggccaatcggccaaaggagccgccggcgagatcaccggcaaggtcctttttgaaggaaccaagccagaacttcaggaaatttacatgaataaagaccctgagtgcgtacgggaaaaccagggacggaaagtgtacatacaggacggcgcggtcaattccaacggaactcttcccaatgtatttgtattcatcaagtccggattgggaaaggcgcactttgccccccccaaaactcccgttgttctggaccagcagggatgcatcttcgtgcctcacgtgctcggcattatggtcggccagactctgaaggttctcaatagtgatttcaccactcataatgtgcacgtgatgcctaagaacaatccgcaatggaacgaatcgcagccgccgggtgccgctcccttctataagaagttctcgcatccggagatcatgatccctgttggatgcaatgagcatccctggatgaaggcatacatcggcgtcgtttccaacccgttctatgatgtcacgggaaccaacgggacctttaccatcaagggcgttcctccgggcgagtacaccattgaggcctggaccgcaaccttcggaacgcaggagaagagcgtgcaggttcgtgcgcacgaatccacaacagttgactttactttcgaacacaaataggggagacgcgcggtcatcagcagggttaatctgacctgtcatcatgggaacttctcgggattggactgaagccggtttgattttcattgtcgctggtgtcatcgcgactcttgtttcatgcacgtctggccgtcaggcgcagacccaatatccttcttacgtaacgtcggggcagtttacgacggcgcacccggacatggtggctgcggcgaaggactactttgacatctatcccaggcatgtccagcagccgatcgccttcacgcaccaggtccacttgaaaaacgggatgcagtgcacagattgccacaaaggggtggcggaagggccggatgcgaccatccccaacgtgcaactctgcatgacgtgccatcaggttattgccaccgacaagccggaaatccagaagattgctgcataccagaaaaagggggaggagatcccctggcatcgcgtttactggttctaccagtcagcccacgtaaggttcatgcacgggccgcacatccgcgccggcatcgattgcgcaacctgccacggcgatatgaagcagcagacggtggcggtgcggaaggcggggctcgacatggggttctgcgtcgcatgccacaagatgcataaggccccgacggattgcacaacatgtcatttttaaaggcggctgcaccaagaacgccacaccaacaaagaggattatggaccgtcgcaactttctaaaaatctcagcggtcggcggcgccacggcagcgctcgacgcctgcggcaagcccgaacggcagcttgtccgctttattcctgaggaagaactggttcccgggattgccacgtggaagccgggggcgtgcacgcaatgtggagcgggttgcgggattctcgtgcgggtgatggaaggcgaggccgaagtgacccgccacgggcaggtgggccttctcagcatggggctggcgaagaagctggaaggtaatccctatcatcctgtaaaccgcgggaagctgtgcgcgtggggccaggcaggattgcaggtgacatacaatcccgaccgcgtccgttttcccatccgccgtacgggcccgcgcggttcgggcgaatatcaggaagtgagttgggacgaggcgatcaacgaacttgtctcgcatttgccgaaaacgaagccggcagggaaaccgtcaccgctgattttccttaccgagccgctgcatgatcatcgcggcgtgctgatcgagcggttgcttgcggcgctgggagcgccggctgcggtcaagtttgagttttttgaacaggcggtgctgcgccgcgcgaatgaattgagtttcggccgttaccagttgccgactttcgatctgggcaacgcgaattatgtggtttcgctgggcgctgatttcctggggacgtggaattctccggtggcgcagaaccttggctacgggacgatgcggcagggaaggccggggctgcgcggaaagtttgtgcaagtggaagcgcggatgtcgcagacgggcgcgaacgcggatgagtgggtttacgccaagccggggacagaagggatcctggccctgggcttcgcgcacgtgattttgaacggaaaactggggccggcagcgggcgcaggcggagtgggagcgctgatcgatgggtggtcgaagggcctgcccgactacgcgcccgaaacggtggcgaggctgacgggtgtcgaagcggcgaggattgaacgcctggcgcacgagatggctgcgcacccgccggctgtggtccttatcggcggagcgcctctcgggcagacgaacgggctggccaacgcgctggctgttaacgcgctgaatgatttgctgggcagcgtcgaaaagcccggcgggatattcttcacaccgcaacctccgatggctgatctcccagcggcgcaagcggcctcctcggtccaggcgctttgtgatggaattctgaagggctcgacgtcggtggaaacactgctgatctataatgccaatcccgtttttgccagcccgccggcgtggcgggtgcgcgaggcgctggaaaaaattccgtttatcgcgagcttcggtagctttgtggatgagacgagcgtcctcgccgacctgattctgccggaccattcgtacctagaatcgtgggttgatcatattcccgaatcgggaacgacgcaggccgtcgcgagtctcgctccgccggcgatgcagccgctgcaccacacgcgcgccatgccggacattctgctggacgccgcgcatcaactgggtggcgacgcggcgaaggcgctgccgtggaaagattatcaggagatgttgcaggcagccttcgaaccgctgcgcgcgcatccgggttcagtttcggccaagacatccgacgatttttggagcacaatacagaagaggggcggctggtggggcgctgagaatacaagtcctctcgtgaggaagaacttggcacgctcgtcggccgccccgatccgtgttacagggccgcagtttgacgggtctgcgcaggaatatcctttcaacttcctcccatacgcttccatgcagtttggagacggccggcacgccaaccttccttggatgcaggagatgccggacgccatcacgacggccatgtggagcgtgtgggtggagatcaatccgaagacggcggcgaagctggggatccagcagggcgacctgctggaagtcgcctcccaacacggcaagctggaagcgccggcgctgctggcgccgggaattgctccggatgttgtcgcgatgccggtgggccaggggcacgaaaactacggccgctatgcaagccgacggggagcgaacccgatcaaaattcttgcgccgcagaccgaagccgaaaccgggtcgctggcgtgggcgtccacgcgggtgaaggtcacgcgcctgggcaggaagggagaactgattttgtttgccgggggtcttcgggaaattccgcgcaaataccgccatcgctaaggggaacccccggaagccgggaaggtcaaacatatgggacatcgatggggcatggtgattgacgaggaccgctgcacgggctgcgaagcgtgcgtggtggcgtgtcacgccgagaacaacattgcgacggcgggggacaaggaagctgcgcgcggtcgcgtgaagcattgga

SEQ ID NO: 1627 - DNA, 17642 bp, synthetic construct
  misc_feature 1..17642: note = Synthetic
  source 1..17642: mol_type = other DNA
ataatttaaccaccatgttgggagtaaactgaataccgcatcaacaccgctggcaactgatacagcaatagtaagtacataatcaataatcaaagcactaccagagatcacgccagcattaggtccaagtaaatgagttgcaaccttatatccaccgccaccagaaggaaaaagttcaattacttgattataggcaaatgaaattaaaaaaaccgtgaacgcggttgcaaatgccaaataaatcgcgattccggtatgatgtcccaatgctaagtatgcttcttccggcccataagcggaagaagataaaccgtctgcaccaagaccaatccaagcaattaccgcaatcaaggcaatatgctcttttacctgcggactcgccgcatttagaggtttaccaattatgatattttttaacaatcgcaaaaagcgcatataacttttccttatgagttttagagctaatgaaactatattatactacactgtgaatcgttacattgcaatgcacaacaaactaattatttattttacctaacccgcttgacgattagttatctaatcaggtaaaatcgcgccttaaacaaatttttgctacaaaagcacgccgagggggtgattcaggtaggcgctaactgggaagcgcactaaaaataaactcagaaaagtacgctgttctaaaacagaacactttaggataaaacaaataaataaaattttaaaggataaattaatgcctgaaattaaagttcgtgatactgaatattttgaagttgcccttcgtcgttttaaaaaagctgttgaaaaagctggtaccttaactgagctacgctctcgtgaatgttacgaaaagccaacaacagaacgtaaacgtaaaatggcagcagccgttaaacgtcactacaaaaaaatcagatcgcaaatgttaccaaaacgcggtcattaagattgagaagctacgaatttcgtagcttttttcattttaaaattaaaatttctgacgatcgaattgcatatggattaaaatacaccctaatatggtttagaaagtttcatgatgctaaaacaacaaattattgatcaaatctccaaccaaatggcaaattttgccaaaataaatcctttaaatgacatagaaaataattttaaagctattttgcatgctagcctagaaaaattggatttggtaacccgtgaagagtttgaaacccagcaaaaagtcttaatcaatacccggaataaactcgatgaattagagcaaatcataaaggctttggagcaaaagcaagcgtaatgagcattgccaaactttactcacgtgcgctaagcggcatgcgtgctccgcagatcgtagttgaagtacatgttgccagtggattaccaagcttctccatcgtggggttaccagatacagaaattaaagaaagccgcgatcggattcgctcagcgatacaaaattctggttttgattttccagcacggagaattacggttaatctcgctcctgccgatttaccaaaagattccagccgttacgatttacccattgcaatgggaattctttttgccagcggcttagtaaaaacccgccaaaatttagaagagtttgaatttgctggagagctcgcactggatggagccctacgcccaataaaaggcgcgctggcaatatcttatggaattagtcaaagtaagcgccaattaattctgccagctcaaagcgcagaagaggctgctttagttaaagatatgcatattcgggcggctacttcattacaagatgtagttactcacttcaccacttcacaagaattacctgtaattaccattgcaagcatagtaaaaccgattagtgattttgagagtaataacgatggattccaacaagtaaaagggcagcttagtacaaaaaaagcactggaaattgcagccgcagggcgccattcggttttaatgatcggaaatccgggctgtggtaaatctatgttagctagccgaattacaagtattttaccctcactaagcactgaacaagctatagcaagcgcctcactccaatcgctgagtacacaaggctttcaactcaatgactgggcaagagtccccttccgtaatccgcatcatagtacatcaggagttgcattagttggcggcgggagcaatcccaaacctggcgaaattagtctcgcgcacaatggagtgctatttcttgatgaactaccagagtttgaccgtaaagttcttgaagtattgcgggagccacttgaagcaaaaaaaataagtatcgcccgagcaaatcatcgtgtagaatacttggctgactttcaattgattgcggcaatgaatccgtgcccttgtggttatgcaggacacccgcaacaaagctgcacttgttcagtcgagcaaataaatcgatatcgtgctaaaatctcgggaccacttctggatcggattgacattgtggttgatgttccatcattaaacacaagtgaattacagcagcttccgaatggcgagagttcagagctaattaggcaacgcgttattaatgcacgcaaaattcaattacagcggcaaaacaagttaaattacgaactggctaacgacgaaattgagctttactgtgccttggatgataaagcaaagaccttaatgcagcaaataattgaccgtaattcgttatctgctcgtggttattatcgtcagcttaagctcgcaagaacaattgccgacttagctgaaaacgaagtaattaacagcgcacatctggcattagcaagccagtataaacgaaatatttaaggtgtaggaataaacgtgaagtttttcattggattattaattggtatcggaattgctggtgccgtagcattttatttgaataaagcccaaaatccttttgttgacaaaggattcaataatagtagtgttaatcttagtgcgagtgctccagttagctcagctcctctaatcttagcaccaggtaccaaaatgcagcaggcaagttccgcacctatagcacagcaaaataaaccggaagcatcaacacctagttatgatttctatgatgttttacaaggtaaaaaagatattaatcccaaaacaacaacagcttcggcacctgaagcagcagctaagccatcgtttattgttcaagtaggtgcatttagcgagcctgatttagctaataatatgaaagctaaattagcactcttgggatttagttctaaaattaaatcacaacaagtcaatgataaaattattaatcgcgtaataattggcccatttgccgacgaagcagatgccaatgatttaattgctcaattaaaacaacaagatattaacgccacccttattaacaattctaactaaaaggactattgcatgaaaaaaaccttacttgccatactgagttcagcattaatctgtcaggtttttgccgataatattactattacacaaggtactgattatactgttttatccggaccaattagtaaaccgcttccgactaaagcaggtaaagtcaacgttactgaattttattcatacgcatgtattcactgttcggttttagagccaatcttagacaaatggtatgcaggaactaaaaatgttgatttaaatcgcattcaagtggtgtgggataataattttagcggatatgcaaaaattaacgctactgcacaagcattaaatctaggtgctaactttaatcaacatgtttttgaatcaacaatgactaatcataaaaacctagaagacaaaactcagttgcaagcatttttaaatgccaataaatcaattgtagaccctaagaaattcatggcaacttataattcttttactgtaagtactaagccgcaagaatatgcacagtacactatggcatataacattacaggcacaccaacttttattgtcggtggtaaatatgtgactagcccagcacaacctgagaaactgataaaagtaattcaggcattagttgataaagttaaaaaagaacagaaaatcaaataagaggatctcatatgaattttgaattagctcgttttaacatgattgaacaacaaattcgcccatggaatatgtttgatgagaaggtgcttggattactcaaaacaatcaagcgcgaagagtttgtcaatcaatcattgcgcaatttggcattatctgatattgagctacccttaccaggtgagcaaaaaatgcttttccctagaattgaagcacgcttactgcaagaactaaagctacgcaaaaaagacaaagtattggaaatcggaacaggtagcggatatgtaactgccttacttgcaaaattaactgattttgtttacagtttagaaataaatgaacaaaacaaacaatttgcagttgataacctcactcgtgccggaattaaaaacgttagtattattgaagcagacggaatggttggtctagctgctaaagccccatttgacaaaatttttgttggtggagcactagctgaaattactccagaacttaaagcacaacttaaagttggtggtatattagtcggcattgaaggtgttgcaccgattatgcatgcggtagttattgaaaaaattagcgagaacgaatataagcaaactcaactatttgagacttatgtcgaaccattgtctagtgccgctcctcgcggattcaaattttaaattgtaactactaaatagaaagaaattaaatggctgataatgataaagcaaaagcgctgcagatagcactctcacaaattgagaaacaatttggtaaaggttctatcatgcggatggacgacaaacaggttgccaatgacatacaggtaatttcaactggttcgctaggaattgacttagcccttggggttggcggtttaccacgcggacgagttgttgaaatttttgggcctgagtcatcaggtaaaactacactatgtttgcacgtggtagcagaaatgcaaaaagcgggtggaacctgtgcctatattgatgcagaaaatgctttggatccaatttacgcacgtaaactgggggtaaaggttgatgaaatgctaatttctcaaccagatactggtgaacaagcactagaaattgctgatatgctggtgcgtagtggcagtgttgatctaattgtggttgactcggtggctgcattagtacctaaagctgaattagaaggtgacatgggcgacagtcacatggggctacaagctcgtttaatgtcacaagcattacgtaaactaactggaaatatcaagcgtaccaataccttggttatctttattaatcaaatccgtatgaaaattggcgtgatgtttggttctcctgaaacaacaactggcggtaatgcacttaaattttatgcttcagttcgtctagatattcgccgtactggcaatattaaaaaaggtgaagatataattggtagtgatactaaagttaaaatcgtaaaaaacaaagttgctccaccatttaagcaagctgaatttgagattatgtatggggaaggtatttcgcgtaatggcgaaataattgatttaggtgttctaaacaatatcgtagaaaaatcaggtgcttggtatagctacaacggacaaaagattggacaaggtaaagaaaacgttaaagagtttctaaaagaaaatccagctattgctgcagaaatcgaaggaaaagttcgtactttatctggagttactgtagccgatgttcctgttgaagagcgtgacattgatgccagtactgacgcggaagagctttaattaaaataattggcgtaactaataattacgccttttaaactctgctcatgaacaattctaaaccaatcaatctctatgctaaagccttagattttctttcacgccgcgattattcatttcgagagctgttcacaaaactccagaagtattcggaagatattgaagcgattaaagtagtcttagaggaaatggtcacaaaaaaatttctcaatgaagaacgctatattgagaactatatcaatgctaaaagccagaaatttggcgcacagcgaattaaatatcaattaatgaataaagtcgcagatcaagaactgattaacaacatctatcgacaagcaaatattgatgaatttgctacagcaaaatcaatttggttacgtaaatttcatggaaaacaacctgaaacggctaaggaaaaagctcagcaaatacgttttatggttgcacgaggatttagcttggatacagttctcgatgtcatcaaaatcgctatagatgataatgtagactgatttttattcaacttcttgtagattttaattcaatccatttctgataaatcatctgtggtaaaatttagccttgaaatatttttataaaatttatgtgaggacttatggaacaacaaatgtcaattatatcactgattactgatgcatcacttgctgtacaggcaattatgggattgcttgcaatattctcagtagtttcatggggtattatcatcagcaagtggatcgcattatctaaagcaaaatcagaaactgtaaaattcatgagccaataccataatagtaatagcataacaacactttataactcaatcagtaccgcagcaaatcgcagcacaacctgccagatgttttatgccggactgtctgaatataaccgtctaagtaaaagtggaatcagcaataaagatacaatcacgactaacattgaacgttcattaaccgcgaccattgacgatgaattaaatagctacgaaagtcgcttatctactttggctacttttggttcagttagtccatatatcggattgctcggtaccgtatggggaatcatgcatgcctttattggtttaggtaatactggacaagctactcttgcctcagttgcacctggtattgccgaagcattgattgccacagcaattggtttgtttgttgcgattccggcatatatgggttacaataaattttctgcggatgtagaaatgcttgagaaaaaaatgaatcgctttggtgatgagtttttgaatctaatcaaccgtaaattatctgcaaccagcaatcaggatatgtaacgatgcattctcaagctgaaatagataaatttaatgatcttgcccatgaatggtggaatagtgatggtgcatttaaaacattgcaccaaatcaatccgctacgttgtgaatttatccaaagacacagcgagttaaagggtaaacccttgctcgatgttggctgtggcggcggaattttatccgaagctcttgccaaacttggtgcacaagttagcgctattgacctagctccgcaatcaattgaaattgccaaattgcatctttatgaaagcaatttatcgattaattatgaatgtattgaagttggtgctaaagccgctcaatcaccagaaagttttgacgtaataacgtgcatggaaatgctcgagcatgttcctgatccagcttatattattcaagagtgtgcaaaattattaaaatcaggtggaatggcattcttctcgaccttaaaccgtaatttcaagagctatgcgctgggtgtaattgctgctgagtatgttttgaatcttgttccacagggcacgcatgattatcaaaagtttattaaaccagcggaattacgtagtatgttaaaacaagctgggcttgagttggttgcgctgagcggaatgacgtataatccaatcagccaaactgcgacgcttagcactgataccagtattaattatatggttgcctgtcaaaaaatatgctaacaatcactaaatctgtaattaccccctatacaccagcacaaatgtatgccttagttagtgacattgccaattataagcactatttaccgtggtgccctagttcacaggtgcttaaaagtgaaggtaatcgagtcgttgctcgggttgatatttcctatctgaaagtaaaagctcattttacaacagaaaatattaatacccccgatcaaaaaattgatttaaatttggttgatggtccgtttaaacatctcaaaggtcattggatatttacaccgcttggcgaatctggttgcaaagttgaatttaagcttgattataaattcagtaacatcatcattgaaaaagtaatcggcgcagtttttgaatttgtaattaaaaacatcgttgatagtttcgttaaaaaagctcatgagatttaccgcaaatgattcaaattgaagttgtttttgccactagttccttacaaaaaattgttaccctagaagtagagccacaatgctctattgctgatgctattgcgcgctcacaaattcaagagtttttccccgaatatgaattactcagcttaccagttggtatttttggtaagcgtcaattcagtcccgaacaatatcaacttaaaaatggtgatcgcatcgaaatatatcgccccttaaacaaaactcctaatcaaaaaaggcttgagcgtgctcgtaaataaaataaaatctatttctatatcacttctttttgctacaccttgctttgctgcaccacaaattctaccgacaatccccaatatactaaaaaataaaattgcagttagtataatagatagtaacaatgcagatattatttatcaatatcgcgagtcaactccaatgcttttagcttcaaacatgaagcttttaaccagctatgcggcattacaaaatcttggggctaattttacgtggaaaacaacgcttagctatagtggtgaagttaaacaagataatctggatggtaatatctatctgatcggtggcggtgatccaactttgaccactcaatcggtaaccaatttatttatgactttaaaaaataatggaatcaacaccatacatggcaatttaattttagacactcatatttttaatcaaaatgtacccagtagcgaactctaccctgagccctacgccagttattcggtagatcccaaatccttattaattgatgaaaatctctcaactcttgcattgcacattaaaaataacaaaatcacgtttaacacttatcgtagtggtaaactaaaatttgataatcagttaaaattagttaattccaaatttgcctgtaatgacttaagtgattatgtcaacattaataaatcgcccactaatcctgcaaaaatacaaaagcataaaaaaatagctgactttgtgttaacaggcaatgtaccagctagttgcgatggcaaaaatattaacttctatatcttagacaccaaccagtataatcaacaacttattgctctgattttaaaacaacaacatatcaagctcaagggtaaaattataatcgctaatgcaccaccttcaaccataccaattgctgagataaaatctgccccactaacacaagtaatgtggcaaatgaataaacaaagtaataatctttacgccaaaagcatgctattaagtattggtgcatatcgatctccaaataatgcaagctacgaaaatgctaaaaacatctattatcaaacatttaaacaaaatctaaactttcccgaactcaaggtagaaaacggtagcggcttgtctcgttatgagcaattatctgctagccatatgacaactttgctctatacgatgtatcatgataaagaatccaccgattttatcaatagtctaccaactcccggtgaatccggtactctgcaaactgaatttggtcgatataaaacccagcttcatgccaaaacaggttctctctctgataccaaagcttattcaggctatttctatgcccgtaatggacatgtttatgttatttcatttttggtaaatggaatcagtcgtggtgatgttggcaaatctgaactacaaacatttaaacaattttttgcgaatagtttggaatctttaaatatgatcgaaagtaagaattaaccacgatataaatcaaactcaaagcacaagcgcacggaataagaccagaaaactaattgatattaattgatataacttatcttttgaggtacttattatgcgttatgtattaggacttgatttaggtattgcttccattggttgggctatttataatatggataactcaaatattgagaaatgtggtgttcggttatttgaaccaggggaagtaaaaggtgctagaaataatgccagcgcttccttatcagcttcaaggcgcctcgcgcgaggaatgcgccgcaggattcgtagacgcgcttatcgtatgcaaaagattaaagaacatctgattaattctggattagtttcaaaagatgaactagcaaatatgtttaatagtactagtaaaactaaatcaggtacctcacattatgatgtttatgagttgcgttacctagcactagatagttttcttagcaatcaacagttagcaagagttttaatccatttagccaaacatcgaggctttaaatccaatcgtaaaaaagataaatcagttgatggtacagttaacaaaagcttggtagaaaaccgaaaactattggaagaaaatggctatcgcaccgttggtgaaatgcttcataaaaatcagacctttgcagcaaataaacgtaatcgcttcggtgaatatcgggttatgcttcagcgctcagatattggagaagaagcaaaaataattttagaagcccagtatcaattaggaaatcaattaatcaatcaacaatttattgaaaaatatatcacgatgtttaactggcagcgagactttgccaaagcagaagatattcaaaaaatggttggtaaatgccaatttgagacagaagaagcacgagcacctaaagcttgtttcagtagcgaaaaatttatcgctttatctaaattaaataatttaatagtttcaaaccaaatcacccaagaaaaaagaaaattaacaccagccgaaatacagaaaataatagccttcattttagctaagaaagtgaaattttcacccaaaatctatttttcaaatctacgtaccattctctcattagaaaaagatgaatactttaactttattcagtataaaccgaatattaaatttaatgaacaagaacaaaaagaacaaattaaagaattatcgtttccagctactcatgagcttaaatggggaatttgtgaacatgctggagaagtaacttggctaaatctttttagtaataccacgttattagacacaattgctgttgaattaacttataacaaaactgatgaagctatccaaaccgcgctagaaaagtgttttgcaaagcaaaaaaataattttgataccgatagccaacaagccataatctcagctattttaaaagacggggttagtttcgataaaaatatcagcctgtcattaaaagctctacataaaatcattcctcacctcgaaaacgggcaacgttatgatgaagcttgcaaatcagtctggggacatcacagtcaaagaaatcagcaaccaaaccctaaattaccttcaattcaagcactaggattagataacgaattaaccaatccggtagtaatcagagctatttctcaagtacgtaaagtaatcaatgcagttattgataattatggttcaccataccagattaatattgagttagcccgagatattggtaaatctgtagatcaacggaatgagatcagcaagcgacaaaaaaataatcaagcgaataatgaacgtttaattgccgaatttgaagaagacttcgggcgtaaaccaatgaaggatgaatttaccaaatttaagctatggaagcagcaaggcaacaaatgtatctatagcggtgaatatatcaatcctgaaaatattttacacggtacccacgcaactgagattgatcatattattccccactcgcggagttttgatgatagcatgggtaataaagtactttgccttactcaggaaaaccaacgtaaaggtaatcagaccccatatgagtacatcggacaaagtggacataatgagcaagcatggcacaaatttgaagaacgttgtaagcttatgaataaaacaggctatcaactaggttttgacttctccaaattggatcgcttattacttaaaaaagttgataaagagggttttattgaacgaaatctgaatgatacccgttatatagctcgtttctgcaagaactatctggaaaaccatttacaattttcatatccggaagataacaataaactacgtgtacgtgtattaactggacaagcaacagcctttatccgtagccattggggcttaagcaaatcacgtgaggaaaatgatttacaccacgcacaggatgcctgtgtgattgccgcagtcacgactaagttggtacaaaacgtaactaagtatatgcacgaaaaagagtttagtgcagcaccacaaatacgttttgtcgatgaagatggtgttatccatgatcgcttcccaatgccaaatataaattttcgtcagcaaattattgaacgggtaaataaaatatttgtatcccgcatgccaaaacataagattagcgggcaagttcatctagatactatccgctcgcggaaatatgttgacaacccagtcggagaatataacaatggtaagccattttcaacgattagtaaacaactggctgatagcgggattaaattagataaagatggtgaaatccctaccctctgcccagcttataaacagcataatccaaatatttatagattactaaaaggacaattagaaaaacatggcaatgatgccaaaaaagcctttgctgagccattatatgcgccacgtaaagatggcacaccaagtgaagcacagataaaaaccataaaaattattcagccacaaaataccggcgtaaaagtgaaccaaggtatagctgataatggtggaatggtacgcattgatatattcaataaggaaggtaaaaactatatcgtaccggtatatttatccgaggttatcaaagcagaattaccaaatcgagcaattattgccaacaaaggagaagcagattgggaaatgatagatagtaatttcaaatttatattcagtttgtacccaaatgatctagttaaaataacgacaaaaaaagaaactttctttggttattacactggaaccgatcgagcaactggggcaatcacaattttacttcatgatggctcaaaagaaattcgcggtatagggataaaaattaatacactattagagaaatttcaggttgatgttttaggaaacatcacaaaagtcgaaaaagaaaagcgtcttgattttagtcagttacaatctcaaaaaagataaaacaacatgacttttcgctcggtgatgattagtaacccaagttgcctgcaaattaataaatcccaattgcagataactcaggacagtaacaaatttactgtaccgctccaagatattgcctgtatcgttttgaatcattatgcaatcaatcttagtggtgcagtacttagtagctgtgcagacaataatatcatattaattagctgcgataatacgcatctgccaaatggaatatttcatagctttttgccacactcacgccaaaacttggtattacaacgacagctaagtctaagccaaccgtttaaaaaacgtctttggcaaaatattattgaacagaaaattactaatcaggctagtgttatagaaaagatttacccagctagtatcgaactaacaaagctccggcacttggcacaaacagtgctatccggtgataaaaataataatgaagctcaggcaagtaaaatatattttccagaactatttggcagagactttatccgaataggcaaaaatcggaatacaagcaataatgaatatcaagaaataaacagtttacttaattatgcttatactattattcgtagtctggtttgtcgcgccttggttggttacggattattgccaacattaggcttgtttcatgataatcagtttaatgcctttaaccttgctgatgattttatcgagccttatcgaccttatattgactggtatatttatgagctggttaatgacaagcaaaccatggagctatcaccatcaataaaagctgcacttattgatattttaaatcatattattgtcatcgataataaattaactacgattttaaactctattgatttaatgataaaaagctttattagctgtattaatgataataatcatagcttattaaaattaccgactctcccgccatggatagagcgtagcaatatggattaatttatgttttctgagattcgttggatgagaataatagttttttatgctctaccagttagcaccaaacggctacggcagatttatcagcgttttcatagttatcttctcaaagaaggttatgatatgctgcaatactctgtatattgtcgcttatgcaatggacacgatgcagttgagaaatatattcgccgcatagaattaaatgcgccagaatatggcaacgtaagaatcatgaaagtaaccgaaaaacaatacagtcaaatgtattttttagtcggtcaaccatcaacacaagaaaagatcaacaaagaacaaaaacagttgttattgttctgataaagtagtttgacagttacagatgtcagctgtacgacttttttaaaatcttttgattcgtcttattatagcaaactaacaatttaagtaatggtatcccattattttactaaaattcactaattaagggtaaattttgtgtaaataaatcaaattttacattaaattattctatttattagaaataattcagtatattatgattagcatattttgccattacttaaattgttaacgagctataacacgcttgcttgtatttagcaaagttaaccgattttgccattacttaaattgttaacgagctataactgatactacagtgaatggtaatccaccaatattttgccattacttaaattgttaacgagctataactaccaagattgccaagcaattaaatctgcaattttgccattacttaaattgttaacgagctataacaggtcatccgacacaccctcaatctgctcaattttgccattacttaaattgttaacgagctataactatttaaccaatcttgcattgtattctgttattttgccattacttaaattgttaacgagctataacagttaattcacccgggcaaacatcaagtaaattttgccattacttaaattgttaacgagctataacccagttactgaatactctgttatgctgattattttaccattacttctctaatgacttctaaagcccattttaccactttcaacatcatacaaaatatcatagctaataaatggaatattacccgtgttaacaatcaaaggaaatgatcctgcaactttaaccgctgagtttatatagtaatcattgcccgtagcaaaagaccaatcaaatcttttactgccattaagctgttgcttttgattaatctgtgtatatttaggaaaagttccctgctcttgttgcccaacattataaatcgtataagctgcagtcccagtgtcatacaatactaagccagtttggctaagcgccgttattccatctactgatggatattctaccgttgctggcaaattgacattccacaatgggtacggtgccggattagactccgcttggggaattgactccagatcaatataatcaaatccagttatcttatctgaatttaaaccaatcatcagcccaggatgagaatggttaccatccacataaaaaccgttggcaagtgcaccaggtaattgagataatgggttccaaacaccatgggtacttccaccagtatacagagcaattcccatcaatccagcacgaccgctcgcagaaaatgcactcttaggacaatctggaatctgtggcaagcagctaacatttgtaatcagcataaatttgatattctctgtcacaccgccaatcgttacaggtccaatcgcaaccaaaccagtaagactaactccatcctgataactataactctcagattcagaagtaatagtgatcccagttttatcagcgatagcactttccaaaacccgtaaaccaaccgaaccagtatcaactccagcataaagtgaattgttcccaatcattaatggtgcatgtaatcccatagactcgccttgcaaattatagactagtggcactgaagtgatctcaggattagctactcgtctcaaaccaacctgaccattcaattgattatagagcacttgataaaaattaaaaatattatttccaacgttgacaattccaccattcgactcattcgcaaacgccgaggttggatcagtcaattgcaacgccattgagcccttgcttgtcataacgttagcagcaactgggttttttactttattattatcacttattaccaaccagtctggaagtggaataaattgaaagctgctacttgcaccgctatcaaataatgaattgaatgtcgactcaacctgtactccatccttagtcgcggtataattcacaggcagatgcatatcgttccagcataagttatttgatgaagaatgcaccgtgtatgaatcacatgcgctttctggcgcctgaatcattccaaaattactcatctgagcaggactaaaactaccaaatattaattggcgcgatggcatatccataataaacatttggttataaggatctggcaaaaacaattttaccgaaacattaccatccatccgcattcccatgattgcatgattttggctttctatattgctgattacaccatcaggaacaactacaatcggtacctgatcgctactagtcttaatcagcgtagcaccactttctgataaaaagctgactgaactataagcgactaaaccacttcgcttaatcataccatgatcgtataccagcgtaatactctcacctgtataacgaatattattaccaacataacttgactcaattacgtataaatctgatccagtatcaatttcagtcagagtatttttaccaccacccgcgctagtatatacagcaaatttacttgatgctgcatcagcataagtagttgctggtacactaatagcagcataaacttgattattctgtgatgaattgatgctaccgccaccacatgatgcaagagtaaatatactcgccaaaacactaattatagttatgttatttatctgatttttcagcatattaaaaccatctcctctgtttgccaacttatatattgctaaatatttataattcattattttaacaaattatgggagtatttatgaggttaatacttcaaaaccctgattttctaatattttaccaactcactctataatgtacagcatccatcctatttctaagctgccaaattttaaatatattaatgagcaaactagactagaatttacctatctcatctacatatatagtaaaatccagtttactattcttttatggtgctacgatgttaaattctaataagttcattttaattttactgatattttaataattacagttatagggtactataatgcacttgcattttataaaattaacctgagtcctcacttttttatgcttagaatagactaagcaatccctagatctttaacaagttggtaattagaaatgaaaaaaggcataagcacta

SEQ ID NO: 1628 - DNA, 8261 bp, synthetic construct
  source 1..8261: mol_type = other DNA
  misc_feature 1..8261: note = Synthetic
taattcgtttttttgctgccagcctttttgcggcagaacgttattatgccacaacaaccccatcacgtcaaatctttctactaactttatctcaagcaaaccacaaaccagcacacaaaaacacaatgatttaaccaccatatcaagcacatacagacaatatttaatacataattttattttaaatattttaataaatataagccaggtttgcaaatattctggcaaaaacagccattattagacctattaaccaaacaaaatagccaactcaacaatcaattatggctacttttcattgattaattaacttattagcttaatcagtgattgattatagttaggttataatatcgactactgcaaacttatttacttagaaagctgctacactaaaatgttaactcttgaaaccagcatattaatcgctatcattatagccagcgccgcttacgtctggcgcaaatcaagctccgcaaaaactgcaccaatattattagataaatacgataaattaattatctctttgctgagtattggttatgccctatttagttttattcacttaggttcatttcagcaatttaaaactacttggtctgggcaggaagcaggcaatcaactcaatatccaattcgctaccccaagcaaaattgggcacatttattattattcgggaattaacaatggtaaataccactggagtgatctaaataatgcaaaccaagaggagctaataaacgacccaacggctaatttaggctatccagcacattttaaatggaataagattgatttaccagtaaacgatgcactaattcaacaaattaatttaaccatcgatcaagctccgctcgaaattaaacagctcgcaatttttgatacaaacaacaactatatttcaaacctaaatattaaagctaataatagcgctgaaaacctgagcgggttgatcagctcgagtgcgccacaagattacgataatagtttttcctccagcaccgtttttgatgaaattttctatgccaccaccgcgtatcaactccttcatggtctagatccgtatgtggcagttcatccgccgttaggaatgattttaattgctcttggcattgcgatctttggcatgagtgcatttggctggaggatcattcctgatatttgcagcattttactggtaccattaatttatatttttgccaaacgcttatttaaaacccgccgagcagcaattattagcaccattctaatcatgagtgaatgtatgcactacacattaggcagactagcttttttagatggaattgtgacgttattcatcattttagaatattattatctatatagttatttagaattacgcagcaatggcgcgaaattcagcgcatgctatcgttcactttggttggcgggattagcatttggtttgggaattagttgcaaatggagtgccctttactcggcaattccaattattgtgattttactttatggcgagataattctggcgcgacctaatttacgccaatttctacattcactcgtaataaatttagtcttttttgtcgtgctaccaattagcatctattcattaagctatttaccgtttattcattcacaacccaatgaaaatgaactatttaaatttatctggcgcatgttgcaatatatgtatgaatttcaagcctatggcctacaaaatgccactcatccatatgcctcaagttggttaaattggccactcttaaaaacgccaatgtcaattttcttttggcaaagcagcaacgttccaaatttatccgcctccgctgtattaactggtaatcctttaatctactggttaaccttaccaatgcttgccatgctaactattcaagcctttagacaattgaaagattatcgcgcgtggtttttactattggtaattttggcacaatatttaccttatgctttcattaaacatattatgtttatttattatttctatagcagcgtaccgctaattatcttagggttagtgtatttaagtgaaactatgctagattggaatcagcgctgggtgcgctattgtgtctatggctatctactcgcagtaatcttgagctttattgcgtttctacctgccattggtggctttgaattttcacgcgactatgtggtgcactacttattttggcgcagtggctggaatttttaaattagactacgcagaatgtaatagttagcccagttttaaatgacacataatatctaaataataagcaatggatatactttttggttaaatatagccttgtgattttagcacgcaaggttatacgataaaatgatgtatttcttgtgtataatcatatacttgtaattttaattattcttgtctaagtttcgtttataatatctaattgaataattaacaaaggttacaagaagatgaaatatgttcttggtttagatttgggaatagcatccattggctgggcaatttataactatgacacctcacatctcgaaaggtgcggtgttcgtttatttgatgcagcagaacaccctaaaacaaaagaatctctatcgacaccacgacgactagctcgtggacaaagaaggcgaattagacgacgttcataccgcatgcaaaagctcaaagattttttaattaaatccactttaattacacaaaacgaattaaataacttgttcaactcagaagaaaaatcagcacctcaaacttcacgatatgacatttatgagttacgttatcaagcacttgatcataaactcaataatcaacaattaacccaagtattaattcacttggcaaaacaccgaggatttaaatccaaccgtaaaaatgataaatcagtggatggaaaagtcaataaccaactaaaagccaaccatcaattactaaccgaggaaggctatcgcaccgttggagaaatgctttataagcacagttcttttgctataaatcgcagaaatcgtttcggtgaatatcgtgttatgcttcaacgatccgacattgaaacagaagctcaaataatcttagggaaacaacaacaacttggtaaccaaatcattaacgtagaatttattgaacaatacattaagatgtttaattggcaaaaatcatttgattggaaaggcaacataattgatatggttggttcgtgtcaatttgagccaaacgagaaacgagcaccaagagcctgctttagtagtgaaaaatttattgcattatctaaactaaataatattaaatacactgaagattcaatcgaaaaaccactgactgcaatcaacattcaggaaatttttaactttgcattagccagaaagacaaaaacattcaatataacttttacagatattcgccgaatactaaatatttcggctgatgccagatttaattttgtaaaatataaatcaactgatgattttctagaaattgagaaaaaagaaaaaatcaaagaattagagtttaaagcttttcatgagttaaaaaactccattagtagttatgtcggtgaaatcacgtggaataatttaaccaataacattccgcttttagatgaaatatctattgctttaacatacaataaaacagatgaaacaatcgaaaaagccttagaaaaatgcttttctgacataaaaaataattttgataataatgagcaacattcaataatttctgctattataggagacggtataagctttgataaaaatatcagcctatcgctaaaagcattgtatcaaattattcctcaccttgaaaatgggcaacgttatgatcaagcctgtgaattagctggataccatcatagcctacaaagttcatcacgatcattaaaactgccatcaattcaagccttgggacttgatcaagaattgactaacacagtagttactcgagcaattagccaagttcgcaaagttatcaatgctcttgttgatacttatggttcaccctatcagataaacattgaattagcacgtgatattggtaaatctgcacagcaaagaaatgaaatcaataaatttcagaaggataatcaagcaactaatgataaattagtcacacaatttgccgattatttcagccgtaccccagctaaggatgaattaaccaagtataagctatggaaacaacaaggcggcaaatgtatctatagcggtgatactataaatttagctgatattagacatggcgaaaatctaactcaaattgatcatgttattccattttcacttagttttgatgacagtttgagcaataaagttttgtgcctaaccagagaaaatcaatgcaaaggtaatcaaacaccctatgaatacgtttctgctaatggaaccaatgacaaagcatggcacgaatttgaagagcgatgcgaaaattccctcaaacatggacggcaagcgggttttagttacaaaaaatatcaactacttctaactaaaaactttaatcaagagggtttcattgaccgcaatctaaatgatacgcgctacatttcccgtttttgcaaaaattatctggaaaattatctgcaattttcagatttagccgataaaaatagacagcgcgtgcgggtactcacaggacaagcgactgcattcattcgtgcacattggggactagctaaatcacgtgaagagaatgatttacatcatgcacaagatgcttgtgtaattgctaccgttacaactggtatgcaacaaaaaataacctctttcatgaaagcccgtgactttggcaaaaatcacgatgcaacttataccgatccagatacgggtgaaattttcgatgctttcccgatgccaaatattaattttagaactgaaatactcttgaaagtaaaagatgtatttgtttctaggatgccaaaacggagcattactgggcaggtgcacttagatactattcggtcaagtaaatacgtagataatccagtagcagaatataacaatggcaaaccgttttcaaccatagctaaacaactagtcgagagtggaatgaagttagataaaaatggcgaaattccaacgctgtgccctacctataaacagcataatcccaatatttataagttgttggttgacagattagagcaatttgacaacgatgccaaaaaggcctttgctaaaccaatttttgctccacgtaaagatggtgcaccaagcgatatccaaattaaaaccgtaaaaattattcaagcccaaaatacaggtgttaaagtgaatcaaggtattgctgataatggtggcatggtaagaatcgacatatttaccaaggagggtaaaaactatattgttccagtgtatttatccgatgtaatcagaaatgaattgccgaaccgagcaatcgtggcagcaaaaccagagaaagaatgggacttaatcgatgatagtttcaatttttactttagtttatacgctaatgacttagtaaaaataattagcaaaaaagcaacttattttggctattatacaggtacagatagagctacaggcggggtaactattttattacatgatggagctagggagtttcgaagcattggagttaaagttaacactactttagaaaaataccaagttgatgtcattggcaacattagcaaagttaatcatgaaactcgccttgattttagccagctgaaaactcaaaaatgacttttcgttgtgttatgattagtcaaccaagttatttgcaagttgcaaaatcccaactgcaaataactcaagataacgaaaaatatacagttccattgcaagatattgcctgcatagtgattaatcattactccataacgctcagcgcaactttattaagtgaatgtgccgagaataatatagtcatgataacttgtgataaaacccaccttccaaatggaattttccatagttatttaccccattcacgccaaaaccttgtcttgaaaacccaaatccagctaactcagccatttaagaaacggctatggcaaacaatcgttgagcaaaagattaccaatcaagccatggcattaaaacatttatgtccactaagcttagatataaacaaattaactcatttatcacaaactgtattatcaggtgacacaaacaataacgaggcacaggcaagccgaatatattttccagctatgtttggtggggattttactcgcataagtaaaaaccgccctgcaaccagccaaaatattgaatatagtgagatcaatggattgctaaattatgcctatactattatccgtagtctaatttgtcgtagtctcgtaggttatggattatcgccaacacttggactatttcatgataatcaactaaatgcatttaatttagccgatgattttattgagccttatcgcccatatattgattggtatatttatgctatcgttgaaactgctcaaaaactagaactatctactacaattaaggcaaggctagtagacatactcaatcatattgtgataatagataacaagctaactactttactaaattcaattgacgtgatggtaaaaagttttattagttgcattaatgaaaataattttcaactaattaagcttccgtcactaccacaattaatacaacgtagtaacatggattaacaagatgttttctgagattagatggatgagattaattgtattttatgatttgccagttacaaccaaacggttaagacaagtttatcaacgatttcataactatctattaaaagaaggttatgacatgttgcaatactcagtatattgtcggttgtgcaacggacatgatgcaattgaaaagcacatcagacgtatcgaagccaatgcccctgaacgtggtaatattagaataatgaaagttaccgaaaaacaatatagccaaatgtattttttggtcggtacaccatcaaagcaagaaaaaatcaataaagaacataaacagcttttactgttttaataaattaatgacagttacagatgtcagctgtacgactttttgtcttattatagcaaactcatggtttaggtagtgatacccagatattgtatcaaaaaatctcttgacatagttactttattacgatatttgttattttattaaataaaaaacctaaataatttcaaacatatcaatataataaagcatgttaactatatcactacctaaaccgtgaacgagctataacttgctcatgtttgtcatttttgtaaatttaactatatcactacctaaaccgtgaacgagctataaccttgggacaaagttttagccataacttaagactatatcactacctaaaccgtgaacgagctataactacagaatataaaaagcacattatcaaagtactatatcactacctaaaccgtgaacgagctataacaaaaaacacacaacagcaacaagcctggaaactatatcactacctaaaccgtgaacgagctataacctcaacttcttggagcatagtttgtgtatcactatatcactacctaaaccgtgaacgagctataactctaggtcaaagttctagccacaatttaagactatatcactacctaaaccgtgaacgagctataacataggagcatatagacataaccatagattaactatatcactacctaaaccgtgaacgagctataacaattacattattaaataaacaaattgaaatactatatcactacctaaaccgtgaacgagctataacccaataaagtgcattaaaaaccagtaaaaaactatatcactacctaaaccgtgaacgagctataacgttattgaagcgcttgagataattaaagaaactatatcactacctaaaccgtgaacgagctataacttcactctcaacaataacggcattttgcgcactatatcactacctaaaccgtgaacgagctataacgaaaacagcattattaacaaaatatgagaaactatatcactacctaaaccgtgaacgagctataacgcggatagtaagtatccccaaactttggggactatatcactacctaaaccgtgaacgagctataaccagtgaattaacagaattaaattattcagcactatatcactacctaaaccgtgaacgagctataacaaaaacatcattattaacaaaatatgaaaaactatatcactacctaaaccgtgaacgagctataacttacgcagccgattgggttcaacttcaattactatatcactacctaaaccgtgaacgagctataacaaaaacatcattattaaca

SEQ ID NO: 1629 - DNA, 7695 bp, synthetic construct
  source 1..7695: mol_type = other DNA
  misc_feature 1..7695: note = Synthetic
catttatgcatcttaaaggtcattggatatttactccacttgccgaatatggctgcaaggttgactttaaacttgattataaattcagcaacatcatcattgaaaaagtaattggtgctgtgtttgaatttgttattaaaaatatcgttgatagtttcgttaaaaaagctcatgagatttatcgcaaatgattaaaattgaagttgtttttgcaactaattccttacaaaaaattgtaactcttgaagttgagctaccctgctctattgctgatgctattacacgctcgcaaattcaagatttcttccctgggtatgaattacttggtttaccagttggtatttttggcaaacgacaatttagccctgagcaatatcagctaaaacatggtgatcgcatcgagatatatcgccccctaaataaaaccccaaatcaaaaaaggcttgagcgtgcacgcaaataaaattaaatttatcactacactactactcttaatcactccctgcttcgctgtaccccaaattctacccacaatccccaatgcattaaaaaataaagttgctgttagtgtaattgatagcacgaatgcagatattatttatcagtaccgtgaatcaactccaatgcttttagcctcaaacatgaagctattaaccagttatgctgcattacagaaccttggggctaattttacatggaaaacaacgcttagttatagtggcaaagttaaacaagataatttggatggtaatctctatctaattggtggtggtgacccgatgttaaccactcaatcggtgactaatctgtttatgactttaaagcataatgggattaatactattcaagggaatttaattttagatactcatatctttaaccaaaatgtcccgagtagtgaactctatcctgagccatatgccagttactcagttgatccaaaatctctaatcatcgatgagaatatctctactctagctttacacattaaagccaataagatcacatttgatacctatcgtagtggcaaattaaagttcgataaccaattgaaattaattaatgctaaatttgcttgtaatgatttaagtgattatgtcaacatcaataaatcacgggcttctgcttcaaaatctaaaaagcagaaaactagtgattttgttttaactggcaatataccagctagctgtgatggaaaaaatattaatttctatctcttagacactaatcaatacaatcgacaactggttgcgttgattttgaaacagcagcacatcaagctcaaaggcaaaatcattattggcaatgcaccagcctcgacgatacctattgcagagataacctcccaacctttggcgcaaacgatgtggcagatgaacaaacaaagcaataatctctatgccaagagcatgctactttccctaggtgcatatcgctcaaccaatgatgctacatatgaaaatgctaaaaacatctactatcagacattcaagcaaaacctaaatttcccagagcttaaagtagaaaatggtagcggactatcgcgctatgagcaactatctgccgcacatatgacaacattgctctatacgatgtatcatgataaagaatccagtaatttcattaacagcctcccaacacccggtgaatcaggtactctacaaaccgaatttgctagatataaaacccagcttcatgccaaaactggttcactgtctgacaccaaggcttactctggctacttctatgcccgcaatggtcatgtttacgctatttcatttttagcaaatggaattagtcgtggcgatattggtaaaactgagctacagacatttaaacagttttttgccgatagcttggagtctttaaatatgatcgaaagcaaaaactaatcacgatagatacagattaaaacacgagcgcatggaataacttaccagaataattagtggttttattaacttaactatttttagatgaggtaattagtatgcgctatgtattaggacttgacttaggaatcgcttcaattggctgggctatctatgatatagataaatcaactattgaaaaatgtggggttcatttatttgatgccgcagaaaaccctaaaactaaagaatcgcttgcgacaccacgacggttagcacgcggacaaaggcgcagaattagacgccgcgcttatcgcatggcaaaaataaaagaatctctaattcaatctggcatacttacgcaagatgaattagccaaattatttaactcttcagaaaaaacatcttctaaaacctcgagatatgacgtttatgaactacgttaccaagcacttgatcaccaattaagcaatgctcaattagcgcaaattttgatccacttagcaaagcatcgtgggttcaaatccaaccgtaaaaatgataaatcggttgatggtaaaataaataaccaactaaaagaaaatcatcagctcttaattgataaatcttaccgttctattggcgaaatgctttatagagatgatagcttcgcatctaatcgccgtaatcgctttggagaataccgcgtaatgctacaacgctcggatattgaagcagaagccaagttaattttagaaaaacagcagcagcttggcaactctctaatctcgaatgagtttattgagaactatttaaaaatgtttaattggcaacgtgactttgcaaaagctgaagaaatacaaaaaatggtaggagtctgtcaatttgaaaaagcagaaaagcgcgcaccaaaagcttgcttcagcagtgaaaaatttattgcgttatcaaaactaaacaatatctattacgcacttgactcaatagagcatcggcttagtcaatctgaaatcaaacacatttacgatttagccatcgcacgcaaaacaaagccattcaaaacattcgctgatattcgtaaatcactaaatctacctgatgaagcacgttttaattttgtaaaatataattccaatgatgactttttggagtgtgaaaaaaaggaaaaaatcaaggagttagagtttaaagcttatcatgaattaaaaacatccatcagtaatcatattggagacgtaacttggagtaatttaaacagtaacgctgctcttatggatgaaattgccatctctctcacctataataaaacggatgaaacgatacataaagcattagctgaatcatttaccaaacatccacataatttccaaatagaagaacagactttaattattagtgcgttacttgatgacggtataagctttgataaaaatattagcctctctctaatagcactaaataagattatcccattcctagaattagggcaacgctatgatgaagcgtgtgcatcggcaggttacaatcatagtgcacaacaatcacaacgaagcataaaattaccaactattcaagctttaggtttagatcaagaattaactaatccagttgtaatcagagcaattagtcaggtacgcaaagttattaacgcaattattgctatttatggttcgccatatcaaattaacaccgagctagctcgtgacataggtaaaactgcacaacaacgcaatgaaataagtaaatttcaaaaagaaaataaaactaataatgaaaaaatggttgcacaatttacagaatactttaagcgagctcctgccaaagatgagctcaccaagtataagctgtggaaacaacaaaatgggcattgtatctatagtggtgaatcaatcaatttagatgaaattcgccatggagtgaatttagcacagattgatcatattattccattctcacgtagttttgatgatagtttaagtaataaagtattatgcttaactgccgagaatcaacgcaaaggcaatcaaactccctatgaatatattgcggcaaatggaaataatgaacaaaaatggcataatttcgtggagcgttgcgagaacttactcaaacatggtaaacaagcaggatttagctataaaaaatatcaattattacttactaaaaagtttgaccaagacaaatttattgagcgcaacttaaatgatactcgttatatctctagtttttgcaaaaattatctagaacataatttacattttgctgagttgggtgataaaaataagcgacgtgtacgagtattaactgggcaagctaccgcatttattcgctcacattgggggttagcgaaatcacgagaggaaaatgatcttcatcatgcacaagatgcttgcgtgattgctgctgtgaccaccagcatacagcaaaaaattactgcttttatgcaggcaaaaagctatggtaaaaatcaagatgctacttataccgacccagaaagtggtgaagtatttgataggttcccgatgccaaatattaacttcagaactgagattttattgaaagttaatcaagtgtttgtctcacgaatgcccaagcgctccgtaacgggacaggtacacttagatacaatacgctctaaaaaatatgttgataatccagtcgcagaatataacaatggtaaaccattttcgacgattaacaaatctctttaccctaaaactaaaaatgattattatttaaagttggataaaaacggtgatattgtagatttatgtccaacttacaaacagcataaccctaatatctataaactactaaaagaacgtctcgaaaaatatgataatgatgcaaaaaaagcttttgctgagccattatttgccccacgtaaagatggaacaccaagcgagaatcaaattaaaacagtcaaagtaattcaggcacaaaatacaggagttgaggtaaatcaaggaatagccgataatggaggtatgattagaattgatatatttactaaagggggtaaaaattatattgtaccagtttacttatcggatgtaatcaaagataaattacctgatcgagctattttacaaagtaagccagaaaaggaatggacaattattgatgagacctacactttttgctttggtctttatccaaatgatctaattaaaataatcactaaaaaagaaacctactttggttattatcgtggtaccgatcgagcaacaggagcactaataatattgattcatgatggctcaaaggaaattcgcggtattggagttaaagtacatacggctttagaaaaatatcaagtcgacgttcttggtaatattagcaaaatagatgctgaagcacgtcttgattttagtcaaatgaaacctcaaaaatgacatttcgctgcgtaatgattagtaagcctagttatttgcaagttgccaaatcgcaactgcagataactcaagggcaagataagtttacagttgcacttgaagatattgcgtgtcttataatcaatcactatgcgattagtttaaccgtaagcttattaagcaaatgtgcagaaaataatattgtcgtgattagctgtgataaaacgcatcttcccaatggtatattccacagttatttaccacactcacgacaaaatttagtactacaaatgcagctaaatctgtcacagccgtttaaaaagcgcttatggcaaagcgtaatcgaacaaaaaatcacgaatcaggctgcaagcttagaacgtgttttttctttaagccctaacatcgctaaattaactcatttagcacatacggtgttatctggtgataaaaacaacaacgaggctcaggcaagtagaatttatttcccaagtatttttggggacgacttcatccgcattaacaaaaatcgcatgactgtagctaacgatgattatctgaatatcaatggattgctcaattatgcttatacaattatccgtagcttaatttgtaggagtctagttggatatggattattgccaacgttgggaatctttcataataatcaactcaatgcatttaatttggcagatgatttcattgaaccttatcgcccatacattgactggtatgtctataccttagttgaaaccgctcagaccttggagttatcaaccgaaatcaaagcacaattagttgatattcttaatcatattgtcgtcattgataataaacttactacactacttaattcgattgatatcatgataaaaagcttcatcagttgtatcaatgataacaattttcaattaataaaactgccatcattaccagcatggattgaacgcagcaatatggattaataaaatgttttctgagattagatggatgagattaatcgtgttttatgatttgccagttagcaccaaaagactacgccaagtataccaacgctttcataactacttacttaaagaaggttatgatatgttacaatactcagtctattgtaggctttgcaatgggcacgatgcaattgaaaagcacatccgtcgcattgaagcaaatgctcccgaacatggcaatgtaagaatcatgaaagttaccgaaaaacaatatagccaaatgtatttcttagtcggtcaaccgtcaaaacaggaaaagatcaataaagaacaaaaacagttgctactgttttagaaataatttgacagtaagatgtcagctttacgacttttcgtcttattatagcaaactaacaatttaggttatgtcaaaattttatattatataagagtaaatttaaatacaatacgaccaattttaaaaataaaattcagcaattaaagtaattttatcaattagttacttgataagcattttaacataacctaaattgttaacgagctataacagtaactagttcaataagagttacgacaggattttaacataacctaaattgttaacgagctataacattaaagatagaacaagcatataaacaagaattttaacataacctaaattgttaacgagctataacagaagcaattaaggcaattaaatagagataattttaacataacctaaattgttaacgagctataacgcactaggtgcagcattcccagatcgactaattttaacataacctaaattgttaacgagctataacgtcagatttatcacatatcaatcagcaaagattttaacataacctaaattgttaacgagctataacggacaccagctggggttattcttaagtacaattttaacataacctaaattgttaacgagctataactcaataaaaatgcgtttgatttctttttctattttaacataacctaaattgttaacgagctataacgaatttactaaatcagtgaataatattcaaattttaacataacctaaattgttaacgagctataacagttacattagtaacctataataatccagaattttaacataacctaaattgttaacgagctataactagtaacgctgaatactctagttttgtacaattttaacataacctaaattgttaacgagctataactatcaactgcttgcgttgcttttgcttgttattttaacataacctaaattgttaacgagctataacctaccaaactgagtatctttagttgataaaattttaacataacctaaattgttaacgagctataactctgatttaagcgtatattcagataaccaaattttaacataacctaaattgttaacgagctataacgaatttactaaatcagtgaataatattcaaattttaacataacctaaattgttaacgagctataacagttacattagtaacctataataatccagaa

SEQ ID NO: 1630 - DNA, 3980 bp, synthetic construct
  misc_feature 1..3980: note = Synthetic
  source 1..3980: mol_type = other DNA
gattataataagattataacatatttatttaatgattaattatgaattttatattaaaattggtttcacgtgaaacaattattataaattaaataaattttgtaaatcaactattaaaaacgaaagagtgctataatttcagacaaactaatttgtgtttgttgttacattaacaaagcttaagtattcagaaaagaataatacatttgtcattacctcagcaaatcagaagtatatttaggaataattttaatcttaatttattgtgagagtgtgtagttaaaattaattatgattcttaattatatcatccattatttttttaaaatcatataaaatatatcgaatatatatactcctctaatctttaaaaaggttataattatgtactgtaataattttataatttatattgataattttattatagctaaattgatttttttacaaaggatataaattatgcaattaaacaaatatattattgggcttgatcttggtattgcttctataggttgggcggtttatgatgatgaatcaaaacaaatggtcgatataggagttcgtatatttgacgcagcagaacacccaaaaaccaaagaatctttagcattaccaaggagaatagctcgtggtatgcgagttagattaaggcgtcgaagttatcggatgcaattattaagaaaattattagttgagagtaattttattacacaagaggcattagataatttatttaatgcaagtattaaaaccaaaaataaagaatcaagatatgatgtttattatttacgatataaagccttaacgcaagaattaagtaatacagaattaacgcaagtactaattcatctagcaaagcatcgtggttttaaatctaatcgtaaaaatgataaatcaatagatggggtaatcaacaacagcttaaaacataatcaacagttattaaaagataataattataaaaccattggtgaaatgttatatttaaatgatgaatttaaaaataagcgtaataaatttggagcatacaatattatgctccttagatcttctttagaagaagaggctaagttgattttagaaacgcaagcaaatttaggtaagacactgattaccgaagattttattgaaaaatatctagaaatatttaatcaacaaaagtcatatgattatcgtaataatatagaacaaatggtaggcaaatgtacttttgagccaacagaagctcgagcatcaaaagcctgctttagtacagaaaagtttattgcattatctaaactaaataatattcaagtaaaccgtgtaaaattagatgcggagcagattagttgtgcgcttaatcattttatgaataaaaaacttaaaaaaccaaaagcaacatttaaagaattaagaacagtattagaattggatgataaagatagatttaattttgtaaaatatacatctattgataattttaaagaagacgaagaaaaaaccaacataaaagaactcttcttttcagcaactaacgaattaagaaataatataagcaacaaagttagcgaaattacttggcagaatttatctaataatccaaagttattagatgcaattggtacaactttaactaattataaagaagataatacaatacgtgaaaatttactaaaaaattttgaaaataattcacacaattttacatcagaagaaataaatcaaattattgaagatgcaataattgaggaaggaattagttttaagagcaatataaatttatcattaaaagttttatacaaaatcataccagaactcgaaaaagcgtatcgttatgatgaagcaataaaaaatgttggttaccatcatagccaaaaaattactgataaatttgacaaattaccttcaattcaggaattaggtttagaccaagaattaacaaatcctgtggttattagagctatttcacaaaccagaaaagtaatcaatgccataattgctaaatatggtaaaccatttcagataaatattgagctagctagagatattggtaaaagtgctcaggagcgcaatataattactaaaaatcagaaaaaaaatgaagagtttaatcaacaattaaaagatgacttttacgagaaatttcacaggcacccaattaaggatgaattaattaaatttaaactttggaaacaacaagaatctcgttgtatgtattccgatgaatatattaatctgtctgatattcagcatagttcaaacaacacgcaaatagatcacataatcccatactccagaagttgcgacgacagtctgagtaataaggtactatgtttaactagagaaaatcaaaataaatcgaatcaaactccatttgaatatattggtgatagtggtcataatccagatgcatggcataaatttatcgaacgttgcaagagtttaaataaaaataaatattcgcttggttttaactatactaaattaaacaatttattattaactaaaattgataccgaaaaatttattgagcgtaatttaaatgacaccagatacatagcaagattttgtttaaactatttagaaaattatttatcatttgctgacaaaaaccacaaaaaaccagtacgagttttaacagggcaagtaactgcttatatgcgatctcattggggtttcaaaaaagatcgagcagcaagcgataagcatcatgcacaagatgctgcgattgttagtgttattactaatagtatggtacaaaaaattactagttattcacaagcaaaagcttatggcaaaaccaataattatgattttacttacactaatttagaaacaggcgaaatattcgataggtttccagtgccttacgatggttttagagatcgggtacaagatttagtgagaaatttatttgtctccagaatgccaactcataaaaacacaggtagtgtccatgcagatacaatcaggtcaactaagtatctagatacacatggtgtatctaccataaaaaaacgtcttgtagatagcggtataaaaatagagaatgatgaaataaaaaaaatatgccatagctacaaacaacacaatcctaatatttataatttaatcaaaacccgactagaagagcatgataatgattgtaaaaaagcttttaaagatcctctttatgcacccagaaaagatggtagtattagtgatgttgaaataaaaacagttaaaattatagaaactcaaaatactggcgtttttgtaaataatggcattgcagataatggtgatatgctcagaatagacatattcactaaagctggtaaaaactacattgtaccaatttatgtaaaagatattttattgccaacattaccaaacaaagccataattggagctacaaaagaacaagactgggaggtaatggacgatagctatgcttttaaatatagcctttataaaaatgatttaattaaaataattaaatacgataaatcaggtgcaattaaagaagaatattttggttattattctggctgtcatagaggtggagctacaatttctattatagagcctgatagatctgcggagcataaaggtattggtattaaattaaatacggttatagaaaaataccatgttgatgttttaggtatggtatcacctaaaccactcaaaccagaaactagggttgattataaaaaaaagaacaagattaataatgcatagtctttatagttataactatagctatagctcgttaacagctttggttatggtataatatataaaaatcaaatgagcattaaagattggttatagctcgttaacagctttggttatggtataatataagtaatgtatattactcggggttttttgttatagctcgttaacagctttggttatggtataatggatgtgacacataccctgcaggtgcatatgttatagctcgttaacagctttggttatggtataataataatcacaaatatgttaca

SEQ ID NO: 1631 - DNA, 23318 bp, synthetic construct
  misc_feature 1..23318: note = Synthetic
  source 1..23318: mol_type = other DNA
gctgcaaggaagccgtacccgccaatgcgccgatcctctatgtgcacggcgcgttcggcagtcaccttgcccccgatgacgacgtcgatacgctcttccggggcggccgcgccaccgtctccctgggctatatcggcctgtacgaggtggcggccgcgttcttcggtggtcaatgggagcacaacccggaggcgaagtcgttcacgctgcgaattttgcagcggctttcctctcgcgccaaggcctggacccagcactacggctatcagttctcggtctattcgacgccgagcgagtcgctcacggatcggttctgccgactggataaggccaagttcggcgccgttgcggacattaccgacaaggattactacaccaattccttccactatgacgtgcgcaaggctcccacgcccttcgaaaagatcgacttcgagaaggactatgctccattcgcctccgggggcttcattcactactgcgaatacccggtgctgcgcaccaacccgaaagcgttggaggccgtgtgggattacgcgtatgaccggatcggatacctggggaccaatacgcctatcgatcgctgctacgagtgcgggttcgcgggtgaattccaccccacggccgccgggttcgaatgccccgattgcggcaatcaggatccgcgcagttgcgacgtggtcaagcggacgtgtgggtacctgggaaacccgcagcaacggccgatggtgcatgggcgccacgttgagatctcgtcccgcctcaagcacttggagggcgacctgcgcgttgcggccgcggcgatgacggatgacccgccggttgtccccgcggcaaagacggacgacccgccggccttgcccgtttaggcctgggcgatgcgcacaccggcgcccgggcagtggcgctccgagaaactcagccaaggttacgtggccgactacaagccgttcgtgatggtcgacggcgagggcgtgcgctgctcgctttacgtttcgggctgcctgttcgcgtgcgagggctgcttcaacgaatccgcctggagctttcgctgcggcgagccgtattccgcggcgctggaggcgcggatcctggacgatctggggcatgtcgccgtgcagggtttgacgctgctcggcggggagccgttcctcaacacgggagtgtgcctgcggattgtgggtgcgctcagggcccggttcgggcgcgccaaggacgtgtggtgctggtcggggtacacgttcgaacaaatcatggacgaggcccgcgccgggtcgaccgacaagctcgatctgctgcgctcgatcgatgtgctggtcgatggcccgttcgagatttcgcagcgcgatctgagcctgccgtttcgcggctcgcgcaaccagcgcgttcttgacgcacggctgtcctgcgcggcgggccgcgccgtggagtggctgccgggctagcgcattgcgcgcaccgcacggcccccgccgaccgcgccccttatgccccccgccacccgccgaccgcgcccctctgcgcgcacccctctgcgcgcaccgcgcggcccccgccgaccgcaccccttatgcccccggcaaacaccacccgccacccgccgaccgcgcccctctgcgcacaccgcgcggcccccgccgacctcgccacctgtgattccgttgtcgcgctgctgctatccatgtagagttcaaagcccgcgaccttttcacaggagattccatgacgttcaacaacgatcccgctggccagcagggcggatacggacagcctcagcagcctttcggccaacagtcaaacccctatggcacaactcagcagaattacggagcgccgcagagtccctatggcgctcccgcacccgagtacaactcgtacctggcaaatgcctacgtatcggacaagacgtttatcgtgacctggttgctatcgctgcttctgggaagctggggcatcgaccgcttctacctcggaaagatcgggaccggtgtcctgaagctgatcacgggcggcggcctggggatctgggcactgatcgatctcatcatcatcctgaccgggaatatgcgggacagcaacggtcgcagcttggcgggatacgaagagaacaagcggaccgcgatcatcgtcacggttgcgctgttcgcagtgtcgatcgtctcgaccatcttgatgatttcggcaggaatgctgaccggaatcggcgcgtactcgtcaacctccgtttgattcgttccgcgatctggcaacgctgatgcatcgaagcccttcggccccagacgcaacccgcctcaaatccggcaacacatcggcccctgtgccaccgatcgcccgcgccccaaagcgacgctcccatcgcaactctggatgggtaccgcagcatcatggggcgtgggcgatgctcattgcgccactcgtcatgggcgccatcgcttcacggcccagctggcagcatattcctcttgccgcggcctggctgtgcggttattgcgccttctacgcctgcggactggccgtcaagtcacggcgctttgcgcggtatgccccgccgatcttcgtatacggcgcgctggccctgatcctagtcgccgccgtgatgagttcggcgccactcctcgtcgcttggggtgtgctctttctcccgctggtggcggtcagcctctatgcttcatatcggcgtgcggataggtcggtgtggaacgacgcgatcacggccgttgcagcgtgtgcgatggcactggtgtcggcttgggttgggctcgcacctcacgccgtgtggtggtcggtcatcggatcgcaaccctttgcccccgcccgcctggcagcagtggtgctatttgcgtacttttttggcacggtcctgtacgtgaagacgatgatccgcgagcgcggtaatcggattgtctacgcggcctcggtgggttaccatctcgcattggtcgcagcggcgtgtttggctgcctacgccgcaacgacgacgggtgcggcggcgggcgcccccgcggcaccggcacccgcagccatcgcacccgccaccatcacagcacccgcagccaccacaagcacccaccacatcacccggcacggcacccggcacatcaccagccaccacatcacccggcacagcacccggcacagcacccggcacggcacccggcacggcacccggcacggcacccggcacggcacccggcacggcacccggcacggcacccggcacagcatcacccgcagccaccacagccaccaccacatcacccgcagccatcgcaaccgctgcgatgcggcgatcgtgggcccccttcgattttcccgttccggcatctgattccggccctgtgccgtgggggtgggcgcttgcggtcgtcgccggcgcgcttgctcttcgcgccgcgcttgttccccgtttctctccgcaggcatcacccaagcaactcggcatcggcgagatcatcgcgaccctcgcagtttgcgcggcgcttgtggcatacatctaacccgctcgctccattgcattttccaggtgcgtgcgtatcttgcctgacctgcgagcccttccaaaggttcgcagtacctccgattcaagttccgcccgccccagttcgggccgcttcgcgctgatgaattttgccgcattcgcgatttcaacggggcttatgtgagtgaattcccgcccgacatcactgccattcggacgaaactggtcccaagttgtcggatcgatatccgagggccacacgaacttatcgtcgtcaacgaacgctccacactggaccacctgacgctcaagctgtttcttgagtttgccccccagatgcgtcaccccgaacgagctcgccgtcaatcgaaccaggcgttcgactgcgatcggccactcaaaatcaacgatctcgagagcaacagagcggacctgcaacctgggcgacttcttacgcaagtcctcaatgacggtccggtcaccgtcccgcgcgacctgccacggctggtaggggagcctggacgccccaatgaacgtcctatcgctcgccatcacttcgggagcaggctcgacgtgctcatcagcccactcaccctcgattccaattcggctttgcccgcgggttgcccctgtcggggtggggacgaggccctgatgacgctgctttgccccatagcccagcgcaccaccggcgccaccgccaggcagcgcacccgcaccggcatccgcgccaccgccagccaccgtacccgcactcgcaccggcacccgcaccgccatccgcaccaccgccagacagcgcaccctcatccgcgacaatcgagctgtccgtcttggcgattacctcgtccaccgcacttcgtgtgagtccgcgctccctagctaagtccataagaatgtcatcagctatagtgcgcgcatgcgtagcacccgcgtcggccaactcagcaagtagtcgcgcgcttgtgtctgcggcgcgataggcctcgtccatctcaaatcgatatgtatgggaaagcctattgcgaaagattctcagctcccccgccagcgttcgcgaaattcgatcaccacggtcaaacggatacgcgaactccccgagccattccgtgagcatacgcaattgcggttgcaaatcaccgcacatgtactcgtccgagggtttccgccccttcttttcgtcgataattcgcaatatcacggtccaggggtggccgcccagttcgcgcgcgaatcgctcaccgatgatcggatcgagccgcgatgccagatagtccaatgcggatttgacgtagagattcggtgtcattttcactgcaattcaaccctccatgatgccgcggacgagcgccatgcgcttcctaatgttacgtactcgcagtctgcacctagcctctgacattgcccgacgacggccaagcatccgcgggcgggcgcgcatttcgtcaagcgatgaaatacacgggggtgacccccactcgtaactaaacttgcgattcgacgtccgttcgactggcattcggattcgaacacctgtatgattgctgcatggagaatcgtcgctcaagctcgtgggaggtcgccacattcgccgcccacctgcgcctcaacggctacgcgcccgccaccgcgcagccggcatcgggcggccacgcatcaaaccgtcgcatgcttgatgaggagccaccggcgtaccttctcgacccgccccccattcccgagtggatgcaagaacaaatgcgcgagcggtcgctttatgaggaaccgttcggaaccgagtttgaagatgacagttgggacgaggattcgcccaccgacggttcagatgatccgggaccgtggacgttggtttcctcaggaaccgacgacgcgggctacgttgttgtagaaccaactggacgtctgcgggagttggatccgcgcgaacgccttctgggcgccacaatgaacgactctctgccgtgcgcggagttagggttcgtgctcggaaacatcgatcctgctagctatcaagacgaggaactcgtcgatgcaatcgccgcgtgggacagaatgcggtcatgggttgaggcagaacaactgcgcgccatcgccgaactgagtacgcgaccgagcatgcgcccggattggcccgccagtgccggggaagtgaccgtaaaggacacgaccggtgacgaggtcgcgatccggcttcagtgctcacgcatgcaggcacggcaacgcgttgagctggctagggagctgttcttggggcgcctcgatctaaccgggcgcgcacttcagtcgggtcacatcagccccgaaaaggcgcgcactgtcgcccgcgaattggattgcgtcgacatcgaggacgcaagcatcattcagggacgagttctcccctccgccggggccaagactcccgcacagttagggcgggccattgcccgcgaacgggtccgcctctacggccatgaccaagctgcggttgagggtgccagaaagcggcggcgagtggaacgtccgcggcctcttcccgacgacatggctagctggcaggccgtgctgcccgccgcggatgcaatcgctgttgacaaggtactggaccatcaggctcggtcggtgcgcaacggcggcgacaagcggaccttagaccaactccgtgcggatctgctggtcgcggccattttgaacccgtgcagcggggcaagctgccaaaccacgcgcggcgccaatggcaacgagcacaatggcgagttcctcgccgcattcgccagcacccccactagcccgcaaccgcggctcactcgcccagcacgccccgccgacacaaccacagcgcagcttgagaccccggccaccgagcctttcggcagccccgccaacactgtcgaggcgttgagtggtgcgcctatcgacacggacgatgccggttccgagtcaaagcgtctgccggtgcgcgcgcagatcaatgtcaccgtccccctcaacgtgttgctgggcgacagcaacgaacccgctgagttggacggtttcgggccaatccatcccgacaccgccagggcgctagccgcgggcggagtgtggcgcaggatcgtcacagatcctaaatctggggccgttttggatgtcggccggacgcgatatcggccacccgctgaaatggcggattacgtgaggactcgcgacaggtactgcgtgagaccggggtgctcggttagtgcccagagcgccgaactcgatcacaccgaagagtttcaccgacatggcggtgtgaccagtgccgctaacctgggcccgctttgcaaacgagatcaccagatcaagaccgacggcggccacacgcttgtgcagatgacgccgggaacgttcaggtggactacgccgaccgggcacgcatacatcatcacgcccggcatagatgaagaggtccggcacctcaggcgcgcagccaccggcgcaccgcccaccggatacgaacgtctcctgaagcgctctttcaagactgcagccgtcgacgatgacgaggaaccgccgttctgatcgcgtcgggtcccgacgctgtcaccgcaacgcctgtcgcccgcgcccatctgcgccacagcaccgcgcagcgcccctccacgaagctcacccgcccgcgcccatccgcgcccatccgcgcccatccgcgcccatccgcgcccatccgcgccacagcaccgcgcagcgccgccaagcgcaatacccctagccgagtggaagacgcgcaacgctaacccacccggccgcgttggatagttcctcgaggtcgctcagcgttagttcgattgccgaattagcgctccctgcggcggggtagacggtttcgaacctgcgcagtgattcatcgagatagatcgtggcggattctgggttggcaaacgggcacaccccaccgggctcgtggccggtgagccgcgcgacgtcatcggattgcaggaatctcgccttatatccgaaggcccgcttgaagtccccgctgttgatccgcgcatcgcccgccgcaacgatcagcaccgcggcattaccgtcctgcgaatatagcgacagggtcttcgcgatccgcgcaggttcgcacccaacggcttgcgcggccagttcaacggttgcggatgactgggcaaaaacacggatgtcgtgcgagcgcccaaatctctcaaggtagtggcgaactgtactttcagacatctctcaacgatatcgctgcgcgcagcactgtcatcgcatccagctcaccagacacacaaccccaaccaccggcaccagacaggcaacgctaaccaaccgcactcaacacaccaccgtgtcagatagcgccggcccaaccgcgaccccccggcgctaaccaaccgcactcaacacaccaccgcgtcacatagcgccggcccaaccgcgaccccccggcgctaaccaaccgcactcaacacaccaccgcgtcacatagcgccggcccaaccgcgacccccaacgctaaccaaccgcactcagcacaccgcgcctctgcagcgctcggtcggcatgcttgccactcaaccgtctgcacgctccgcatagcttcgcgcgacggcacaacggggcgtcacgaccgcaagctcgccggtcatgacgccccggaagacacggggctacgattttgtcgggccctcgacgaaggccaccgagtcaacgttccaatcagacctgtccttaattcgccaaacaccgccaagcgccgtgccgtgcgcggggaaggcaaacgatgggaaagctacgcagccgccggtgtagacctcgggcgcgtcccagatgtcaccgtcgataaagacgtctccgttgtcgtaaacgaccccgttcgttccgacgtactcgattgccagatcgctccaagccagcgcctttccaggtcccctatagcacgccttggtcatcccaaagacgagttgatccccggagtccgtcaagtcatacaccgctcggtcgatcagaacagtccagttattcattacaacggtcgagccctcggcataagcgtcatttcgcgtcgaattcacgacgatgatcgccgcacggctcgtccgaataccagcagcgttcttcgccgtaacccggtaacggttgcccgattccttgagcttcggcgtcagtttcagatcaggcgaactgcggtacgacgtgacggcctgccaggacgcgccgttattcgagctccgttcccagcgatacttgacggcattgccactggctctcgcctttagcgtcagcgcggaccccgcgtcgaccagcgggctcgctggttgcaattcgaaggttggccgcgagatgaccgtgagccgcgccgtcctagatgtcttcttgcccgtgcccttgccgcccacgacgaccctcaccgaggctccgtcgtaagcccccttggccttgagaacaagcgtcttcttcttgccggcctttccactaactcgtttccataaacccgcccgcgccttgaccgaccactgatacgtcaggcctgagcctttcgctttcacagtgaacctcgccttcttgcccttcacaaccgcggtcgacttgggctgcttcacgattttggggctgtccgcacttgcagcgaccaccgccacttcaccgcttgcagtggatcgctcggccgcattcgcgctcggcacaaaactcgccaaccccacggcggtgcacagcaccaccgccgacctcaattgccgtaccacctgtttagatgtcatcacaaccaccaacttccaaatcgcgtatcaatgagtcgcctcccgtttcaaaagatgaacccggtgacgcgcacagacgctatggcagccctctgacattcgttgtcagagccccaactccacaccaaaacgcaactcatgcaagacgcggaagccgggcctcgtccccgtaattaatgacgagcgccccccgcccttgccccctcgcggaagcgatatccgaagggattgaaccaacattggtcttcatggcaccatgttcttacaaacgaggggtcttcgtggctgggaatcgtgcttcacctcatcgaagcttctcgctttcgtttaatcgagcaactgcacaaaggagtgcaccgtgaagattcgattttccttggcgttccagatttcttttgtctgtcacagaccccgtttcaaaacggtgcgcattaattcaccgcgccacccttatgcacgtccgccgctgcgcccggacatcgattggagcaatcgcaggcgccgcagcgaggttcgcccaccatcgccaagcattgtgccgcccatagaacacacgcacacggcgcacagcgcccacctgacctgccgggcaaatgcacgatttaagtgcttgacctgtaagaacatccacctgtaactttgaacttacgattcccagtaggtcccgacaggttagcgggactgaattctccaccgacacgcccgcgggtaaccctgcgggcgttcggcttatataaatcaatacgctcgggcaccgccactaggtggcgcgttcccggcgcggatatcgcagcaaggagtcaaagatgacccgcacggtcgctggcattgacgtcggcgcgaactcggtaggggtagcgctgtgggagctagacgatgatggcaccccagttgccctacttaacgcccagacatttctgcacgacggcggcgtgcaccggggactcgaaaaggcagctaccagccggctggaagctgcagggatcgcgcggcgcaccagacgcaggtaccgcaggcgcaagctccggctcgaagaacttgattcggtcttggctagcaacggattccaagtggcaactcaaccgcctaaggacccccgcgcaccatggctatatcgcgccgcactagcgggcggatttatcgcggatcccgatcgccgggcgctaatgattgcggaatccgtacgccacatcgcgcgccaccgcggttggcgcaacccgtatcagcgcgtggaagcgctccgggggtacaccgcacccagcgagccgttcgaaaagatggcggatttgcttggcgtatcgccaaacaatagcgacggcgagatcatgacggtcggacaaatcgttgccgaggcaatcgccgaaaagtcgggactccccgcgggcccgaagctccgcggaccgagcggcgccatggtcgcccgcctcctccaaagcgaccttgcgaatgagttacacaccattttcgaggtccaacaggtcgatccagacacggcatgggccattgagcaagccgtattcgctgcggaatcgccccgcgggtcagcggaaggccgggtcggaaaagaccccctgcccggtcagcgcgcgcacccgcgatcctcgaaatcctcgccggctttccaagagttccgcatccgcgccaccatcgcaaatctgcgaatatccgaggccggcaccgagcaccccttggacaaggaccaacgcaggatcgtcgccgattggctcctggcctggagcgattcggaatctccgacttggggcatggtcgccgaactcctggggataccgcggcgctcgctcatgggaaccgccaacgcgggtcccgacggcgaacccgcaacacgcccgccaacggatcgaaccaatcacctcatgagccggtgctctgttggcgctgtcagagaatggtggcgcgatgcaaatgaggctgaccggactgcatttaccgaattgatagccgggtcgcggcagaccgaggcaagctccgaagagcaggcggaggtcgacgaattattcgcatcgttgacccctgaagaactcatcaaattggaagcgctggatctgccccgcggcagagccgcttattcggtcaattcgttgcggcgcctgaatgccagattatcctcttccgaattggacctccatgcagccttacaggcggaattcggagtagacaacgactggcgcccacccgtcgatcccatcggggcaacgatcggaaacccggccgttgaccgcgtaacccgcatcgtcgggcggtggcttgaacaagtcggacgccgctggggcgcgccagaaagggtcgtcatcgaacacgtgcgcgacgcgtttgtgagcgtcgctcgcgcccgcgaaatggagcgggaagcggaatcgcgcaggcggaaacgtgaagccgccaggcaacggtttgccgcagaaaccggcacgccaaccgatcaagtgcgcgacgaacaggtacgccggttccttatcgtcgagcgccaagacgccacgtgcgtctactgcggtgcgggcatcacctacgcctcctcccaattggatcacatcagaccgcgccgcgggaaaagtagccgctcgacccaagataacctcgttgcggtctgcgtctcgtgcaacctctcaaaatcgaacacgcctttcgcggtgtgggcagaaaggagcaccaacccgaacatctcagtcaaagatgccgtgaaacgggtcaaagcctggcgacacctttccgatttaccgaatcctgccgccctgcgatcgctgaagacgcgggtcattcgtaacatccagactgcgaattacgacgatactgacgagcgtcctatggagtcggtcgcgtggatggcacgggaactcgcggcccgcatccaggcgcacttcaaagacgaaacaaaggtaaatgtctaccgcgggtcgataaccgcacaggcgcgccgcgccgccggcattgacaaggccttcacgatgatcggcggacagggtaagcaacgccttgaccggcgccatcacgttgtcgacgcggccgtggtcgctctcatgaagccctacgccgcccaggtgcttggcgagcggcttgcgatgcgggacgctgcgcgttatacgcccaccgcggacgcggccgggtggaagacccatgaaggatcgacgccagcactcgtttcagagttccgcaggtggaaacatcgcatggaagctgcggtcagtctgctgcaacgcgcgctggacgaggacaccatcatcgtccgccgcccgctaagactcacgccaaacgtcggcaggctgcatgaggatcaggtggcctcgttctatccaaagaaaacgaagaagaacgaggcctccgcccccgtaatccgcctgggcgatgagctaccagcctcactcatagatcgggcatcaacgcccgcgctgtggcatgcgctgacaaggcacgaagactacgacccgcagcggggtctacccgaatcgtctgctcgtcgcatccgcgtgcaaggaaggctagtcgaggcgatggaccccctcgagtttttccccacgcctgcggccgcattgacggttcgcggcgggtgggtgaaactcggtgacgcactgcaccatgcacgcgtctaccgtttccaacaccgcggcaagaccgtctacggaatgattcgagtcttcgcgattgacctgcgcggtgcccgcggcggtgacgtattcggattcgatctggatcccggttcaatcagtatgcgaactgccgaaacgaaatgccgcaacgcggtagtgaacggcgaggccgagtatctgggctggctggtgccgggggatgaaatacaggtgaaggtaccaatcgcccgcggatcgattggtgagttccttgaggctttcccgggtattactcggtgggaggtaactggattggaatcacccacaaccttaaaagtccgccccctcctcttgtcgaaggaagcgacccccgccgacctctcagaaaacgccacgacagttattcagaaagcatggcggcccaaaataaacgtcctgatgcagatgcctggtctaaaggttgtccgtcgcgacaccctcggacgcgaaagacaggaatccgccgcccacctcccagtctcgtggtcgccgcaggctgagtgacgtgacatggctaggggctggcaggttcttgatgtaacaagttcacctgtctcgatacggcatcggcgcggtgagcttcaggtatgtgtcgatggcgaaattgtgggacgtgcgatgctcgccgatttagccgtcgtgctgatcggtgctcgttcgagtgtatccggcggtgcgctcatcgccgcgaccgagcatgacgttgcaatacttatgtgcgattggcgaggcgtccccgtcggtggtgcgtatgcgtggtcgaatacgacccgcgtcggcgctcgcaaccgcgcacaagcagcgctcagcgcccccaggcgaaagaatgcgtggggccgggtcgtgcgcgccaagatcctcggccaggctcacaccctggatgccatcggcaggtcaggtgggaatgaacttcgcgacattgctaactcggttaggtccggcgatcccgagaaccgcgagggcctggcggctcgtatctactggcaacgccttttcggccacgaagagttctcccgcatacccggttccgcggagggacgaaacgcacttctcaactacgcgtacaccatactgcgcggtcacggaatccgtgcggtactggcagccgggctcagccccaccctgggcgtattccatcgcggccgcagcaacccattctcactggtcgacgacatgatcgagccgttccgcccggccatcgactacgccgtcgcgcagatcgatgtggaagcccccggcatggacgcccctgcgaccaaaaagcacctggtcaatgcatcacgaatgggcttcggttgcggccggattctcacgacagagatggattcattggcgcaacgcttcggacgctacgttgaaggcgaagtggcaaagctggacgtgccggtgtgggacggacccgaggaagtcattgacgatgagtgaggatccgatgtgggcaatcgtcatgttcgatctgccagtccaaactaaggaacagcgccgggaagcgaccgcctatcgccatctcctgaaggacttaggctttcaaatggtccagttgtcggtgtatgcgcgatactccgtaacgtccgcaacaagccttcggctcgcttcaaccttgtctgcgtacctacctaagggtggggaggtgcgcatacttcgcgtcactgatcggcagtggtcccaaggtttccgtttttgcaacggagacccctccgacatcgagcaggcacccgctccgctgctgcttttctaatcgtggttctgacctatttcagcaggtcagaaccacgattagggcctctcagaagtctatcggaggggcctgaatacgattcccagcataggcgtagtgagtacagcgctagggtgaagtctatcggaggggcctgaatacgattcccagcgttgcctagatgttagtgcctagtgcgagaagtctatcggaggggcctgaatacgattcccagcataggtttgttgtgccggagcctctgacgaagtctatcggaggggcctgaatacgattcccagcacctcaaaaccctcaccgacaccgaactgaagtctatcggaggggcctgaatacgattcccagcactaggccgtatccgaaaacgtgtagaggaagtctatcggaggggcctgaatacgattcccagcaagctctctgtcactggcgagcagcactgaagtctatcggaggggcctgaatacgattcccagcctcggtcagggtctgcgcagggtgggcagaagtctatcggaggggcctgaatacgattcccagccctctcgaatcgctcaaagccgcatcgcgaagtctatcggaggggcctgaatacgattcccagctgggtgttggtgggcttgagggcacgacgaagtctatcggaggggcctgaatacgattcccagctcaggccggtgagcgacctgcttgcagggaagtctatcggaggggcctgaatacgattcccagcagtggcgtacggaggttcggggcgaacagaagtctatcggaggggcctgaatacgattcccagcccggtcgaggggatcgcgttgccgtgaggaagtctatcggaggggcctgaatacgattcccagcattccgggccattgtcggagtttgtgcagaagtctatcggaggggcctgaatacgattcccagcttcaaatcaaacgcgcacgcaaagtcgtgaagtctatcggaggggcctgaatacgattcccagcgattgccgacactagggcgtaattagcggaagtctatcggaggggcctgaatacgattcccagcgtctcattgattacggcaccgcatttgcgaagtctatcggaggggcctgaatacgattcccagcccgaacaggaacggcgacagcgactatcgaagtctatcggaggggcctgaatacgattcccagcaggacagtgatgccgccgttgcgcgtgtgaagtctatcggaggggcctgaatacgattcccagcccgccgcgcgcgcccacttcgcgccggagaagtctatcggaggggcctgaatacgattcccagcccgaagatcgttcgcacgaaatcccacggaagtctatcggaggggcctgaatacgattcccagcatagaacaagcccgagcgcggccccgtggaagtctatcggaggggcctgaatacgattcccagcgagaatccaacgcttcagcccacgcggtgaagtctatcggaggggcctgaatacgattcccagcgttcctggagaggctcggcgggtgaaccgaagtctatcggaggggcctgaatacgattcccagcccagggcggtcatgctgcgaaccctttagaagtctatcggaggggcctgaatacgattcccagcactgaacgcgcggattatgcgcagattagaagtctatcggaggggcctgaatacgattcccagcacgtgcttcccttcgcgacggatcgcgtgaagtctatcggaggggcctgaatacgattcccagcgggtttaccggtgcacgatgaccacggtgaagtctatcggaggggcctgaatacgattcccagcgaatccgcggttttcaggtctgccggcagaagtctatcggaggggcctgaatacgattcccagcgtctcgcggtattcagggttagtaatgcgaagtctatcggaggggcctgaatacgattcccagcggatacaagcccgactcgatcaacacttgaagtctatcggaggggcctgaatacgattcccagcattccgggccattgtcggagtttgtgcagaagtctatcggaggggcctgaatacgattcccagcgtgagcggcgagcggtgagcgggcagtcgaagtctatcggaggggcctgaatacgattcccagccgtatctcgtcgccgcgggcacggtcgggaagtctatcggaggggcctgaatacgattcccagctggacgcataagcatggcgcagatcggagaagtctatcggaggggcctgaatacgattcccagcaagagtgcgccagggtgccagaagtccagaagtctatcggaggggcctgaatacgattcccagcgggagcgaccagcggagcgcagcgtagcgaagtctatcggaggggcctgaatacgattcccagcctgtcgtgtagtagtcgtcgtcggtcgtgaagtctatcggaggggcctgaatacgattcccagccatctaaggggcgtagacaactcacttggaagtctatcggaggggcctgaatacgattcccagcttcccgctgggcagtcggtgacgatcgagaagtctatcggaggggcctgaatacgattcccagcggatacaagcccgactcgatcaacatttgaagtctatcggaggggcctgaatacgattcccagctacgcgcgcgaccacgcggcgatcaaccgaagtctatcggaggggcctgaatacgattcccagcggaatcggcggcgttcatgctcggttcagaagtctatcggaggggcctgaatacgattcccagcatgaggctggacaggcactcgtgctccagaagtctatcggaggggcctgaatacgattcccagctgtggctgagtcccgtaaagggttttgcgaagtctatcggaggggcctgaatacgattcccagcacgggcgcacggactggcaccgcgtgacgaagtctatcggaggggcctgaatacgattcccagcaagggcattgcacggcgcgaggcagaagactcgacaagctcagccccctgccagcaatggcatgaaacgaccaaggcactccgcacaaggcaagcacaaccgcaagcaatcgaccccgccgccccgctccccgcgattacgctcgcgtcaagcaggtaaatacctagcgatgcctgtggggcgggtgacagactcaagggagtacgcaaccgatacaccgacaggcaaactcgtgagaaccaagcacaccattccctttaccgaccagttcgtccgcggcgcggcggacctcgaaatcacgagcgagggagcaatcccccaccgcatcgcgaccgccaaccgccatcgctaccgcgacccccaactgatgggcgccgaggctcagccatccggcgtgcgcgtcgaactattgacggccgcaaccaccgtcgaattgaccgtccacacaacgcggttcacctacgccgggatcacgcgtccgcgggggcaaatcgacatcgaggtcgacggccacataatcgcgagccacgcgctcacgggcggaaccgcgctggaaaccgacttcgcgacaggcacgacctcgcgaaccgtcggccccgacgacgtcgtcacgatcagtgacttacccaccggaacccaccacatcgccatgtggcttcccttcaatgaacaggtcgaactccgttctctcgttgccgacgcggccgccttacccgtcgccgcggcgggagtcacctggatcaattacggcagttcgatcagccagggctcgaacgcggcctcgccgacgggcatctggccggtcgtcgcggcccgcaacaccggaaacgtcgacctcatcaatatggggttcggcggcagcgcgatggccgacccgtttattgcacgccagatcgcgcaaacgcgcgcggacgttatttccgcgagcatcggaatcaatgtcgtcaacctcgacgccatgcatgagcgcatcttcgtcccgctcgtacacggattcttggacacgatccgcgacggccatccaaccacaccgatcctgctaatcacgccgattttctgcggcatccacgaagacacgcccggccccggtgccttcgatcccgccgcattcgccaccggcaccgcacgcttcatcgcaacaggcgatcccgccgatgccgcgccgaggcacctcaccctcacgtcaattcgacgcctcctcacgtcaatttcgaacgagcgctccgacccccacctccacctcattgacgggctagaactgttcggcgccgccgacgccgaggccctgccgctcccggacgcactgcaccccggacctgccgcgcacgatctcatcggcactagattcgcacggttcctttgcacagtggcttccgcgcggtagcgactccattcgccctgcgtataatcgcgaggcaggccaaccacacacagcaactacatatgaaacgtgagaagtaaatgcgcaataaaatgaccgccctcgccatcgccgcgctgctggccgcatcgacgctcggcgcctccgcacccgcccaagcggcggaaagcgtcgtcgctgcggcgagcgcaacaacggcagcctcgaacgcaacgggcgcgacccccacgctggccgcacccaaggcggtcactatcacctccacgttccgcacgagcctggccggaatcagcaaacctaagaacgcccttaaactcctcactactttcgcccaggtgaaggtcaagggagttacgcagccaatcgttattggagtgaaagaagggcctaggagtgccgcgcaggcctggaagctcaagaagaaccaacgggtcaacgtgaaactcaagggtaagaagactcaaaagctgcgcgttatcaaggttctcaacaaatcgacagtcgcgagctacaagccaacctttgcggagcaatcccgcacgaagctgatcatcggagtttcctcggtcacgaaacccggaaaaatgaaactcattttggtcggcaagtaggtcgccgccggaccccacgttaataagcgcaaggtccatctacggcctcggatcactctaatgtttatggtgcgctgaacgccgccaagtcttccgcagaatcgcaactaacagcagcccaggacgcgcgggctgccgccgcggcgcaactcaacggcacggcggcattggcggcggacgccgaatcgaccagggcggagctagccgctgatctgagcgccgaaaagaaggcggcggaggcgaccgcggcggccaagaccgcagccgcaaaggctgcgagcgccgcgaagaagaaggcgttggcggccaaaaagaaactcgcccgcgccaaggcgaaacttgccaaagcgaagaggcgggcctcgtcggcgaaaattcgcgcagcgaagaagaccgtgaagaagcgcacggtctcctacaagaaggcacaagcaaaggcgacgagcgccgccaccgccgtccaggtggcatccgcgaatgacagcgcggcggtcaaagcccgggccaaggcccaacgcgcggtggaccggaacgcgacacgcatttcctcctacgcggccaagacggcgactctcaccgaatccatcgccgcgctggccgcggacatcgatggatacgaagcggacatcgcctcgctagccgagcagctggcggcgatctcggagaaatagcctgcgcgcaatcgccaagtggtggccggtggcgccgagggactgacgatcccctcggcgccaccggcacttatgcgcacgggtttggttcccggcgaggttacgcttgcaggatgagcgaaacgcgcgcaatcgaggccctgcgccaagccgaaatcgcattcaccatcacccgccacggccctgccaaatcgttggcggaagcggcagcgatgcgcggaatcgatccccgccaaatcgtcaagaccctcgtggtcaggcgggccgacgatgactacctattcgtcctggttcccggcgaccgcgagatatcgtggccgaagcttcggggcctgctcggcgttgggcgcctgtccatgccgccggccgcaaccgcgttcgcggtcactggctacgaacgcggaacgatcacgcccttcgggtcgacgaccgcgtggccggtcgtggccgactcttccatcgttggccaaaccatttcattgggcgccggcgcccacggcgtagcggcaacgctggcggccgacgacgctatccgcgtcctttcagccacggtggccgacgtgacgacgccgcaggcataggcgtggcacgggcgctggcggacgcgcaggcataggcgtggcgcgggcgctggcgcagtcggacgcgcaggcataggcgttggcgcaggcataggcgtgccttggtggaggcgcaggaacccgcgcccggcgcggccccgctcgcagatggcatggcgagaggcgcccgcgccctagacgctagcggaatccgcagcggtttgcgccaacgagctcaccaaccattttccgtcgaccttagagagcgtcaacgtgtaggttccgttcgcggaagaatccgtcgaccccttcatcgtcagggtcgcagtggcgttcgacccctgggttttcacgtcactcacggtgaggctgaagccgtccgcattcggttcgaacgacaaatcggagcatgtgacggtctttccaccgcgaaactgcgaggttgtcaggttgttgacgacttccaagaccttgtcatcgcacgattctgccgccatgaagtcgctggcgaatcgctgggccacgtgggtcggagtgttggtgttgagcgctccgcggatcgcgaagacccccacgccaatacccacggccagaatcagggcggccgccgcgatgagaatcaccgtcttcgttgtgctcaggcggttcttcggcttccccggcgcacccgggaaacccggctgcccgtaggctgcggggtcgtacccctgcccggccggataaccctgcccagccgggtaacccggctgcccgtaagctgcggggtcgtaaccctgcccggccggaaaaccctgcccagccggataaccctgcccggccggaaaaccctgcccagccggataaccctgcccagccgggtagccggggacgctgccgaaggcaggctgcccgccggagttgggcgagggcatctgttggccgggcatgggagccgcccacggcgaccggtcgccttgcgccgccgctggcaccgcgccgcccgccgcttccgcgggaggcgccgtcgcccagtggggagccggcgggggtatgggggagaactcgtcactcgcgttgccgacgccgggaagactgccaccgctcggggtttcgctgccagcctgtgcgcccgcggcgccaccatcgcccggcgcggtgtcacccccagacggtacggcccatccgttgttgcggtcgttcgattcgctcacgattcaccctttccgagcgggatcggcggatgcgagcggatttactcgaacaacccttgaccaatgtaaccgccctcgcgcacccccgggggcactgcaaaaacggccgatcccacgtgcctaatgtattcattaagcgcatcggacttcaaagaacgctgaacgtcgatgaattgttgcggatccttttggaaggcgatgaagaacaatccggcggtcagttgccccaaattgttgttcccctcgacgaagttgaagccccttcgcaggatccggacgccgccattattgtccgggtgggccaagcgcacgtgcgaatcggcgggaatcgcgaaggccccgtccgcttcgaccgcgccgaaatcgggatccgtgaattcctccccgcccgaaagcggcgcgccctcgaatttgtccctgccgataatctgttcctgttcgcccagttgggcccggtcccaactctcgatcgtcatcaggatcttgcgcaccaccaggtacgtcccacccgcgaaccaggccggctgcgaatcggcgtcggtccacacccaggcttccaagtcggcggtttcgttcgccatgatgttcgcggtgccgtccttgaatccgaacagattgcgcggggttgcctgcttcttcgacgttgcggaggtcttgccgtaaccaagctgcgcccaccgaatcatcgccttgccgaaggcaagccgggtcaggttacgaatcgcgtggacggcaacctgcggatcctccgcgcatgcctggatacacagatcacccccgctcagttcatcttcgaggatgtcgaacgcgaacagcggcaaatcggcgagcgcatccggcttccggtccgcgatactcaatcgctttcccaactcgcccgtaaaaagcgatgggccaaaaccaaacgttatggtcaaagcagcgggccccagccccagcgcctcgcccgtgtcatccggcggcttcagcgggcctcccccaacggcgccttcggcggtgacctgctgcccgtgggtcaggcgcgcggacgcgtccgtccacgccttgagcagctcgatcaggtcatcgcgcgtggtggagtccgtcaggtccaggctcgcgaagtacaggtgctgctgcacctcggtcgtgatgccagcctggtgggttccgtagaaggggtggacggtcttggcgccgctagcggcctgggcgcgggcggcgccgatcccgtaaccggcaccccccgccgccgcggccgccgccccggcaccaaccaaccctaggaatccgcggcgcgacacaccgccggtttcctttccggttctttcgggttcgttgggcatccggagcctcctgcgttccatcgtctacttccgcggagaccagccccgcaacctactactc

SEQ ID NO: 1632 - DNA, 23180 bp, synthetic construct
  source 1..23180: mol_type = other DNA
  misc_feature 1..23180: note = Synthetic
taatgggttataacgctactatgctgccctctgtaattgaaaatattgtatatttggagctttgcagacgtggctatgcggtgcatattggtaaaaatcagacaaaggaaatagattttattgcccaaaagcaaaatgaaaaactctatatacaggtttgtgttaattttcccccagactccacgcgggaaaccgataatttactggccatagaggataattaccccaaatatgttattacgcttgataaacttgccgtgggaaatattaacggcatagaaatcatgcacctagcggattttttgttaaaataaatgcatgcaaacccaccagataatggaacgcagcccgattaatgatttggaattacgagcccttttagaaccgaatttgaccgacaaaaccgacgaccgcgaagttatttttaagggaatagaacaatcttattattacgaaggctacaaaaaagagggaattttggaagaaatggatgcccgccaaagtaaagaaacaaaaaagcgtctgatattattatagttaaagtctcggggctttaagagtaaaaactccaaaagtccatcctggcaacgctccgctcgtggaacatcatggaataaaaattgataggcgcagttatctaaataccccaatttattgtcgcaagccttacaaagtaatggttctttaaacccattttgactgtgaactttatctaggagtatttgcttagcatcaatgcccacgcactgtccccactgttttagcaaataaaatgactttggaataatatgagaatcaatcagccagacttcttgcccacagtacctacaaatacctttttgcattcttacttcaccaactcatcgctaatcaattctgcctgctctaaaacacgctctgtggcggcttgccgctggtccggaggatagttgtacttacgcaaaatacgctttacgtggagcataatttgggctttcacgctctcgcgcttgctccaatccacctttacggatttgcgcaggtaattggtcaattcctgggcgatttgttttagcacatcatcccctagttcccgcacggccgattcattctcttccagggcgttataaaatgcaagttctttctcggaaaggcccaaattctcgccctgttttacggccgcattcatctctttggccaaggtaagcaattcttcaatcacttggctagtttgcagagaaccgttattatacttattaaccgtttcttttagtttttccgaaaatttgcgtagttgcggcaagtttaacttaaactggctcttaattttcccttccaataatcgtttaagcagttctgccgccaagttcttttgcggcatttgttttattttgtctaaaaattgttcatctacaagtgataaattcggtttatccatccctgcggcttcaaaaatatcaatcggctttgcggtaattacggcttgagaaactaatgtgtctaatatagatttccaatcttttaatttgtgtgctgtatttattttcttattcatagccgaacgaataagcccaaagaatgctagttcatccgtcagttttgcggcttccggcaaactttggcacaaaccgtatgctttttgagcggctagcacattatcacaaaaatctttttgagccgtttcccgattggaagcatgcgccaaaatataatcccaagcaagcggcactaaatcgtatgcctccgtctcaaaatggctgtaatcaaaccctttcaaaaatgcgcggcaaacatccatataagactgcaacagttcataagcgcgtttaatatccgccgccacatccccgcgcccaccgccttgggtataatcacgcaccgcttgttccaatgcccgagccataccgatataatccaccacaagccctgccgttttgcctgtaaacacgcggtttacgcggctaatggcctgtatcaagttatgggcacggatgggcttgtccatatacattgtatgtaaactgggcacatcaaagcccgtcagccacatatcgcacacaatcaccaatttcatggggtcgttggggtctttcatgcggttttcaatttcggtttttacggcgtcgttgtaaatatgcggttgaaaattggcggggtcagcggcactgcctgtcataattactttgataaacccttttttcgggtcgtccgagtgccactcagggcggattttaacaatttggtcgtacaagtccacggcaattttgcggctcatacacacaatcatacctttgccgtctaacgatttaagccgcttttcaaaatgtgccacaatgtcagcggccaataattcaagccgttctggcagtccggccagtttttcaacggtaatccactcagcctgtgctttctcgttatcatccatatctttcatgagctgggcggctttttcgtctaaatgttgtaaaagagcgtcgcgcgtatttagttggatatgccgtgcttcgtaataaatcggcacggtggcgccgtcgcggatggcgtcttgcatatcatatatatctacatattcgccaaacacggcctgcgtatcccggtccccttcggatacaggcgttcccgtaaaacctacaaagcacgcattgggcagtccgtcacgcaagtatttggcatagccgtatttaagtttacctgttttgaaattagccccaaaaccatattgggtgcggtgggcctcgtcggaaattaccacaatgttggaacggtccgaaagcattgggtaggtatccgcgccgttttccggcaagaatttctgcatggtggtaaaaatcacgccgccgctcggtttatttttaaggagtgtttgtaatgtttcgcggctttcggcggccacaggggctagttcgggcacacattgggcaaacgtgttaaaaagttgggtgtctagttcgttgcggtcggtcaccatcacaatcgtggggtttttcatagcgggcgagcgcataattttgtgcgcaatacacaccatagataaactcttgcccgagccggtagtatgccacaccacgccgcctttgttgctatgcgcatttaaggcacgcaaaacactttctaccgtcttgcgccctgcaaaaaactggtggtagcccgcaatctttttaatcgttttggacttatcggcttcaaacaccacaaagtattgcaaaaaatccaataattgggctttgtcaaaaaaacctttgattaaaatttcggcttcgtgttcggtttcttgggtgcgtttttctccgtgtaaggtgcgccacggcatataacgctcttcattggcggaaagtgagccaatccgcgccactacaccgtcggacaaaatacacgctaaattataattgaacaaatcggggatgtccgttttataggtttggatttggttatacgcggccgaaacatccgttttttcattagacgggtttttgagttccactacggcaataggcagaccattcaaaaacactacaatatccgggcggcgcaagttgacagggccttgaacagcaaattggttgacggctagaaattcgttattctcggggttgttaaaatccacaatttttacatcggtggccgtatcttcgcccgtagcggttttgtggcagattttaatgccgtctgtaaggtaatgataaatggtttcgttgcgggcgattaacgtggcttcggacggattggctagcagttggtatgcctcgtccagtaccgcttgcggcacgcccggatttaagcagacaagcgcatttttgacgttttgcggcaaaataacttggcgaacatccccccgcaacggattaacaccttcgggcaaaatatccggcccaaacacagtttgatagccgatttgccgaaagtattccatacacgctaattccaaatagttctcgttaatttgcataaaaaatggcaactcttgacaaaaataataaaaattgcgatactaatattagcgaaggtaatttccttaaaaaaggggctccgaatggttcctcaaggttaaaacctaaaatgtttttaaggttcttcgcttatttttttcctttttaactaaataaagaactttcctctataattaaatttttaatcatattataaaaataatcgtccccgtgttcatatttgcgaaatatagcccacgataaaaaatccaccacctgcaaacctttcacagcagaggccggacgtacaattacatccaataaaacattatgcgtattagaaatttgtgtttctaaatagtgcttaaaattttcattcaaaaaacggttcgtttcccgccgggaagcaaccaatgtaattttatctttaagcggcaatagttttttacttgccaatctatttaataaaatatttgttatatagttatacaaaatagttttctcgtcttgcaaccgagtatacactttatgtttattcaaggatataaccattacggaaacgtctttatctttcaaaaaagaaaacaattttgtccgtgttttattatcttctttattacaatgcaatgtgcctgcgtgattacggcgctttttgggggcaatagaacggaatgtcttattaacgactttatctaaaatcttatcgttatttgccagtaaaaatgtaataataaaattttgggatgttttgggtttggtaaaatcaaaacccaagcaaccactttcatccataaatatataagccatactatattatacccttatcccgcccaaaatactgcaaacaataattttcaagatcttgttcgtttattaagaacaaaatagatattccgtattgaaatatgataatttaaatttcacattacttttatgtaattccttaacttgagattgataaacttgccacgatacttttatcatctctggggttttgacatacgatggcagataaggatcttcttcatgttctttcttaaatgtttcttctgtttcatctggatagtttgtcaaatcgttgttagtgataatattaagaaataaggagtttaatcgttcacaaattataactgtttgtaacaagttatttgtaaatctagaataattttccttattcctagggtcagccactacaacggggctcattggagaaataagtccaggtttactagctatttcaacgcctctgtttgcgatttcttctccgcgatggattatggcatttctcagattccggacataaaaataattattcgttcctcccaaaacattttctacttctgtttgggttaataattctttgtctttgatgaggtagtctattaaaccaactaaataagtaaaataagcaccgtaaaaaatattcattcggcacgaatcatcgttggataatggttttttaatttgaagcatttgctgaattgcatattttttgacagatgcaaaatatgccattgttgccaaaatatccaatttttcatcatccttaaccatattttcacacctctattttaccggagatgagacgcggtaaaagcgtgtcgcgcaactccgttaatgtttgtatttgttttttattgtttcctatcttatcaatatatacatttaaggataatttcttttgcaattccgtattaggaattacaaattgtttatcttcacaaaattgcttaaattgaaaattactaatacctgtagattgaacctggtactgttcaatttctcccgtttgatacatcatatctaagtacaaataaaacagttcggataacaacaattttttattgggtcttaacaatttgcaaaaactcgcgcaaatcactttaggaagggatttaataatataatcacttacgaataaagcccgacctaccggttgtcctttactacctccagcaacctccaatacaatatcaccttcttttaattccctgctagtgtgattagattttttgtggaaacgaacaggaacatcattatgggccccactagatcgcaggcttggaatatctgttccgcgaataacaggggctttaatgggaaaactttcgctttcttcttcatttccccaaccgccacctatgctaaacgccaacagttctcctacatttttcacttcccagccggaggggatggggccaagcggggaatcagcaaaactggacgggaataaatcgtaaaattcgtcggttaaatgatattcacgcatgatgtcggctttgggaaggcctttttgtttggcgcggacgacgtcaaaatccacaaaccaacttttaaagagggcctttgccatatcttccagcgttttattttgcttttgcagtagttcaattttatcgtcaaatgcccctaaaatatccgcaatccgcttctgctcatcaagcggcggcagggatatgtctaacggatggatatggtttctattcaacgtaggcacagccgaaccagcagcataactttgtaaattcattgtttttaatagataatataggaaccttggataatttcccttaaaattatcaataaaaagtgtagtgttatgggcccagcaaggatatttatataacgcgggaatccccgtatttccacttcttccaattaccagacatggagcttcagtcgtatactccttatgataaccaataattccatttgaaccaacaacgggataccctttgccagacatttgatcttttggtaaatcataccctctgcgaaaatttaacgcatcccctaatttacattttttccaattacttttttgcactttttttcctcaacttagggaaattttttctcaattcttgacgttgtttttcaccttctttttctgtattttgctttagaatcccttttattttattaaacaatttgcgatccttccgccactcttcaaaaagaggccaactattccagtcatctaatttaatgctagaactaggaaaacattttataaagttttctttatcattttttaatacacaaatagctgcttcatatttggaatcaaaatgaccagttttcagattagccaaaattttatctaaggtctttttttcctctggaatatgcttcaaagcaatacagtaattaattttactagaaattaaactttgtccgtccaatacaggaaataaacgctcaatgcttgaataaatttttgctgttgcagaaaaagatttacgacataacaaatcgtataagatatttgtaacattatgattcaaaaaatctatagcatttattctagcggctaacgaaaaaataagaatacaaccaaatgctagtatttcctcactaatatgacataaatactttgaaggtatgacataaatttttccgatcattttttcatctgcgtcaaataaaaacgccaaagcttctgccgttacaattccacgattgtgaactaataagttacgtattttattggctttttcaagtaaatcaaaattaatttttaaaccatttttagtaatacataaaaatttaaaaacagttttcaattgttcactaaaatcctggaataaaaatgtatttaaatatgtttgtatcaaaaaatgttttacacttacgacatccttacacttatcaatatcttcaatggaaattttgatttttttatctacaattaattctggatatgttagtattagatatgttagtatttgtttaattaaatactcaaaattagtcatcaacattaaaaaggaactatttaaagataaaggatgataatttccaacttttataatatcttttgctcccttatgaattaaataaacataagaaactggagttatttttttgcttttaatctctcgttctcccgctgccaatttcttcctgatacgttccatttcttttttttgtatctttggcaactctttttcaatcgttgcttgaaattctcgtacctcctccattaacatatcaaattgggcatacatattttccatttcttgattatgttctttcttttttttatccatattatttccctcccaattttgccaaattttcttttattttcgcgtccagttttgcactttctgtcatttgttctgtcagttcggctgtcaggcgcgccattttggcggaaaatgcttcgtcgtcttcgtgggtttccgccacgcctacatagcggccgggagtgaggacgtaatcgttggctttgatttcgcccaacgtggcggatttacaaaagcccttaatatcggcatagggtttcttttgtcggatttgttttatcccccccatcggcttatcagccacttcccccgcatggggggaagattcacaactccacgccgtactctgtcccccttgcggggaaagtacgccgcaggcgggtaagggggagctatcagcgccgttttcctctgcacagggtgcaaattcatcaccgcgccaagcgtggtaagtatcggctattttagcaatatccgcatctgtaaattcacgtcgtgttctatcggccataaagcccaagttgcgggcatcaataaatagaacttcgcctttgcgttttttctgcttgcgcaagaaccataaacataccggaatttgcgtgttaaaaaataactgccccggtaaagccaccatacattccactaaatcgttttccagtaagcgttggcggatttctccttcgccgccggtattggaactcatagagccgttggcaagtaccgtccccattacacctgtgggagccaagtgcgagagcatgtgctgaatccacgcatagttagcattacccgcaggcggaataccgtattgccaacgcgggtctttggtcagtttctcgccgccccaatcggaaatgttaaacggcgggtttgccaaaatataatcggcgcgtaaattggggtgttggtcattgtgaaaggtatcagccggctcttgccctaaattaaactctatgccgcgaatagccaaattcatagcggctaaacgccaagtcgtcgggttgctttcttgcccgtaaatagacaggttgcctgtgccttggtggagttggacgaagcgttcgctctgtacgaacataccgcccgaaccgcaacaagggtcatagaccttgtggttttcggtcggggccatgatagccaccattgttttaaccacagaagccgctgtgtagaattggccgccacgcttgccttccgcatccgcgaacatacctaaaaagtattcgtacacttcgcccagagcgtccggtgcggtttggccgttttcaaagccaatggtggaaatggtgttaattaaatccgccaagcggccttgcggtaaggaaaggcgggcatagtttttgttcaaaatgtttttaagtttagggttttctttttcaatggataacatggcatcgtcaatgagtttgccaatgttgggctgtggggcattgtcgcgcaaaaattcccagcgggcctcgttaggaacccaaaaagcgttatgctcggtgcagtagtcgcgcatgtcttcgtcaatgtattgcggattatttttgtagtaatcatcctcttgcattttcttgcgcaaggcagagaaagaatccgaaatgtatttcaaaaagataaggccgagtacaacgtgtttatattcggcggcatccatattggagcggagttggtcggcggttttccagagtttttgtttggtggcgttatccataaaaagtcctgataaaagtatatatttttaactatactaaataaaaagcgttgaatacaatgtagcggcccgatggttggctatccggcaattagccgccaagataaccaaacggaaatatgtagtaggtaatttaagtttaacacaaggagcttttatttcccaacggtaaacctgagtagcacccccggcatagccgggggtttctaaaaaacaaaaaactccgggcacttggccggagttataaataaaggatgttcaagaacagagccttgcgattgcacttattacagtagcttactgataggtttattgtataatacaaatatatcagttgtcaaatcataaaaataaggggttttactatgaataaaattttaggaatagatatggggattgcctctttaggatatgccgtagtaaatatagatgatgaaaattttgtgaacggagatattctggcttccggcgtacgcatttttgatatagctgaaagcccggacggcagctctttagccgctccgcgccgggccgcgcgctccgtacggcgcattttacgccgcaaagttatgcgcattaaagccataaaacaattatttttagattttaatttgctttccccgcaggaattggatttactttccaaacaagacttcaaaacgctatatcaagccacgcttgaaggccaacccatccccagcgtttgggaaatccgcgcacgcgcgttggataacccctgttccttggtggatatatgccgcgctttgttgcatattgccaagcggcggggtttccgttctatgcgcaaaagtgaaaaacttacgggtgaagccgggaaattattaaaaggggtggaggaaatgcaaaaaaagctccaagaatcccacttccgcacgattggcgaactgcttttccatcttccggccactgaacccaaacgcaataaagacggcagttatagccattccgttgcccgcactttactggaagaagaagtacaccttattttacaagcacaacgggcaaagggggttaatgcgctttcccaggaatttgaaacccaattttgcaaaatagcctttctgcaaaatccactccaaccgagtgaccccggattttgcacactggaacccaccgaaccgcgggccccgaaaaatgcctatacggctgaactgttcgcggcgctttgcaaaatcaatcacatttatttagaagaagacggccaaagccacgctttaagcgccgcccaacgcgctttggccttggaaaaatgcttttccacacaaaaaacaaattacaaacaactgcgggaactttttaacctgccgaacgatattaaatttaacattagctatacggccccggccaagaaaaaaagcaaaaagaaagaggaagcgcaatcgccggaacaagccgtgcaagcgccccaagagtatgatgccgagaaaaataccacgctttacaatatgacgggctttcatgcactaaaaaaagcacttaaatcctcccccctttgggctgaataccaaaccaatccaaacggaattttggataaaatagcagaagtattatcccgctataaaagcgacggagaaatccgccaacatttaacggccttgggcctgcctgccgaagccgttgaaaaactccaaaatgttaattttagcggttttatgaatttatcattagtggccatgaataaaataattcctttcttaaaagaggggttccgctatgatgttgcctgcaaaaaagcagggtataacttccaagctccgcaacaaaataagggcttatccaaattgccgccattaacgcaagaggataaccacaccataaccagccccgtggcaaagcggagccttgcccaagcacgcaaagtaattaatgcgcttaataaaaaatacggcccctttgatgctgtacatatagaagttgcccgcgaaataggtaaaagttttgaacaacgcaaagaaatagaagccgaacaaaaagcccatgccgcagaacgcgcccaattaaaagaggttggaatagacggtattatcccgcaaacggaaaccgacttaaaaaaattgcgtttatggaaagaacaagacggccgttgtatgtatagcttccaatatatagaacctgaaaaaatattggaagaaggctactgccaggtggaccatatcattccatacagtttgtcttttgataactccttaaacaaccaagtattatgtttaacttcggaaaaccaacacaaaaagaaccaaattccctatgaatatttccatagcgggaaagcccaaattacttgggaaaaatttgaaggctatgtagtaaacagccttcaaaatatgcgcatggcaaaaaaacaccgtttattgaaacaagaattaaccgaggacgacctgcaaggcttcaaagagcgcaatttaagtgatactaaattaattagccggtttatgaagaactacctgctagccaatctccgcctaaccggtaaatacaaacaaggtgttttttgtgtaaatggtaagcataccagcactttacgcggcttttggcgtttgcaaaaaatacgcgaagacggggataaacaccacgcattagatgctattgtaattgcgtgttgcactaaccgccttatgcaatatatttccaccaagtaccgccaaaacagggaacttgagcttcaacgcaaagaagtagctgttccgtggccgtttccgcattttaagcatgcggtagaaaattccttattaagtatttttgtatcccgtcccccccgcaaaaaagtgacgggcgcactgcataaaaatacgtttttctctgccaaacatataaaaaagggcataaaaaccctgcgtacggatattcaaaaactgacattagattccctcaaaaaacaacgggaattggaagtcaaacactttggggtagagcgcaataaaccgctttatgatttaattgaaaccgcccttaataaccgtccggatgacaaaacgcctattcaagtacaaatgcctactaaaaacggcggttttgtgccggtgcgccatattaaattaattagcgaaagcacttccggcattcctgttttgggcggtacggccctggcggaaaacgactctatgccccgcgtggacgtatttttagaagacggccaatattatgtagtgccggtttacaccatggattttgccaaaggagtgttgccgcttgttgcacagccgtccggccgcctgatgaaaaaagaaaattttgtattttctttatataaagatgattatgtaaaccttgtcaacaaacaagacgacaaatgggaagggtattttaagcaatatagggccaaatcaggccaaatatccattgaaagccacgataggtcaaaacaatattttgtcaataaaaaagagtcaagtacaaaggatattatgccttccaccttaaaacttattgaaaaataccaaatagatatttttggcggaaaacacttggtcaaaaaagaaaaatatataggcattatccgcaaaaataaaggctttgggggctaatatggggtggcaaattttgcacttgagccaacaggcgcatttatcccttaaacatggccaatgcgcggtggattttgccgccggagattctatttcgcttccgttggataacctgtccatcgtggttttggaatcgctccatattacattgtctgcggctattttgcaaaaaatggcggccaacggcattgccgtatttgtatgtaatgaaacccacacccccaacggggttttactaccatttatgcaacacttttgcacaaccaaaatggcattccagcaaatacagtggtcggccccgttccgcagccgcatttggcagcaaattataaaaagtaaaatcaaagggcaaagcacggttttgcggcaagttgggtttacggaagcggcagaaaaattaaaattactggcagaatatgtgttaagcggggattccgccaatcgggaggggcaagccgcggccttatattggcggactctatacggaactacatttacaagagatgacaccaccccccttaatgccgccttaaattacggctacgccattttgcgcggtattattgcccgggatattgccgccacaggttttatcccgtgttttggtttgcaccacaacaaccaacttaatgcttttaatttggctgatgatttaatagagccgtttcgccctttggcagatatattggtatatcaactccaccaagaccaacggttggctgacggacttaccccggatataaaagcggaattattaaacattctcacgcaggatgtggcgtataaccaacagcaaaaaaatttgttagccgtcacgttggacgtttgccgcagtttagcaagtgcgatggaaaataaagaccccaagcaatttttgccctttacttatggctgactataaacgatatatgagattgtttgtattgtttgatttaccaacaaatactaaaaaggaacgcaaatacgccgcccgatttagaaaagacctgcttaatgatggctttaccatgttgcaatattcggtttattgccggatttgtaaagggcaagaaagtgtggatttgcacatacaatatgtggcccaggtagtccctccaaaagggagcgtacggttgctatccattacagatatgcaatatgcccgtatgcgcatattagttggccagaaaaaactgcaagaaaacatacatcaacaactgcttttattctgatttttatttagaatccatgctaaaaacgcctattttttaggggaatttagcacatagattctataaaatctgtatcagtaaggctactgcaacgtaagtcgtcgtgaaattttctacatcttcattctataaaatctgtatcagtaaggctactgcaacgtcttcatatttttattctccagttattctattctataaaatctgtatcagtaaggctactgcaaccctatcacggcctagacttcggctgggagattctataaaatctgtatcagtaaggctactgcaacattcaactcctatttttaacttcaaataaaattctataaaatctgtatcagtaaggctactgcaacctcgtgtacttctcttcaagtacctttttattctataaaatctgtatcagtaaggctactgcaaccggaattaaaaaacagaattcaagaaattgattctataaaatctgtatcagtaaggctactgcaaccaatcttttaattaattgaacgccaatatcattctataaaatctgtatcagtaaggctactgcaaccggctatcaaagtaacaacaaaagacaaagattctataaaatctgtatcagtaaggctactgcaacagaaaagcggaataaatatcagcgggaatgattctataaaatctgtatcagtaaggctactgcaactcaatgaggatacggtgcgtgaccttgttggattctataaaatctgtatcagtaaggctactgcaaccaggtttgcccgaagtgtttaatgatgaaattctataaaatctgtatcagtaaggctactgcaaccaatttattaaacttaaatggcgacaatttattctataaaatctgtatcagtaaggctactgcaacggcctatatatagtatatataatacttgccattctataaaatctgtatcagtaaggctactgcaactcattaaagaacttttcaaactcttcaaaaattctataaaatctgtatcagtaaggctactgcaactctttaattttccaccaagttttaagaattattctataaaatctgtatcagtaaggctactgcaactttagaagcgtaatatttttctcctgagcattaaaaacgcggggaattaaggctccgccgccatggcgggctgtttttccacaaggcgggtggtggagcgggggcggcaaggcaagcggatgttaaggctccacggtcacttcggtttgtttttctacgcgcttggtgtggatgttgaataacagtttgaaccccgttagacggttggcctttttgtcgtaatccaaaagtgctatataaacagcgtctttcgcgtgatttttataaatatccacttcgcccattaaattcgggtccgccgacactacggcaatatagcgttgggtatcgttcggctctacggagcacatataagtagcggcaacagcctggttttgttggggcgcttgcggggcggcaggcgccaatttgcattgggataaataagggaaaattttttcaacttgcggatttgccaaaaaataatcggtaagcgtttgggtagccgcttgcgcactactcaaatccggccggggcctgtcggcttggcaagcggccagcaggaaacacacgcacgcgatacaaaaaaaccttttcatagtccagtccttatacataaattacaagaaaagcaccccggcgttgcaccagggcactttttttgcaacagaattatttatttgccgcagggggacactaattcgctgatagacaacacgcccaacaaatagctgttggtgcaaacttttttcccaccgacggtaccgcgggtacccatgcaggcggccataaaagcgcaagccatcatcaacaatacgatttttttcatacatttcacctcagtattggtataaaggtaaatacataccttcgttttattgtatatttttttcacttttataacaatgaataaatgcgcgtttatttacggataaatatacctcaccccggggccgcgcttgccgcctgcggatgcacaaatttattccaaagtatcttctaataaaatttccactacctcttgcaacgcttcgcgcaaggcttgcgcaccggggagtaagggttgcttttccccggtggagccgggggcaaaaatttccgcttccggcagatacaactttttattaatctctatcatcagcgccgtatagcggatgtttaccggggtggtcatcgcgcccgcaaaagggctgtttacggccacgcggtagccgcgcgtttttagcaagttttccaccgcccgcaatttttgaaacagcacctctctgccatccgcaaacatattgacgaactttccgccaaagattaccaagccaaactattcaaaaacggtttggagttcgtgtttatgttcatccccatagaatacgcctactttgccgcattaaaggaggataaagacttaaacgcgtatgccaaatctaaaaaagtggctattgtcacgccgtctaacctgttttccgttatgcaggtggtggaacagctttggcgggtggaacgcaccagcaaaatgttggaagaaatcctaaaaaccggggcggatatgcacgcccgcgtaagccgctttgtagagcgtatggacggcgtaaaaaccgccctcaccgcggccgataaagcctataccgaggccgataaagcattaaggggcaaccaaggcattatcaaagcggcggcgcatttggaagaattaggagtcaaccacaaaaaaacctcaacgccgtatttggaaaacaacccatagagcaaacagggaactggcttattggcaaactcctacggccgcaaaaaaccacgggcattcacccgtggttttctcatacaatcctgttttccggcgtgtgtttgggttattcgtttactttttttaaggtgtaatacggcgccagttccccttgcacgggctttttatcctggtccagcaaggtggcggtgccggagcccaactgatagtagcgcggggtgtcttcttccgattgcaacgtaataatatccccttggcgcgtataagtgcccacctgggtaaaagaagcgtcacgcccgatgtacgtttcgtccaacgcaaagcggccgttttcaaacaaaataagcgtggtttttatgcccgccgcatctgccgccgggagggtgccttcgtatttggtatattcagaggccggttccggggcggagcttacttcttccacctgcattccggctttaggcggcaccggcgttcccggggtgaaagattccactacttgcgtttccggctccggcgcgggcgcggtagaagtaccgcacgcacccaataaaataccggctgttaaaactgtaaaagatttgttcatattccaaaactcctttttatttattttaccaaattaactaacccattttagcacctaccaagtgcgcttatcaatcctgtttttgtactataataaaggaaacgggcctttttactctagcgaatgtttggctctcttaaacccgggcccgttttggggaggaagtatttatgaccagccaaaaagaaatatctatccgaacgcttgacacccccaccgagcgagaacgatacgaaaactgttatgtcttccggcaagacggcgaccgggaaattttaccgtattttgcggtgtcttaccccggggaaggcattttatttgtttccaaaatattgggccagctttctttaacccccaaagaggcgtccgataccgccctattaaaagagcagttggaaccgttcgccaaacaggcatttaccgaacacccggaagaaattatgcgtaaatggcttgcgggcctgcggctcacccaagatacagacggcgaagcccctgttcattatgtatttttggataaaccgcttacgctgcctatacccatcaccgataccctggtaaaaggtgccgacgggccgctcatccgccaaaaagcgtacgatattgccattacttttgaccaactgtttatggccatgcgccgccaaatataagcgttcttttgcgtactgaaaacaacaaaacgggaggcttcctacaacaagcctcccgtttcacgtgcggtacattcccatggggtacctccccctctttccctcgtataggaaaaaaattttataaatacaataatttgaaaccaatgctcaccccccaatccttttgtttccagttgccgcccgcgtgtgtactcacattggcgtaaaaagcggtgccttcgtttaccaaagtgccgatttccgcttccggtgcaaattcatgctgtaaatcgttttcaaaatccacataataataaagcgtggttaaaacataccactgggccggagaggtataccccaccgtcaggcgcgggcggccgtaattaaccgtactgcgcccgccgtcccccgctacacttacataatgtttatactccccgtgtatgtaaaactggtaaggcaaattaataaccgcaaaaacggacggactaatcacccatttcccggtgcccagggcctctttggtggcggtggggagcatggtttccagtttggcccccacgtctataccgctatgcagtttatgtaccccggtggcggataaactaatatcgcctatcccgttgacggaatggcccggcgtttcaaaacgcagtagcggcaattccgccccccagttaaaattttcgtcaatcacccggtagctttttaacgtcaccccgctgatggaaataccctctttattatcaatcaccgtcagcgtggggtttacttccaacgtggtgatgttttccgtcggctttacgccaaaatgccaagtatcttgcaactgggcgaaccccggcccggcccataaaacggcggctaataccgccaacattggtttggttttgtgcatttacgcccccccttttttacagtttactacttttgcattacaattcaaggccttattctataactacgcgccaaaatgcatttttttgctacaataaccgcatataaggaggaattttatgaaaatacgcggctttttaatggctttgtttttggccccggccctagcggcagggccccttcaagtagacgatttaacgcccgaagaattaatcggccaaaccctggtggtacgcatagatgccggccaacaggccccttatgaacaagccgtaaaaagcggccttatcggcacggtgctgattaaaggcgggctgaccgggcaggaagacccggccgccaaacgcacccaaactttgcaaactatccgccaactgcgccaatgggaaaaagactcccgccaccaaatcccccttttaattgcgtttgattatgagtccggctccgtcatttcccccttatttttaggtatgaagcgcctgccgtccaatatgcttttgggcgcggggcaaagcaaaaaaacagtgcgggccgtttacggggcggcggcggacgaaatacgcgccctgggcgggcaaatcaactttgcgccggatttggacgtaaacaccaaccccaataaccccattatcggcacgcgctcttttggggcgtggccgcaaggcgtggcgcaaaatgcgcaagcggccgtaaagggcttgcaggcccggcaggtggccgcatttgccaaacacttccccggccatggggatacggcggtggactcccacaccggctccccggtgacggatttgccgcttaaagaattaatggaacagcatatcgcgccgttccgcgccgccatagatgcgggcatttggggcattatgtcctcccatgttatttatccggccttggataaagaacacccggccaccttttcccgccgcattttaacagaccttttacgcggggagctaggctttgagggcgtaatagccaccgacagtttggatatggaaggcgccaaacgcgccaacggcaccccgcaagccgtactggaagcctaccaagccggggcggatatgccgcttatcggcaaagatttaccgtacgatacgattgcttacatacaagcccaatacggcaaaacgctcaccccgcaacgcctgaaacaaagcgcccggcgggtgtgggagcttaaacaaaaaacaggtttatttacgccgcaagccaaacccaaaaagcaaacggattttgaaaaatccgccctgcaagcggcgcggcgcggggtcacgctggtaaaaggcaaaccgtttgccaaacgcccgcaaagcgtatgtgcggtattttttacggagccggcgttggaatatatgttgcctgagtttacccaaacgctggaagaaacccgcgtaaaaacccaaagcgtatttgtgccgatgtccccggagccggaagaactctccgccgcccgggcgtgcgccaaagaacagcaaacattggttatcggctcgtaccaaaaatacggcacgccggacgccgcccaacagcaaattattaatacgctactgaaagaaaacccgggcgcggtatttatatcccttttaagtccgtatgatttggctttttatccgcaggcccaaacggccctggcgctttacggccccaccccgcaaaccctgcgcacggcggcggaaattctgctgggcaagcgtaaagccaaagggaatatttcccctgcgttgcgccattaacaccttttcataaacgcccctttaccggggcgtttgtttgttttccccacaaattgataaactaacagtatgcgtaaattattcccctttttgatgtttgtttttttggcggccgcgtgtgcggtgccgtctgcccggcaaacgggccccgctccgctgacggatgccatccaacaacaagcggtaaaacccgccgccgccccccgcaaaacgccggcggctcccccagcgaccgcccgcaaaccgcaacccccggttttgaaaaacccctctgttttagacgagccggacacccgctacaaagccatgcccctgccgcaagaaatgcgcggcgtgtggatagccagcgtggaaaatatggattggccctccaaacccggcctgccgcctgcggcccaacaaaaagaatttaccgatttgctggatttactcaaacagttaaattttaataccgttattgtgcaagtgcgcccggcggcggacacgttttggccctcccaccaggagccctggagctactatttaaccgggcggcaaggggtatccccccattatgacccgctggcctttatgataaaagaggcccacaaacgcgggcttgcctttcacgcctggtttaatccgttccgcgtgcaaaatgtttccaaagccgccctgtcggaaaaccaccccattaaaaagcacccggattggctggtttcttacggcgggcgcaaatactataacccggccgttgccgcggcgcgccgccacagcataaacgtcattgccgaagtagccgaaaaatacgacgtggacggcatccatttagacgattatttttatccctaccccgttaaaaagaacggcaaaaccgtgccgtggccggatgcggagctttataaaaagtacggcaacggacagccgttagccgcatggaggcgcagtaatgtcaatacgttcgtgcgtgatttacaccaacgcctcaaagccaccaagccggaactgccgctggggattagcccgttcggcgtgtggcgcaaccaatccaaagacccgacaggctcccccacgcgggcgttttccgcctatgacgacggcttatatgccgattcccgcctatggattgaacaaggctggattgattatgtggtgccccaactgtattggcactttgggcaccgcgtggccccgtacggcgtactgctcaaatggtggaataaagaaatggaacgcaacccgcaggtgaagctctatatcggcctggggacttataagcacggcaacgaatggaaagacccggccgaattagacaagcagatgacggagcttaaaaaatacaaaaatgtagccggggccgtacactttagcgccatacgcattaaaaacaaccaggggcaagtgcaaaaaacgctcaaaaaacattataagtagaaagcggggcgccgcgcggagcggtttttgggtgcggctattcttattccccgctaaaatgctaaaattaatatatggctaaacttgtacggggcttccgcgatatatttgaaccccaatctaaaaattttactgaacttgaaaactgcgcccgcggcgtgttttccctttatgggtttggcgaactgcgcctgcccaccgtggaattgaaagaattgtttgtcaaatccaccggcgaaacgacggatattgtgcaaaaagaaatgtacgcctttgaagatgccggccaccgccaactggccatccgcccggagggaacccccggcgtggtgcgtgcgtatttggaaaataacttcacccaaaatgcgccggtgcaaaaattttattatgtgggcaatatgttccgcgcggaacgcccgcaagccggccgctaccgcgaatttgaacaaatcggtgcggaatatatcggcaactcggcccccgcggcagatgccgaagtaattttaatgctcaaggatattgtttccaaattcggcgctaaaaattactgcgttaaaatcaacagtttagggtgcgataaatgccgcccgctctaccgccaagccttgattgactttttatctaaagaaaaagacaccctgtgcgaaaactgccaaacccgcttggaaaaaaatcccttgcgcgtgttggattgcaaaatagacggcgcccgctttgcagg

SEQ ID NO: 1633 - DNA, 4935 bp, synthetic construct
  misc_feature 1..4935: note = Synthetic
  source 1..4935: mol_type = other DNA
tcggggtttaggtctgatttttatccattctggttttagagtggtatttagaggccgcaaaaaaactccagacctttggctggagttattaataaaggatgttcaagaacagagccttgcgattgcacttattacagtagcttactgataggtttattgtataatacaaatatatcaattgtcaatttgcattagaaaaaggaggctatatgaataagattttagggttagatttagggattgcatctttaggctattgcgtaattaatatagatgatgaaaattttgcggcaggggatatcctagcgacaggcgtacgtatctttgatgtggcagaaaacccaaaagacggcaactctttggctgccccccggagagaagcccgttctctacggcgtattttgcgtcgtaaagtgatgcgtattcaagccatcaaacaattgtttttagattttcatttgcttaccccacaagagctgaattgtctctcccagcaagattttaaacgattataccgtgcagaccaacttgtaaacgggcatatccccagcgtgtgggaaatccgtgcgcgcggactggatgagcgccgtccaatgcaagatatttgcagagcgcttttgcatattgccaagcgacggggattccgttctatgcgtaagaacgaaaaaccttctggagaggctggaaagttattaaaaggagtggaggaaatgtcaaagacgcttcaagcgtcccatttccgcaccattggagaaatgctctaccacctccctaccacggaacccaagcgcaataaagacggcagctataaccattccattgccagggtactccttgaaaaagaagtgcatctccttttgcaaacccagcgagacaagggagctgcattgctctctaaggaatttgaaaataaattctgtgaactggcttttagtcaacatccgttgcaacccagtgatgcgggctattgcaccttagaaccaaacgaaaagcgggctcccaagcaggcctatacggcagaactctttgccgctctgtgcaaaatcaaccatatttatttagaagaaaacagccatagctatcccttaagtgccagccaacgcgcactagccttggaaaaatgcctttccacgcaaaaaacgaattacaaacagctgcgggaactttttaacttgccggatcatattaaatttaacattagctataccgccccggccaagaaaaaaagtaaacagacggaaacaaaatcaccggaacaaatcgcccaagaggccaaagaatatgatgccgaaaaaaacactacgctttacaatatgacaggttttcatgcgctcaaaaaagcgcttaattccatgcccctgtggacggaatacaaaaataatccaaacggaattttggataaaatagcagagatcttatcccgctataaaagcgacggggaaatcaaccaacatttaactgtgttgggccttgaggccgaagcggtggaaaaactccaaaatgttaattttagcggatttatgaatttatcattagcggctatgaataaaataattcctttcttaaaagaggggctcctctatcatgacgcttgccataaagcagggtataacttccaagccaccccgcaaaacaagggattatcaaaattgccgcccttaacggaagaggacggccatactataaccagccccgtggctaagcggagtctggcccaagcacgcaaagtcatcaacgcactcaataaaaaatacggcccctttgatgccgtgcatatagaagttgcccgagaaataggtaaaagttttgaaaaacgcaaagaaatagaagcgaatcaaaaagcccatgccgaagaacgcacgcgattaaaagaggtgggaatagacggtattattccgaaaacagaaactgatttaaaaaaattgcgtttatggaaagaacaggaaggtttctccatgtacagccacacctacatagacccaaaaaaaattttagaagaaggattctgtgaggtggaccatattattccatacagcaagtcttttgataattccttaaacaaccaagtgctatgcttggcctcagaaaatcaagagaaaaagaattgtataccctacgaatattttcagaaccgaaagacccaaattacttgggaagagtttgagggctatgtaaattgtcttaaaaatatgcgcatggccaaaaaacaccgcctcttaaagcaagaactaacgaaagaagacttacaaggctttaaggaacgcaacttaaacgataccaagctcattagccggtttatgaaaaattatttgtctgctaatctcaaattaaccggtaaatacaaacaaggtgttttttgtataaacggtcagcataccaacactttacgcggtttttggcgtttaactaaaatacgcgaagcaggagacaaacaccacgccttggatgccattgtgattgcctgctgcactaaccaactaatgaactatatttccacaaaatattgtcagggcagagaaatggagctcaagcgcaaagaagtagccgtcccatggccgtggcctcacttcaaacggacggttgaaaacgcccttttaggtatttttgtgtcccgcccccctcgtaagaaggtaaccggtcccttacataaagataccttctattctgccaagcatatagcaaaaggcataaaaaccttgcgtacagatatccaaaagcttacgatagaagccatcaaaaagcaacgggaattggaagttaaatattttggagtggaacgaaataaaccgctttatgacctcattgaaaaggcgctcagagctcggccaaatgacaaaacccccattgaggtacagctgccgaccaaaaacggtgggggtgtccccgttcgccacattaaactaattaccgagagcaccacaggtgttccggtgctgggcggaacggcccgggcagaaaacggtcccatgccccgcgtggatgtatttttggaaaacggtaaatactatttagtacccatctacaccatgaattttgccaaagggcaacttccgctgatagcacagccgtccgaccgtcttatgaaaaaagaaaattttgtattttctttatacaaagacgattatgtaaatgtagtcaacgaacaaggcgaatgctgggagggttattttaaacaatacacggcccaaacaggccaaatattcatagaaagccacgacagatcagcccaatataccgtgaacaagcaaccggctagccaaaagaaaattaattgcaatacttttaaactatttgaaaaataccaaatagatattttgggtggaaaacacttagtaaaaaaagaaaaataccttggtaatctccgcaaaaacaaaggtttcggaggataatatgggatggcaagtattacatcttagtcaacaggcgcatttatccctcaaacagggtcagtgtgcggtggaatttgccgcaggagatactatttccattcccttggacaacttgtctgtggtaattttggaatcccttcaaattaccttatcctctgcgctattacaaaagttggcaagtaacggaataggcgtgtttgtttgcaacgaaacccatactcccacaggggtgctattgccgtttatgcagcactttagcgtggcaaaaatggcatttcaacaaatctcttggtctctcccttttcgtaaccgggtgtggcaacaaattgtaaaaaataaaatcaggggacaaagcgcagttttacgtaagataggctttgcagaacaagcggaaaaattaaaattattatctacgtatgtacaaagtgcagacagtacaaaccgagaaggtcaagcagctgccctatattggcgggctctttatggccctgattttacgcgggatgctccgtcctctcttaacgcggcgctaaattacggctatgctattttgcggggtatcatagccagagatattgccgcaataggctttatcccttgttttgggctacaccataacaatcaattaaatgcctttaatttagccgatgatctaattgaacctttccgtccattggtagataatttagtttatcagctacaccaaagcaactgcttgccagaagaattgaccccggacgtcaaagcggaattgttaagcattcttacgtgggatttatcgtataatcatcaacaaaaaaatttgttaaccatcacattagacgtttgccgcagtttagcaacagcggtagaagcaaaagatcccaagcggtttctcccttttacttatggctgagtacaaaagatatatgagattatttgtactgtttgatctgcccacaaacacccgaaaagagcgcaaatacgctgcccgctttaggaaggacttggtaaacgatggctttactatgctgcaatactccgtctactgccggatttgtaaaggccaagaaagcgtagacttgcacacccaatttgtggcacaaatcgtcccgccgaaaggcagtgtgcgtttattgtccattaccgacatgcaatacgcccgcatgcgaatattggtcggcaagaaaaaactgcaagaaaatcttcatcaacaactacttttattttaatttttgtttagaatctgtgctaaaaacgcctattttttcggggaatttagcatatagattctattaaatctgtatcagtaaggctactgtaactccagacacggttacagcgtcgccagaggaattctattaaatctgtatcagtaaggctactgtaactcagcggacgatcccccgtctaaacccaagattctattaaatctgtatcagtaaggctactgtaacctaaatcaaaaatacaaagaggagtagtaattctattaaatctgtatcagtaaggctactgtaacttataccattaataacacacgttccagcctattctattaaatctg

SEQ ID NO: 1634 - DNA, 23699 bp, synthetic construct
  misc_feature 1..23699: note = Synthetic
  source 1..23699: mol_type = other DNA
taggcaatatgcctgcatccggtcttgatgagatattccacggccgagaatgctcccatgtagtcgtccaccaccacgcggcacgtgttcatgcccgtgcagatgcggtcgaagaacaccagcggcacgttcttgtttatcaggtcggtaaagtggtcgtactttgatgtgttgatagcctgcgacacaagtatgccgcacaccttgttttcatagaacgagcggcacacttccacctctctgtcatactgctcaaggctctgcgccacaagtatgcggtagccgtatttgtcggcctcctcttcgataccgctcaaaactgacgagaaatagaagtgggtgaactgcggtacaatcactccaatgacttttattacccgtctgttgcgcagcgactcggcgattatgttggggctgaagttgtgttcctcggcatatcgtcttatctcgtcgcgcctttttgcgctgattctcgggctgtctttcagcgccctcgaaaccgttgccacagaaaccttaagttctctggcaatgtctttcatcgttatgggtgtgttcttttctggcatcggattttattttacaaagcaaaagtagtcaaaacacaattatcttgtctttcacattattattattatatcgttttatttgtgtaaacgtttgcacagagcaaaacgtattttttagctaaaaaaaagataattttatcatatctaaacgtatttttgcagctagaaaaaatgaccttaaagctctattttttgaactactgcaaatataaacaatttaattaataaatcattaatgttaactttaaaaccacaagaagatgaagcaggtaaaaatgaaaacctctattaggattctggccatcttgtttggtctgttcctatcagtgggagcatttgcccaaagtactattaccgggcaagttacagatgcttccggagagccgatcatcggagctactgtccgtgttgcaggtcagggcggcggtgtgataactgatattgacggaaacttcagtatcaaggctgagccgggcagcatgctgtcggtttcatacatcggatacaagacggtggagacggcagcatcgcagaatatgaagatagcccttcaggacgactcgcagttgcttgaggacgttgtcgttatcggttacggaactgtcaagaagggcgacctcaccggttctgtttctgctatgaagcctgatgatatgagtaaaggtatcaccaacaacgctgccgacatgcttgtcggtaaggttgccggtgtggatgttatcaccagcggcggtgcccctggttcaggatctcagatccgcatccgtggtggttcgtctcttaatgcaagcaacgacccgctgctcgttatcgacggtcttaccatcgacaacaacaccgctacaggtatgagcaacgtgctggctatgatcaaccctaacgatatcgagactttcaacatccttaaggatgcttcagctacagccatctatggttcgcgcgcgtctaacggtgtcatcatcatcaccacaaagaaaggaaagaagggctctggtcctaaattctcttacaacggcgacgtaaccgtttcaacaactcagaaacgctatgaagtgctcaacggcgacgaatatcgcgcactcgtaggcaaggttatcggcgagagcggcgttgccatgctcggcaatgcaaacaccgactggcaggacgagatattccgcactgcagtgagcacatctcacaacttgtcaatgaccggcggactcaagaacatgccttaccgcgtgtctatcggctatcagagcgaccagggtatcattaagaactctttcatgaaccgtttcaacgcttctgttaaccttgcgccgtcattccttgacgatcaccttaacttcaacatcactgccaagtacatggccgagaaagaccgctatgttgacagcggcgctgccatcggcggtgcgctttcaatggacccgacacgccctgtaatggacgacagcgagccttacaagtggctgggcggctactggcagaacatcgtttcggcaaacttcagcgatccttcttgggcttacaccaagaatcctaacgctcctcagaaccctgtagcatatcttgagcagaacgagtgctatgctcactctaacgacttcacggcaaacgttgaggttgactacaagattcacggatttgaggacctgcgcctgcatgcaagctatggtggacaatatactgcaagccgtcagagcgacataaactctccttacggttacagcaacaactattatggctgggacggccgtacttactattggaaatacagcatcacggctaatgcctatgcacagtatacacacaccttcggcgctcactacatcgacgtgatggccggtgccgaggagtcacactatcaccgcagcggatacaacatcggacagggtacagacccgtatacaggcgaggccaacaacccggctctgagaaatgagacagagtgggccacacacaactctcttgtgtcttacttcggacgtctcaactatacattgctcgaccgctatatgctcacagccacaatccgtgccgacggttcttcacgttttgccgacggacacaagtggggctacttcccctctgtagctcttgcatggaagatcaatgacgagaagttcatgaagaacatcaagtggtggaacgagttcaaactccgtctcggatggggtcagacaggtcagcaggacatcggttacgacttcctctacactccgctctacgtaaacagcaactcttatgctcagtatcctttcggcgacacatactattacacaatgcgtccgaacaaatacaaccccgacctgacatgggagacaacaacaacatggaacgcaggtcttgacttcgcattcctgaacaaccgcatcactgcaaacatcgatgcttactatcgtgagacaacagaccttatccaggaggttgctcttcctacacttatgaacttcggtcagcgtatggcacagaacatcggttcacttgagaactacggtgttgaattcacagtaggagccaagcctatcgttaccaaggactttgtatgggacgttcagtataacgttgcatggaaccacaacgagattacagagcttatcggcggtgacgaagactattatgttgagtctggttcaaccatctcacgcggtaacagcactcacgttcaggcacacacagtaggtcagccggccaactcattctgggtttaccagcaggtttacgacgagaacggcaaaccgctcgaaggcgtatatgttgaccgcgacggcaacggcatcatcaacaacgacgaccgttacttctacaagagcccggcagctgacgtgttcatgggtcttacaatgaagttcacatacaagaactgggacctgagcacagcattccgcgcatctctcggcaactatgtttactatgacttcctgtctaacagggcagccgtaagcgcatcaggactctactctaacagcgcattcacaaacactacacaggcagccgttgacctcggcttcagcggaacaaacggtactgagtattatctcagcgactatttcgtacgcaacgcatcatacctgaagtgtaccaacatcacgcttggctattcgttcccggctctgctcaagtatgcaggacaggattacttctcaggacgtattttcgcaactgtgcagaatccgttcatcattacaaaatataagggactcgaccctgaagttgcaggcggtatcgacagaaatccttacccacgtccattcagcgttcagatcggtcttaaccttaatttctaatggttgtgcatttatataaaagtaataaataaaggacataacaatgaaaaagatattttttagaacattggcagtcgctgtgcttgcagccggattgaccggttgtgccaacgaccttaacataagctcaatcgacccgcagaccaagccgtctgctgatcctacggctttgctggctaaatgctatgccactctcggacttaccggtcagaaaggtgtagccggcaatggcgacttgagcgacgacgagggtgagtcgggtttctaccgtacaacgttcaactgcatggagcttccttctgacgagtgtgtatgggcttggcagacagatactgacattccgcagcttaccaacattgcatggaactcaagcagtatccgtactcagtgggtttacacacgccttacctacgacatcactctgttcaacagctacctgagccaggtgcccgacgacgaggccaacaagctcaaccgtgccgaggtacgcttcctgcgtgctctccactattggtacatgctcgacctgttcggcaagtcacctttcaagctcgacttcaacatcagcgaccttcctgttgagaagagcggcaaggacctttacacatggatcgaccaggagctgacagagattgaaccgcagatggccgaggttggtgcttactgcaactctgagaactttggccgtgccgaccgcggtgctgcctatatgctgcatgcacgtctggccctcaactctgagatctacaccaagggcgagattaaggattatgacaaggctatcagctattgcgacctgcttattggcagcggagcctacgaactttcaaagacagccaagaacggctattctggatatgcacagctgttcatggccgacaacgacgagaacccgcaggctatgaaggagattatcctgcctatccgtcaggacggacagaagacacgtagctacagcggctcattcatgctcgtcagcgcgacacgtattgccggaatgcccgacatgggaacaactaacggctggagctgtatcttcgcacgtgcagcaatggtaaagaagttcttccccacactgtctgactgcccgatttctacagagccggctcctgccggagctacagaggccgaaatcaaggctctcgaccagcaggacggttcgtcaacagctcagattgtggctaaggcaggcgacgaccgcgctttgttctacggtggccgtggcggtggtgtacgcaagctgcagacagatgctatatcaagcttcaacgacggactttctatcgttaagtggaacaacttccgtacagacggtcagcccacacacgacaccgaatatcccgacatagacattccgctgttccgttatgcagaggtttatcttacacgtgcagaggcttattatcgcaaaggccagcccgagaaggctgtttctgacatcaacgagctgcgcaagcgtgccaacgcaaagcagataagctctatcacatctgacatggacatcctcgacgagtggtgccgcgagttctatctcgaaggccgtcgccgcagcgacctcgtacgttttggctgcttcacgacaggcaaatatctatgggactggaagggcggagccgctaacggaacaaccgttgactctcactataatgtttatcctataccggcaaccgacgtgctcaacaacagcaaccttacacagaaccccggttattgataacatggcaatcagtttgcaataaagttttaaaatgaaaatgattatgaaaaatataataaagaaactgttcgttccggcactggtgttgggcgtgctgcctttcatggcttcatgtgagaccgacgacgagagcaaccctatattaaatcagcccgaatcgtttgtgcttaacgtgccggctcatgccaacgacaatgtatacgacttggctaactctacatatgtcaaccttacgacatcgcagcccgactatggcttccctgttgtaaccacctatcaggtgcaggtttctatcgacccagacttcgcttctggcgatgcagccaaggtggaggctgccacttacacaactcttgagaccacatacaatcaggccaacatgaacgtaaatgctaccgaaatgaacaatgccattgtaagaatgtatcaggagaagaacaacggcgccgacccatccggcatagttatgcctgtttacgtgcgtctgcgtgcccacatcgccaacagcgacaagggctggtgcaactctaacgtaatcactctgccaaaggttgttgtatcttatgttgcaacaatgcctaagactgtatatatcgcaggttcttctatccgcaacggttctgaggctaagcctcttgctgctgtctacggattcgagggccagttctacggcatggcttatcttgctgcaggctcaacattcatgtggggcgacacagacacaccggacaagggctatgcattgaccaactcgtttgacgaccaggccggcgcaggcttgtctcagggtgttgacggcggcatacaggtggccaacggcggatggtatgttctgtttatgaacgtttcggttgagaacaaccagattaagtctgccctcactgtttatccgggcgaggcttacgtcatcggtactgttatgtctcagggggacaattggggacaattcccggaaactcagcttacagctcctgccgatgcttctgctcagtgggtatctcctgccttccttgccggcggcgagctccgcgcaagcatcaaggtgccgggtctcgactggtggcgcacagagttcactctctataagggcgacctctactggcgcgactgcgacattcctgacaactgggctcagaacgtgggcagcgactattctgttacctgcgagaagggtcagaaactctatgtagacttcgactacgacagaggagaagtaaaataaccaataatctaaaccatttaacagaaatatcattatgaaaaagatattatttttgggcggtctgttgctttcagccatgacgttcgtttcatgtaacggcgattatgacgactgggccgacccgcagagcaatccgcaggaagaagcagttacgttgccgggctatacggcaacggctgccgaccctatcgacctggctaaccccggcacaagcgtcaaggcgtttacgctttcggctgcaaccctgccagagggtgccacgatagagcatacacgtgtagaactgttgccggctgacggctcttctgcaacaaagaaaacgctcgaggcaaccgccgacggcatgctcgacagcactgcgcttcaggacgcagtggttgagttctacggacgtcgtccggcagcccgcgtgttcgatgctcaggtttattctgatatcgtcatcggcggccagtcgttcctggttgatgccggcaagattcagatttcagttacgcctaaggctccttacattgccgacgcttattatcttgttggcgatatgtgcggatgggctgccgatgcagctatcaagttctcacattcaggtgccgatgtatatgaggatcctgtgttctctgtagtgttcacaacacctaaggccgactgctactggaagatagttccgcagggcaacatcgactctggcgacttgtggcatgagggaacagacggtgttgtgggtgttgccgttgacggcgacccgagtctcacaggctcactcgtaaccacagctcctaaggctggtaagatagagaagcagggcttctataagctcaccgtcaacatgatggactatacttacaccatcgaagagatggccggtgagtattacatggtgggcgacctgcagggatggaacaacgacccggctacaggcatgacatgtctgttctatccgcagacaagcaccgtgatgagctacactacaaaatggaagggtgcttacgacctgaagttctgggcaggtgccgacttcggtaactgggacaaggcttacggatgtgcagttgacggcgacaactctccgtcgggcgacatcgtaaactccggcgcacagtctatctctgctccttctgccgagtattacaccttcaccatcgacatgacaaccatgaagtatacatggactaagctcagcgaccaggctccgaaggagtacacctcaatctcgctcatcggcgacttcaacagctggagcggcgacgtagacctcactcaggttactcctcacaactggtatgccaaggtcagcatcccgtctgacggcggactcaagttccgtgcaggacacgactgggctgacagctggggcaacggtgccaacattgccgacaactattatggcaaagccgactataacggcggcaacatgacagttccagctggtacctacagcgtctacttcaacgacattaccactgaatttgtattcttagcagaataatatcagattttgtgttatgcgccatgcaccattgtttaaatacaaagtgcgtggcgcatttgattttttgcggcacatttttcatggccgcatcactctctcgccggcgtcagtatctttaaagacccatgctgcggccggcgtctttcgcctcaggtcagcgctcaaggcggtgcatcgaggttacagccaacaagagtttttcaactaaaaagccttaatctatgaagctaaatctaatttgttcatgtcttgccgctatgtgtgcggcgttcgttgtttcgtcatgcagcagcgacgacgaaggaacgacaacggtaaacgtccgtaatgtctacactactggatgtaagactgaaggacagccctcacaggccggctccgcaacaacacgcagtccgtttgatacagagtatgtagagtataagagcaagagcgacggttatgtctacatcaaccatgctaacgtgtcttacaactgctgttcggagaaaatagacgttacgctgaccgttacaggcaaccgcataagcgttgttgaaaaggagaccgacacaagctgcaactgcatctgtcccttcgacgtctcttacgaggttggaccgttgaaggccggcaagtatattctcgtgataaacagccacaacacgctccacgaaatcaacttcacgtatccgtcagacggcagggttgaactttagaatcttcttatttaaagatttaaaacaaatatcttgtggattctgtcattgttatgaatccacaaggtatttttttgttgtatattctatacatgtgtaagtgaaaaacgaaaagtgaagagtgaaaaatccaaatgctttgtggtgatgcaaaattttgtagggaattgtcgtagagaatcagcaaggctattgttctgtcggatatgacaaattatgtgaagaacgaagagtgaataattcatatgcattgtggtgatacaaaattttgtagggaattgtcgtagagaaacagcaaagctaatgttctggcggatatgctatccgacagcaaaaaatatcaggatctttgatccgagactcatacctatttaatcaaaaaataagaagcaagcggattaaaaaaatccttatattcagttccggcagattacaaatcagccggcacaatagtcttgttggtatatgtccggcgtcactggaaaatctcttaaattgaaatgctttatggtgatggaaaattctatttttgttttgaagcaacaagactattgttctgtcggatatgctatccgacagcataaagtatcaggatctttgatccgagactcatacctattaataaaaaaataggaagcaagcggattaaaaaaatctttatactcagttccggcagattaattttattgattgtcggctgcgctcggcataactaaatgagatttgcttctgctctcgcttgcacgacaattacaaatcagccggaacaatagtcttgttgctgcatgtccggcggtacgggaggtctaattttactaagcgtagtgaaccgacaaatatatttgtattaattagaatcggaagaattttataaaaagcccctccgaagaggggctataggattaatatccttcggcatatagccttattgtgataagatgtagatttattttgttacaaatgtatatatataatttgtattttccaaatgaaatgcatatttttacaaaaaattaaataagacagaaatatgactaaaacaagaattttaggattagatacaggtactaatagtttaggttgggctattgtcgacagggatgaagtgagcggacaatatgaattggtcgaccgtggtgatctgatttttacagaaggagtaaaaattgaaaagggtatagaatcgtctaaagcatcagaaaggacccagcatagagctttgcgcaaacaatatttccgtcgtcgtctgcgtaagatagaagtgttacgtgtgctgactttttatcatctgtgtccacccgtaagtgaagaagagttacatttgtggcatgtcaagaagatatatcctgtagaaaatcaggaattcatgatttggcagcgtactaatgacaatgaaggtaaaaatccttattattatcggcatatttgccttcatactaagctcaatcttactttaatgaaagatcgttatatcttggggcgtgcgctttatcatttatcacagcgtcgtggctttttaagcaatcggttggatcaaagtcaggatgaggatgacaagggaactgtaaagactggcatatcttcattaagcagagatatgaacgatgccggatgtacttatttaggcgactatttttacaaactatatagtgaaaatggtaatagagtgaggattcgtaatcattatacagcccgcaatgagcattatctcgcagaatttgaagctatctgtcaggtgcagaaacttgaacctgaattggtggaagcacttcgtcgcgccatattctttcaacggccattaaaatcgcaacgtaaaggagttggaaaatgtacctttgaacctcgtaagcctcggtgtgccgactcacatcctgattatgaggaatttcgtaaactatgctttgtcaataacattaaaatccaaacgcctgacgacgatactatgcggccgcttaataaagaggaacggcaacgtataaattctcttttttatcgggtttcaaaagctaatttttattttgaagaaattgcaaagcttttaggaggaaaaaacaattattgttatttcaaagatgaagtccaaaaagatttcaagtttaattatcgtatgtctcaaagcgtatcgggttgccctactacagctcagttgcataatatttttgatgaggactggaagacaggcatcgccgaaacttatcagcatagtgccaaaaaggatggaagtttgaagactgttgacgaaatggcagatgatatttggaatgtattatattcattctcgtctaaagactgcctttataattttgccgtcaataagttacagcttgaggaagataaggcaaagaaattttctaaaatcaagctttctcgtggttttgcctctatcagtcttaatgccattcataagatactgcccttcttacgtatgggcatgatttattctcatgctgttctgtttgctaatattccgactattgtaggtatggatgtatggagcgacgaatctaagcgtcagcatattatgacagaactgagcgatctcgtcttgaactatgatcctaaaaatagagaagtggagggcacaattgaaatgtgtatcaaggattttcttctgaataattatgaccttcctgcaggagctgtctgtcgcctttatcatccctcgatgatagatacctatccggatgctaaggaaaataaagatggtgtgctgcagttaggctcgccggccactaacgcaattcgtaatcctatggccatgcgctcacttcatgaattgcgtcatgtggtaaacctcttgctccgcaaaggcaagattgatcagaatacagaggtgcatgtggaatatgcccgcgagcttaatgatgccaataaacgaaaggccattgcagataggcaacgcgagatggataaacttcataaaaagtatcacgacgatataattacactatataaagaagagacaggtaaagacatcaaccctacccaggccgacatactgaaatttcagctgtgggaagaacaggaacatgtttgtctctatactggccatcagataggaatttctaaatttcttggacctgaccctgagtttgacatagaacatactgtgcctcgtagtgtaggaggagacagtacacagatgaacatgacgctgtgtgacagacgtttcaatcgtgatgtaaagaaggccatgctcccttcgcagcttccaaactaccaggaaatactgccacgtatcgaaaaatggaaaaagaaatatgagaagcttacaaaggacatcgaccattgcatcactcattcagggatgtctaaggaggcaaaagattcaatcattcaaaagcgtcatagactgacacttgagcgtgactattggcgtaacaaatacttgcgtttcacgatgactgaagtacccgaaggcttctcgcgtcgtcagggagccggtatagggcttgtatctaaatatgccggtctgtttctgaaatcgctttttcatgatcctgcagaccgtcgtcggtcacatgtatatgtcgttaaaggcacaactactgccgagttccgcaaaatgtggggattgcaaagtgaatatgaaaaaaagtcacgcgacaaccatgttcaccattgcgtggatgccattactatagcatgtatcggtaagaacgaatacaacaaaatggcaagtttttatcatgatgaggaggcttttgagcgtggtgaatgtgataagcctcattttgacaagccttggccgacatttacgcaagatgtattagggcttgagaaaagcctgatggttgtacattccactcaagacaatatgccaaagcatgcaaagaaatatgtaaggacgccacgtggtaaatttatagccaaaggagattgtgcgcgtggcagtttacatcttgacacttattatggagccattaaacataaagatgacactgaaccgaggtatgtattaagacgtgaactttcaagttttgattctgtgagcgaccttgacataattgttgatgatgccgtacgcgaaaaaataagggaggctgtgaaaggtaagagcggaaaggcctttaaggaagcattggctaatgtttatatgaataaggagaaaggtatccgtattaaaaaggtaagatgctatgtgccttctgttaagcgtccgattgatatccgtcatcagcgtgatatctcgcggttcgattacaagcgccagttccatgtcgctaacgatggcaattatatgatggcaatctatgaaggcgtggtgaagggcaagcagaagcgtgatttcgaacttgtaaagaacattgaagcagccagctatttcaaagtaagccaagacaaagagtcgttctcgtctattgttccggaaaagagcagcaacggattccccttgaaagcggcgcttaagattggcactcatgtgctattgtatgaaaatacagcttccgaaatagatttctctgatcctgtagatcttacaagaagactttataaagtcgtagggctttcatcaaaaacagtaagtggatataattacggagacattacgttaagattccatcaagaggcacgccaggctaaggagattacctctacaagaggattattcaaaaatacagaccaatatcgtggtgaaatacatcttctacacacacaactaaatgcccttgtagaaggctatgattttgatatgaacattcttggtgagataacatctaaacaataagaatatgttgaaacgtacactggtgtttatgcatccggcagctttatccatgaaagatgctcagctggtgatcaaacggcgtgaggaacttgatggtattacgacggtgcctatagaagatattggggttataatcgtcgacaacccaatggtgacattaaccattccgcttctaaactctttgtcagaacaaaatgtggctgtcatcttttgtaaccaaaagggtatgcctacatcaatgcttcaaaatcttgataccaatagtacacagggcttaaccttgcgtaaccaattgtctgttccagagccgttgaaaaagagattgtggaagcagattgttgaggctaagattcgcaaccagtctgctttactaaatcattatgaccgagatggcaatatgctgaaacctttttatatgaacgtaaagagtggagatgccgataacagagaaggagctgcagctcgcatctattggacacgtcttttcggcccgcatttcgttcgcgaccgtaatcaggatggagtgaatgtcctcctcaattatggatataccatattgcggggagctgtagcccgtgccattgctggcgccggactctttcctgctataggcctgtatcatcgaggaaggagcaatgcttttccattagcagacgacatgatggagccttatcgcgcttttgttgatgacattgttttccaactcagtttgaaaggctgtgatattcttaataaggacacgaaagtggaacttcttaaggtgttaacatgtgatactcttttcggtaagattaggcgtcctctaatgataggactgtcaatgacaatgtcgtcacttgctaaatgttatgcaaaagaaactgataaattggtgttacctaaaattttctatgacagagtatcgtcttaatgcttaccatatcatgtggatcttcataatgtttgatttgcctactgtgactaaaaaggataaaaaagtagcaacacgttttcgtaaaaatttggaacgtgatggtttcatcaaacatcagttcagcgtttataccagattttgcggatcgttagagagtgctcatgttcatatcaagagaataaaaagtttcttgccggctcaaggaacagttagcattttgatggtaaccgataaacaatatagtgaaattattaattatacaggaggtgccgaggaaaaaatgcgacatatacctatacaacttgaattattttagtatctttgcattgtgataagtacatcaatcaccacttcttatacaaaatatttttaattaagtctctgaagtatagacagttatatagtataggttgtggtttgatgtagatgcaagataagaaacaacactggtggatggtggtgtgatgaccgtctcgttgtggtttgatgtagatgcaagataagaaacaacactcgttaaaatattaacacgttgcaaagggttgtggtttgatgtagatgcaagataagaaacaaccgaattggaatgttttggaaagtattggaagttgtggtttgatgtagatgcaagataagaaacaacttgaaaataatccccgaatatatttgtcggttgtggtttgatgtagatgcaagataagaaacaacgttgcaaagatacagatttctgtagttcaagttgtggtttgatgtagatgcaagataagaaacaacgggtgttgacctttatgccgagcgtgaaagttgtggtttgatgtagatgcaagataagaaacaactgaacgcagcagttttcaaaggctgtgtagttgtggtttgatgtagatgcaagataagaaacaacactgagcgactgcactataacgctgggtctgttgtggtttgatgtagatgcaagataagaaacaaccatagccgaagaagcatgcaagatactgagttgtggtttgatgtagatgcaagataagaaacaactcgacaagaaagggcaacaagtcgctaatagttgtggtttgatgtagatgcaagataagaaacaacacaacgacagattaatgctcttactcaaggttgtggtttgatgtagatgcaagataagaaacaaccaagccctggcataaaacaacaaaacaatggttgtggtttgatgtagatgcaagataagaaacaactaaacacaatcaaagagcagataaacactggttgtggtttgatgtagatgcaagataagaaacaactttttgtgttggtgccagcactattgctgagttgtggtttgatgtagatgcaagataagaaacaacgttatattaatttctttcagaatgttgcagttgtggtttgatgtagatgcaagataagaaacaaccgagggcaaattaacgcctccagaattgccatgctcgtcacggtttcgtggtttggcgtgaaaaatggctgattttgcacatttttgttaaggcgttgatttatagtgctttatacatttcgcggaactaaaacgcaatggttaaaaaatattactcggccacttttcactcaaaaccgataggtttaccgttcggatgttgcccttttgcatcacaaaaacagccgttttagttctgaaaatccatgtttttgcgtcttttttgcatgaggaaagcaaacggatgttaaaggttttgctgctgtaatgcctttcctttaacatccgttatacgttgatttcctagattgaaaaaatattttgtcctgactttttactttttcatgctaacatcctgactacggtttagcgtctttatgtttttatgtataagatacccggaatttgttttatgctgcaaaaatgaaatagctcggcatgaaaaatacttggcaggcgagtggggctgcaggagacgaggtgagtgttatggtggaggtatgttatgtcttgtaattttgttggtttaatgtcagtattagattaaaattcgtatctttgtttgcgattttgtatatgcagaaaaaattaaagcagatgaattggattattcttgttattgccggattttttgagtcgggctttgccttctgccttggcaagatgaaggaagcctccggcacggagtggtatctgtggtgcgtcggttttcttgtatgtcttgtcctgagcatggtgctgctggccaaggcggtgcagactttgcccataggcacggcttatcctgtgtggacaggcataggggccgttggcacggtgctgctgggcatcattttctttcatgagccggcatcattcctgcgtctgttttttatcaccacactgatagcctcaataattggactgaagatggtttcgcattgaacgactgatatccggcagggctttaactgaaatatggcgttatgattcagcctgtgtctttgtcttatgttgtgtataacatagtatgcggtataatggcctgctggggcttagcggttttcattttgtgcttgtcatataaatatgctttgtgccagaccatattttcaattttgtttgcgttaattcgtcagttttatgtaagtttgcagccgaaacttagaatgttatgaaaaagaaacagatattgctcataaacgatatggcaggctatggaaaggtggccacggcagccatgctccctatactgtcgtatatgggacatcccacatataatttgcccacggcacttgtgtctaacacgctcgactacggaaagttcaacatactcgagacgacggagtatatcaagggcgtgttccccgtatggcgcgagctcggcttctcgttcgatgccatagccacaggcttcatggcgtcggagactcaggcgcgcatcatagcagcctactgtcgcgaacaggcagagaacggcacggtggtgtatgtcgacccgataatgggcgacgagggcaagctgtataacggcgttaccgatgaggccataaagagcatgcgcgagatggtcagcgtggcccatcttgtgtttccaaattataccgaggcctgctatctcaccgacagccaatatgacgctgccggagtaacagccgaaggtgcccgtcgcctgctcgactcacttctgaagttaggcacaaagtcggccctgataacgagcatacgtgtagacggccagccgtcagttgttggctacaaccacgtcaacggcgagtatttcacacagccctacaccgagatacccgttcatttccccggcacaggcgacatattctcagccgtgctcataggctatctgctgggcggaaaggaactgaaaccaagcacgcgcaaggccatggacgtggtgtataagctgatagacctcaacaaggacaacactgacaagaaccgcggcatacctctggagaaatatctcgatgtgctttgaaataagtgaaaaatgaaaagtgaagagtgaaaaatcctaatgccttgtggtaacacatccggtggcacgtgaggcagacatgtatgaattatgcttttttatagatgaaaaattagtcggaaattatagatgctatcacgaaaatttgttatatttgtaaacggataatctaaattaaaagcaacatgaaaaagaatcagacatcataccgtaatacttctgtttcagaattgctcagtgcaggttctgaagaagagcgtattgttgccggactgaaacgattcggacgcagggcttataacgaaactttaaaacaaggtggagaggctactgtgcttcgtggcaacaaaatatgtcgtgttaacggacgtggcgatgtttctgtaatagaagagcttggtcagactcgttatcgggtgactcagaacacttataagctgaagtgaggaatattatgaatgttaaacggctgcgtgtttttgcagggccaaacggctctggcaaatcaacgattacgtctatagtgcgtgaggcaggtgtaagtcttggcatttatgtgaacgcagacgaaatgaagaaaattatcaatgcaacaaaaactttcgactttagccattatttaaaaacctttgatgaatctcatttcaagcaaagcttctcggaatcgtcacttttcattaaggccggaggtgacgatatgtgtaatgcatgttatgtggatggttgtattatgcatttcaggtgtgaagtgaatgattattttacttctttcttgtcggcatatctgcgtgaggctttattggataactgtgataagtttacatttgagactgtgatgtctcatccttcaaagttggagtatatccgcaaggcgcggagtaaaggcttccgtgtttatctgtattttgtggcgctcgaaaatccttctttgaaccgtgaacgtgtgcaggcacgtgtaaaattgggtggacatgatgtacctgatgataaggtagttgaacgctatgcccgtagtcttaatctcatgttgagtgcaattcggttgtcagatagtgcatatatctttgacaacagcagttcaaagcctttgttgttggcatcggtaaatgacggtgaactgacaatggctgacggggttgaatatattccgtcgtggtttaaacgttaccttattgataaattgtaatttgttggctggtttggcgtttgtcaaatggtataatgatttaatattattcattccagttctcaagacaaacgtttgcacagaagtttcgctgatatttgtggcggcgtgtaaacaagatgttcataatatctttaattttacaccgtgaaaaaacatttttataccatgagaaaattatttaccacaatcgtatcgtcacttatggctttgtcggtttcggcacagggatggccgtcgggctggcagggcgtgatgctgcaaggcttttattgggactcgttctcagacacacagtggaccaacctcgagagtcaggccgacgaactgtctgagtttttcaaactgatatggatacctcagagcggcaactgcggctcgggcaactccatgggatacaacgacctctactggtttaacaactacacgagcacgttcggcaacgagcagcagctgcgctccatgatcagcaccttcaagagcaaggggctgggcaccatagccgacgtggttatcaaccaccgctcgtcgatggcaggcacatggatgagcttccccgaggagacatacaagggcgtaacctacacgatgggggctgccgacatctgctctaacgacgacggaggcaagacggctgcgcaggctgaggttaagcctacgggacagaccgacacgggcgacgacttcgacggagcgcgcgacctcgaccataacagcgccaacgtgcaggccatggttaaggcatatctcgacttcctgctcaacgacctgggatatacgggcttccgctacgacatggtgaagggctatgcgcctgagtttacgggcatatacaacacggccgccaacccgcagtattcggtaggcgagtattgggacggcgtgtcgcagataaagagctggatagacggcaccacagccaacggcgcaaagcagtcggctgcgttcgacttcccgctgaaatatctgctgcgcgactgctgcaactcatcctcaaactggagtacgctgggcggcagctgtctggccaacgacatgtattatcgccgctatgccgtaaccttcgttgacaaccacgacacctatggccgcggcaacgacggcgaggtgaaggccaacattctggctgccaacgccttcatcctggcagcgccgggcactccgtgcgtcttcctgcctcactggaaggaatataagcaggacataaagcagatgatatatgcccgcaatatggccggcataaacaacgagagcacatttgagaccatgaaccgcaccgcctcgcagtatgccatcaaggtgaacggcactgacggcaagtcggtggttgttattatgggctcaacctcatggccttcgtcaaccgtaaaggaagctgattatcagctcgttgacaagggacagaactttgcatattatatctcgcgcaatgccggcagcgtgtgggccgatgttccgtcaggctcttacgacaatggcgtgagcgtaactctcagcgcactcacaaccgatgccggcgcacagattgtctacaccactgacggcagcgagcctacggcatctaacggcacgaaagtcagcagcggcgcaacagtgagcatcgacgccaccacaaccctcaaggctgcactgctgacaggcggcgcagtgagcggcatgataacacgccactacaccgttacggcattccagccacatgagataactgtatgcgtcaatgccgacaacgtaggctggagccgcgtaaacttctggtcgtggggcggcgacggcacacattcgcccgtgaacggctcatggcccggcgacaacgttacaactacaaagaccgtgggcggcaagacatggtattatcagacctacacgatgaactcgtcggacgattgcgtgtgcttcgtgttcagcaccgcgagcggttcgcctcagactgttgacgtgaacaacgtcagcaaagacagctacttcgagatttcttcaacctctgagggcggcaagtataaggttgacgatgttaccgacaagtatgccacaagcatcggcggtatcgtggccgacaaagccgaaggacgcacctctgcaggtgtctacaccatagacggacgcctcgtgcgccatacgtcgggatgtgctacggccgacgaggctgtaagcggactcgccaaaggcctttacatcgttaacggcaagaaggttgtggtgaagtaacggcttgacatcacagaataacattcaaggataaacctttgtcgggcgttatatttcagacaatatatacaagataataaagccatatacggtataattaccgatcggggataaacataaggggcaagatgctgacacatcttgccccttatattttattataagcctctgttactatttgcccatgtctattttccagttgccctgttcgtctttcttgagcttgatgtcgtcttctttgtcagagccgtcaccatacataatcttcatcttaacaacagcgctctcgccgctttcgtctatttgttcagacagcgcctcatacgactttattccgccttttttctcatacattttgtcggccttgccctgcatcatgcccgacagcatcttctttccggcttcagggtcttcgccctctttaaccttcatataaacgaggtcggcaaatttgtcgtagtctttgtcctgcaagcatttaacagccttttctgccacggctttaggagtgtttccgccgccaccgcacgatgtcatgataaacaaggctgccataagagccataattccaattaattttttcatggttcaagaatttttttgtttgttaataataggtttaaaatgcaataatcttttttagcgacttgttgttacagatgtcagacggcaacatgcaccttatttttttcatgcccggcagacttatgtcgtggcgctctgttccggccagcgtcagtcctgccttggcgtaggcaaactccacgagttcgcagcagtacatcttcgtggtgtcgctgtcgtcatagtcgtgatcaaagagcgtgttgcggcggtaggtctgcatggcatattctgctgccttcagcggtataatggtgtcgcccttcagtcttttcacctcgccggcgttggcgtttatcggtgagaagaatttctcgggcgtctccatcttcaccctgtccgggtctccctcaaagtcgggttcgtccggcacggcatgcacaatcatctttttgccggccgagtcgaccactatgcccacatgcgagtagcgtccgtttctgtcggccatcatcaccgcatgactgcttatgcctcctccccggcgaaacacaatgtctcccgtctttagctcgcatcctgccggaaatatggttaggtcttttttgtcgttgcaggatatcagcgttgccgtaagaagagccaggcaaatcgcagttttcatcattatctttatcactgttcacaaagataagcataatagacgtaatcacaaaatcctgacaaaattatttactcataatgacggaaatccgttatgccggatatatggcaacaatgctattgttccgacggatttatgcaagttgatgagcatagtgaaaatccgtaataaagtataaggagccaacggtcagcgaagctaattttcaatccgcttgcttcctatgtctgattaatggttttctcgttttagctttcttaaaaacgttttcattgttctcttttcgtcttttatttaaatgtcttgtaatcttttgataagataggatgcggttcggcaataaaaataaagcaagttttattttgtattgctctcacctttcattatctttgcacccatgctacgcaaactgataataattgtttttgcagtctttatgtcatcggcctgcaacgcacagcagcagtatgagcgctatcatggcgacggcatcgacgaatatctgcagtatgtaccgctggcatcaacctatgtgctcaaggcagcaggggttgacgcccagagttcgtggaagcgtctgcttgtcaattcggccacgtcgtttgtcatcaacgccggcgtaacctatgcgctgaagcataccatacattctacgcgccctgacggcaccgatgaccattcgtttccgtcgggccacacgtcgatagccttctgcggagccgccatactgcataaggagtttggcaaggtgagtccgtggataagcgtggcaggattcaccgtggccaccgttactgccgtagaccgcgtgagacgcaaccgccatcactggggcgacgtggtggcaggtgcggccattggcgtgctgtctgtcgaagccggctacaggcttggcgacctgataaccggagagaaaaagaaaaatgtagatgtagctgttatgcccaacggatttacgcttcttgtaaatctttgaaatagagcatggtgtgggcatgcagacaggtttgtgtaaacgattgcatgat

SEQ ID NO: 1635 - DNA, 23696 bp, synthetic construct
  source 1..23696: mol_type = other DNA
  misc_feature 1..23696: note = Synthetic
gcaatgctaagccttgtgtttagtagttgcaacgattggctcacagtgccagtagacggtaagtctacatcgaccgaactttacacgggttcggatggatataggtcgtcgctcaacggcatttacaagggattggcagtggatgaactgtatgggctgcaactgcaatacggcgttatcgactttttctctaaccaataccgcaacgacctgcgagaagacgagcagagcagcaccatattcattgctgctggtaagcgcgaatttaaaaatgtggccttgcaacctgtacttaacagcatgtggatgacggcctataacagaatagccgccgccaatgaccttatcgacaacgtgtcgaaagcaagcgattcgaagtttaagcaaggtgagatggaacgcaaaatgatatatggtgaggctttggccataagggcattgctgcactttgacatgctcaggctctttgctcccgcacctgttaacgacgatggacaggcttacataccttacatcaccaccttccccgaggttctaggtgcgcatgttcccgtaaaggtgtctttggacatggtgatcaaagatttggaagacgcacgcgaactagtgagactttacgacttttcacccatgggcataagtgctaatgcttcggggaaagcccgcttttataataatcttgagtatggaatggaaggctatggaaagactgaaggccttgacgagtttttcttaggtcgtggctaccgcttctcctattgggccataacgggactattggcaagggcttaccagtataaagcagcctacaatgcctcgttctacgagaaggcaaagacacttgcacaagaagtacttgatgccaagtgcacagatgataaaggcgaaaccagttatagtcctttcaaaaatgaggactttaatgggtttgcctatgcacaagaccccgaacaaatgagagatgtccgcatggttggcaacctcttattgggaatttacagggacaacgaagccgaggcgaaactttcgggaatagaggctagtttccctcgtgagaagatgtcgccggcacaatatagtttctgtgcggtagatgtagatgggcaagacatctttaagacagcaggtggagttgatgagtcgaaagatgacatacgttgtttaaggttgctcttcaaacccataaactcttacaacatctcgctttccaccaaatggtatgtcaagacaagagatgcggacgaacgcaaacgcacgctgaacatcttcccgatattgcgcacatctgagatgcgattcatcattgccgagacgctggctaggaacaacgagtttgacaaggcctacgaaatccttaatgagatgcgtagaaacagaggcttacgtaatggcgacttgcctacgcaggcatcgttggaaggcttcttgaaagacctggtgcgcgagggacaacgcgaatggattagcgaaggccaattgttctacctatacaaaaggctaaactttgcagtgaaacgggacgacggcacatttgctccctttaagaaagaagagtgtgtggtgccattgcccattgaggaattaaaataacccttaacattttgtttatgaaaagattattttattatatccctttggccatcttggccttgttggtgggctgtaaggaggatgcgctactaacattcggggacgacagatacgtctatttcgagaagttctatcgagatgcggtggctcctggtacagagaaagccgactctactatggcatcgttctttttctacaacgacgatgttaacagcatagacgccctattggaagtacatattgctgggcgagacctaacgcacgatgaaacctttaagctgcgtgtggtgccaaaagaaaccacagccaagcccgaagaatatgaaattcaggacatctataccttccgtgcacgtgcggccgcacctaatgcgaccaatagaaacgacaccatcgccatcaagatgaaacgctcggctcgattgaaagatttcccacatggattaaggctgatggtagaattggttccgcaaggcgaactgcaattgggacaaagcgaaaggactaaggccttagtggtactcactcgcgatgccatcaaacccaaatggtggaaagacgaagtggaggcaaatcttttgggcacttattcgagcaagaagtataaactctttgtgacacatatcgacaccaagttaatcttcaatgacgaattggtgaagagaaatcctgcaaaggcaatacgactagtgagagactttaaaaggtggttggccgagcatcccaaggatgctgttgaggaagatggcgtaacgccgataaccgtaaacgtatagttgcacttaaaaaacaaacatgtgttatgaaaaggattaaatatttcatgatatggctgagcgttccccttttgttgggagcttgtttcagcgacgagggaaactacgaatacgagtcgctcaaacctccaacgtggacacgtgattacatgagtagtccaatacagatttccgttagggaaggaagacccataagaatagacggaacgaagtgctttaattggggtaaactcgactcgttgcaacgcagtggggaagtgcgctacgaatggcgctactatggaaaggttttctgtacagacttgaaagccgaaatcccttacgaggaatttatgaaacgctgtgagttggaagaaatgcccatctctgattatgagcgcggcgacttcgccattatcgagaaatccacaggcgttagctttaaggtgaagacaactttttatttccatgcgcagatagacgaggccgacttccttatctattcgacgaaatcacccaacgaaccccatgtaggaaaggttaacgtaatgcgcctagactattcgcgcgaccctaagacgggcggatatgtttctgattttgtattgagcgaccgccatttctcacaagatttgcctggtacgcccaaacaattagacctttctgctgcaaagaacgtgagccttgttgggtcggcaacggccatcaccgaagaaggcgatgcgtatgtgctcaatgcggccaacttgcaaaaggtttgggacatgagttcgcaattcgatgagggaacccccgctgactttaaggttagttcgcgtaaggaccaagatggaggcggaacagactcgtacgccttttcatgggtagcaacaaaagacggacgtgtgtttactagacagtttggaaggaactacctaggaggtaaattcataacggaaccttactacctagactcgttgggatataagattacacagtttggacatacctgttgggggataacgaatatcccttgttacgatgagaagaacaagcgtgtgcttattgcaacaagtttacagaacggagcatacggctcttaccggagttatatgaccaccctctataaagatggatggaaaggtgtacccgtaatgaagatgcccgacgacacaaaagtgtactatctaacgttaatgaacggcgaccaatattgggacaacaatgcaaatagctggttccaaatatactataatacgggtggtaagtcgatggttggcacatttgcagtagacaatcgtggacgacgactaaatgaacctaactcgtacttattcccatatgaggtgaagggccatttgtttaataaggaaacagttttcctcgttgcagcaggaacgcgccttactaattcaagctcgaaggcttatatcgaccttttctccgaaggaaacgaggtgtatggaattaagcgtagtggtttgggctggcctagtcaatttgattacgagataatcaaacttccgcttaagggtataacttcgaagataacgagtatgacttacaaccgcgatgacctattaagtggctcgaattatcacgacttggtgattggctgtgagaatggcgacatcttggtttacgaggcagaagaattgttgaacccttcattcagaaagaaactaaacgtgggtggtaaggtggttgccatcaaacaacttggacttatccgtgccacagtagacatgtattaatacaacaacacggccaccccttacccaaggtggtggggtggccgcaaaacaaaaacagataaaatgcagaacatgatggttttaaagagaagtgccggcgcactgatgatgctgttggctggcgcgtttgccgtgcaggcgcaaagtgtagataaggtaagccttaacgttagcgtggccaacaagggtggcgcaccaactgttacgctcaaaaagtcgcccgaatgccaagcctattgcctggcactgttcacatcagacattgctggaattatcaaagacgaggttgttgacggatatttcaccggtcagaagaaaccccgatacaccgacaacgtcaaagataagaaactggtagactacgggttggtggttgttccagagaaagaatacaccctcatcgcccttggttacggcaaggacggcaagcccggcaaggtgtctcgcacgcagttcaccgctcctcgcaggcaaggtttcgcctcggcgcaggtgctggcacaggtaataaacatcggacccgacagcgttacggtgaagtttacgccgaacaccgacgtggctggctacgccttatgtcagtttgagggtggaaccatcgaacaaacagtgaaagagcacggccccatgatgggtttctccaacgcttacgacatgattaagcagttcagcggcaaagactacaccaccgaaaagcaacacacttggcgcgagatggtgcccgatgccaactacgaactctgcgtgttgccatgggataagaatggtgtcttccaagagataaccaaggttcccgttaccacgaaaaagcttggcggacccggcgaagccacagtcgacattaagattggcgagtttggcggcagcaagaaaggcggctactatcaagatgtagtgtactcgcccaacgaccaagcatcgttacaccgcgacatcatcatcaccgaagaggccttcaacaagcccgacatgggcaatatcggtgttatcaagatgctgcaaaccgaccatcccaaagacatttactggaaccaataccgcgtggacagggctagatggaacgccacaccgctcaccacctactacgcttgctcgatggccaagaacgtagacggcaagtggggcgagcttaaaaaggtgaagttcactacgcctgccgcaaaagaataacgcgaaatctataaaccgctcttgatggaaccttgattttagctggcatactttgctcattgctaggtggttcatggcaatcgtgtacccctagccgtgagcaaatggtgcccgcctaagtaacgtacgtcctgaatgagcggcaacagacaatcgcacagagccatctcacagcttaaaagctgattctaaaaagccaatataaggttatttctggaaccagcctttgtagataaaggcagccctattccataacagagaatattcagaacaagccttaaaccccaattaagtagcaggtaggacgaaccgccctcggcacacatctcctccatcccagcatctcgcgctatccaactatacataacctaggggcgtttcctaacactttcgcctccataaccttgcgaatgccgaacgagatgcagctgggacgggcctgccgtgctacgtttgtcgagggtaaactgatgacttaacatcgctaacaagtaaccgaattattgaaacaagtaatgagtaacctaaaaacaatcctgtctggctgggcactcttagccctgcttttccccactaacttgcgtggacaaggcgttaaccaggccccacccatccccgtggacaccgccgtaaggataggcaaactgcccaacggactgacctattacatacgccataacaactggccagagcatcgtgccgacttctatatcgcacagaaggtgggctcgatacaagaagaagagagccaacgcggactggcccacttccttgaacacatgtgttttaacggaacaaagcatttccctggcaacgaacttatccgttacttggaaacgcttggcgtgaagtttggcggcgacctcaatgcctacacctccatcgaccaaaccgtttacaacatatccaacgtgcctaccacgcgccagacggcactcgactcgtgcttgctgatactcagcgactgggcaaacgccctcaccctcgacccaactgagattgacaaagagcgtggagtgatacacgaagagtggcgcgaacgcaccggagccacatcgcgtatgctagaacgcaacctgcctaaactctattcgggaacgaagtacggcgcgcgtttccccatcggactgatgagtgtggtggacaacttcaagcccaaagagctacgcgactactacgaaaagtggtatcatccatcaaatcagggcattattgtggtgggcgacatcgacgtagcccacaccgaggccatgattaaaaagcttttcggcccattgaagaaccccgacaaccaagcgaaagtggtggatgtgcccgtacccgacaacgaagaacccatcatcgttgtggataaggatagggaacaggccaacagctcggtagaagtgtcgttcaaacacgaggcctggcccgactcgctcaagtgcaacgttgactatcttttggccaactatgccaagaacatggctctaggcatgctcaacgaccgctatgccgaggccgtacaaaactcaaccaactgtccttacttgggcgcatcggctgccgatggcaacttcatcttcgccaaaacaaagggtgcttttaccattagtgcaacgccgcgtgacatggctggtactgccgccgcattgcaagccgcacttgttgaggctcatcgcgctgccaagttcggtttcacccaaagcgagtacgaccgcgccaaggccaacttgctcagtgcattggaaaaggcatacaatggtcgcgacaagcgtggcaacgcctcgtttgccgacgattacaaaggccatttcctctcgcaagagcccatcccagccttcgaagactattacgagataatgaaacagctggtgcccaacatcccgttaaccgacatcaacgccattctgccgcagctgttgcccgagaccgaccgcaatatggttatcatcaacttcaacaacgaaaaggaaggcaacgtatatcctacgcccgaatccttgttgcaagccgtgcacgccgcacgccaaaccaaggtagaaccctacgttgatacggtgaaggaggttccattgatgaccaagttaccccgtcccggcaagattgtgaaggagaaaaagaatgccgaactgggttataccgagttgaaactggccaatggcgtgaccgttatcttgaagaaaaccgactttaagaaagaccaagtgaactttgccgcaagcgcacatggcggcaagtcgctttatggtccgaaagactacaccaacttggccgtattcaacgacattgtgtccattagtggcttaggtggattccgcagtatggaactacccaaaatacttgctggcaagattgcaagtgcaggcctttccattggcgataagtatatgggcatgtcgggtggttcgtctaagcgcgatgtcgaaacgatgttgcagctggcccacctgtatctgtcgggtggcatcaccaaagacgaacaagcgtttgccactgtgatggactcgtggcgcacggctcttaaaaaccgcgccctcaaccacgacattgccttcaacgactcgctcgtggccacggtctacggccataacccacgtcttcgccccgtgttggaagccgacctgcccgacatcaactacgaccgcatactgcaaatagcacgcgaacgcaccaacaacgccgccgcatggacgttcagtttcatcggcgacttcgacgaaccgcagctacgcaagcttatctgtcgttatctcggttcgctgcccactaaggggaaggtggttaaaggccatctcaccagttcgtttgtcaaaggaaagattgagaatgtgttccgtcgtaagatggaaacacccaaagcaatggcttgcgtaatgtggcacaccaccgatgttccttattctgtggagaatgccgtacgtatgaacatgattggccaaattctctctatggtttacatcaagactatccgcgaagacgcatcggcagcctattcggtgtcggcagaaggcggagcaaccatcgaaggcgactaccacgactactccgtactggttacttgtcccgtgaaaccggagaaaagcgacacggctatggccatcatctatcgcgaggccgagaacatgacgcgcacttgcgatgctgccatgctcgacaaggtgaaagagtatatgcttaaaaatgtggctagtgccgagaaaaccaacgcttattggagtggcgttatcaacatgtatcgtcgtcacggaatcaacatgcacacccgttatcgcgacatgattaagcaacaaacacccgaaaagctgtgtgcgctgatgaaacaaatcttgcaaagcggaaaccgcgtcaccgtggaaatgctgccgcaagagtagaaagacgtttaaaggtgaaagggtgaaaaggcttttaaaggtgaaagggtgaaaaggtgaaaagatggcttcgccctttaaaggtgaaaaggtgaaagggtgaaaaggtgaaaagatggcttcgccatttaaacagcttgcctagtaagcctagcaaacctagaatgcctagaatatctagaaagcctagaatatctagaaagcctagtgtatctagaaagcctagtgtatctagaaagcctagtgtatctagaaaacctagaataactagcaaacctagtacaactagaaatcctagccccaccagcaagctaaaccagatgcttgttagctcatcctctcattcccctttaagcacagataaacgccaagaaatcatagagtgatgataaaatgtttgtgattttaatggtttgatgaattaatggagaaacaaactggttcgaagatgaataggtttatcagagaagtcgcggagaaatagttggtcttcatgtcccattttgggcagaattctcttacgcttctttgctccattaattctttttcgggctttcctttgggcatctgtcatgcagcaaaaagaaggaatagtcaatgtctcggccatacgtaaagcacaaatgggcgttagcaaatttatccctgtgttgggtaaagggcgttgaaagcaacgattgtctatgttaagggttggcaatcgccccttcaatggtcttcctgacatagggacttttatttgggtttgctgtagttaacccccaatcgggcattatagtcaaacagaataggattaggaaagccatagatacaccgtaagcagaccaaagcgttcctttgccccagcgtaaggatatgctgatgccatgcaatgcgcatcttgctagttgctaacaacaaccttccaaaagcaattctgtttggccattaaaggttgtaaaagcaaagtattacgataatcttcctttggtgccgcgaatgcaagcggagagctaacaatttgcgtatattcagtgttccctttttgggaaaaagagagcgaatatgcttatgccccatttgtgttaagcccaaactgttcattgtctagcacccttttaatcttccatctttcccatcttttcaccctttcactttttcaccctttcacctttcccatcttttcaccttttcaccctttccgtcacctcctaaaacaaataagcccctccgaagaggggcaatagggactaagcccttcggcatatagccttattgtgataagatgtagaataaatcttatggttgcaaaattagcaataacatttggcttagccaaataattaatgtaattttacacctaaatcctaacggggtagtaaataacaagaaacaaacaacaccataactaacgattatgaatacacgaatattgggtcttgatacgggtacaaacagccttgcttgggctgtggtagatagagatgccaacggaaactacaagttggtaagacgtggcgatgtcatcttcagcgaaggcgtaaagatagaaaaaggcgtagaatcgtctaaagcggccgaaagaacaggacacaagtccttgcgcgtgcagtatgctaggcgacgtctgcgtaagattgatacgctgaaagtgcttgtaagtctcgacctatgcccttatctttccgacgagcaactgagccaatggaaagccaagaaaacatatccgctcaccgacgactttatgctttggcagcgttcgggcagtgccgaagagaacaatccttactattgtcgctatcgctgcctaacgcaaaagctcgaccttaccgaccaaagccagcgttttcttcttggtagggcattctatcacttggcgcaacgtcgtgggtttcttagcaacaggctcgacaccagtgccgattccgaggaggcgggcaaggttaaatcgggcattgcccagctttctgtagagatggaaaaggctggttgccattatctaggcgagtatttctatcagctctaccggcaacacggcaacaccgtcaggctaagaagccgatataccgatagggaagaacattataaaaaggagtttttggccatttgcgaaaaacaaggactggatgcgcaatgggttgaaaaactgcaaagtgccttgtatttccaacgcccgttaaagtcgcaacgcaagggtgtaggtaagtgtaccttcgaacctaagaaaccgcgttgtgccgaatcacaccccgattacgaagcgttcagaatgctgtgcatcctcaataacattaagataaaaacccctaaagacgtttcattacgaccgctaaacgcggaagaacgcgaaaaggtgtggccgctgtttttcagaaagtctaagcccaacttcgatttcgaggacattgcaaaggcattggcaggcaaaaacaactacgcctggtataaggatgcaggcgaaaaaccattcaggtttaactaccgcatgcaccaaggtgtgtcgggatgtcccgtaacagcacagctgatagacctcttcgggcctgattggaaggcaggcattgccgaaacatacatggcagttgaaaagaagaacggcacaaagaccatcgatgaaatggcggatgatgtatggaatgtgctttattcattctcgtcgaaagacaagttaaaggctttcgccaccgagaagttgcaactcgatgaggccagtgccacgaagtttgccaatgcaaagctgccgcatggctttgccgcgttaagtcttaaagccattcgcaacatcctgcctttcttgcgccaaggcttcatttatgcacacgccgtactcttagccaagatacccgacatcgttacaaaagccgtttgggatgatgcccacaaacgcgagcagatactttcggggctgctggagattattgaaaactataaccccaaagaccgcggcgttgagggtacgatagacttctgcatcaaaagtcacttacaagatgtggtcgacctgcggccaggtgcagccgatgcactttaccatccctcgatgatagaggcctatcccgatgcaaagcttaacaagatgggtgtgtttcagttgggtagccctcgcaccaacgccatccgcaaccccatggccatgcgctcgttgcacatattgcgaagcgtggttaaccagctgttgcgcgatggcacaatagaccgcgacacggaggtgcacgtggaatatgctcgcgaactgaacgatgccaacaaacgtaaggccatagccgataatcaaaaggatattgaacgcaaacgtgcggattatcgcaaacgcattattgaactgtataaagacgaatgccacaaagagatagaacccacagaaactgacattcttaaatatcaactgtgggaagaacaaaaccacaagtgcctatacacagaccgcgagattggtatctgcgattttctaggtgacaatccgaagttcgacatcgagcataccatcccccgaagtgttggcggcgatagcacgcaaatgaacttaacactctgcgatgcgatgttcaataggcaggtgaagggtgcacgcctaccctcccaactgactaactatgcagacatattgaaaagaattgctccctggaaaagcaagtgcgaagacctgcgaaaacagctagacaagatacgcacgtatggtggcatggagaaaaaaattaaagacaagctgatacaaaaacgccatcgcttgaagatggagctatcctattggcagggcaagtacgaacggtttacgatgaccgaggtacccgaaggctttagtcgccgtcaaggtgcgggcattggtttgatttcaaagtatgcggggttgtttttaaagtcgcttttccacaatgcagtcaatcccaacaaaagcaatgtgtatatggtgaagggcgtaatcacagccgagttcaggcgtatgtgggagctacaaggcgagtacgaaaagaaatcgcgacttaaccattgccaccattgcatcgatgccataaccatagcctgtattggtaaagccgaatacgaaaagatggctcaatactatcatgatgaagagcttttccaatggcgtggcactacgatcaagccccatttcaaaaagccttgggccacctttaccgaagacgtattggccatagagcaatcgctcttggtgaaacatctcacaaaaaacaacatgcctaagcaagccaaaaagcacgtgcgtacagctaagggtaaatatgttgcccaaggcgatgccgccagaggttcactacatagggatacttactatggtgttattgagaaagatggcatcctttaccatgtgttacgaaagccaatagacaagttcgagaaagaatcggagcttgaaaaaatcgttgaccaagctgttaaggagaagataaaggcggccgttgctggtaagaactttaagacagccattaccgaacccatctttatgaataaggaaaagggcataaggataaataaggtgaggcgttatgtgaaagctcaggaacgcttaaagattcgtcaacagcgtgacctatcgacaaaggaatacaaacaattcttctgtgtagaaaacgaaagtaattatctactggccatctatgagggagaattgaagggaaagaaagaacgcgatttttgtgttatcaacaacttggatgctgccgctaatttaaagaggagcaacaaaggtaaagcagctccacttgtgccggaacggagtgctgaacgaaatctccctttgttggcagtattgcaacgaggtacgcaagtacttttttatgaggattcccccgaagaaattttgtttgataacccgcaagacttagtgagacgcctgtataaagtagtgggaattaatactaaaagggatgtaaagaaggggaagacctacctctatggcaatattgagttgaggtttcatcaaaatgctcagaagaaagatgacgtgaagatggaaagcggggggtacaagaataatgaggctccacaccaaggtatagttctttctcataatcagtttaaggcacttgttgagggtgtcgactttaagttcaacatccttggcgagataaagaagaaagaacaccatgcttaaaagaagtctcgtttttacttcgcccgcaactctgtgttgtggtttgatgtagagaaacgatataatacaacacggtggctctacacggtgcatatcttgtgttgtggtttgatgtagaaaaacgatataatacaacagtgcctgcgccctctgtggcgtattgaacgttgtggtttgatgtagagaaacgatataatacaactcaaacggcagtattgaataatctttatgagttgtggtttgatgtagagaaacgatataatacaaccagatgtgccgcttgaagaaaagccgaaggttgtggtttgatgtagagaaacgatataatacaaccatacaggagctgtcacagatgaccggcatgttgtggtttgatgtagagaaacgatataatacaacccgcggcagccgaaaaggcatacagggaaagttgtggcttgatgtagagaaacgatataatacaacgtacggctgtgagcatgccagcaaggtagagttgtggtttgatgtagagaaacgatataatacaactgccgacctcattgaacagctattgaacaagttgtggtttgatgtagagaaacgatataatacaactggtggactacctgaaacgctatgtgcagcgttgtggtttgatgtagagaaacgatataatacaacaagatagaggcgtgcaagaatggttttcagttgtggtttgatgtagagaaacgatataatacaaccggaacctcccaactgtcgccgctgtttggttgtggtttgatgtagagaaacgatataatacaaccagcgcggggtccatgtactatgcgcgcggttgtggtttgatgtagagaaacgatataatacaacttgcgtaagtctttaagcgactttaataggttgtggtttgatgtagagaaacgatataatacaacgggttgtggagaataaattaatgtgttgtggtttgacgtagaaaccggctagacatttaatgtttctataaatagggaggggcttgttgtctttgtgttccaacacaagataagcacccctctcatgtatgaagtggagcgcaaatcaacttgttggcttatgaactcgcgaaaacccaacaacaggcaagcgcatcaactcatcaaattgcaatagtaagaacccatcagcgatttaacccacaagctaatcaacttacaaactcacaagctcatcaaccaatcagctcatcaaccaatcaacttgcaaactcacaaactcacaaactcacggcctcacaaccgcatcagctcattagttcatcagttcatcaactcccaacctcacaaaacttaatttgttgttttaattttacaatgtcgctctaattttcgctccgctctagcgaaaataaaggcgataaagtaggtaaatagccacattttttagcctttcacgacttttgttttgtctgcttttaagcaaaatgcctgcattttgcaccattttgcctttctagattggttgacagctcgccgttttcacttcccgaaaacggccttttacccctaaaaatccacttttttactgctatttagcaccttttctgcacgcattttcaatcgggcagaaaggtttttgaacctacattcacagcatatttatacatttagacttgcatttaggggcaaatcacagtgcatttagcagcattttaccttgcatttagcaccaaaacgcattgcgtttagcaccaaaatgcagtctatttagcaccaaaatgcagtctattttgcatcaaaacgcagtgcattttgctgcaaatagcccaaaatatggtgcaattgaggttttctagaaataaatattcattttgctgcatgcgtatgctaacctctttttgcattaacaacaaccttcgcgagaatcgattttttgcggcaaggtgagtggttgatggacaaaaagggcactcttagtgttaaatatcttgctgaaaagcggacaaataagagcggttgacaagttggcaagctggcgggttgacaagttaaggagcgaataagttgattgccgaatcatcctttctcatcatgttctatgctcatcaattcatcaactcatcaactagagttgataggcgaagcatcctctcatcacgttctaagacatacccctatgggtggctatatcgcttaccaattattctggttgttcccactgccccctgtttgtctttcgtttgcttgtcggcatcttgcctgccttgtttttgggtttatcccgcctcgccttcaagcataagaaaagtaatatgctccgcaataaacaggggctgagcaggctctaatggccgattgggataaggcaattggggcttcacaataacgaaaaggggatggcagaaaccaatctgccatccccttttgggatttctgccactaggcaagtgtgtggtttatttcaccattaccttggcaaccttattgtttacggtaacaacgtatgcgcctttggccagagagaagctttggcttgtgccgttcatcttagccttttgtaccaaaccgccgtttatgccatacacgttaacggtgcttcctgttgcggcttctaccacgataccgccctcaacaaccttgataaaggtatcggtgttgtcggcatttacaccctcgatgcccgttgcgtcgggtatgaagcggatgtgcttggtgtgcagcaacagtttggggaacttggcattggtcattacgcaaaccaagtcttcgtagcgtttggtgagtttcagcgtagtaacgccgttggttacggtgtattcggcatctacatcaaactcctcgccttgtaggtttccgttcttatctacgttcacattaccggtaaaccagcggtacacggtgggtgttccgtcgatgacagcctctgaactgaggtctaccttgttgccgttggcactaacgtcaacggggttttgcctttgataggcatacgatgtgcggtaagtgccgttcgttggaggcagtgcggagaagcgcaggttgttgccaacaaggttgagcgcacgcaggtgggcgttgttacgcacattgatagacgtgagcttgttgttgctgacgaagagctgacccaagttgagcagcggcttacagtcgagcgtcgtcatcgagttggccgttaggtcgaggctctccagtgctgtaagtccgcggaatttaacctctgtcaggttgtttcggctaaggcttaccgctatcagatctttgttcttagtaaggtcgagcttggtaagcttgttgtcggacatagacaagtgttcgaggttgggatacttcgagaggtctatttcagagatgttgttgcggctaaggtctagctgtttaagtgctgtgctaggcgcgaagtcgaacttggaaaggccagcgttgtctaatgtaatggcccgggtgtctgccaacttgctgatatctacagaagacatcttggcgttggtaatgctgaatacggtaagtttctcttcgggtttcgacaccaatacgcgcactttcacgcctttgttggtaagggcggtaaagcgtgtgtaggtgttggccttcaaaacgtattggctcatggcaccgtcgccgcgccaatcgaagtaaacagacatgccctcaatgttgccacgtagtgatagctgaacgctatctctgttgtttgtggtggtaaacgatgccagttcgtttgttggtacggggatgggttgcaccaaggtggtctttaagatgttcttacccgtgaatgcgggataggcagggtgtgatatttcgcaatacactttgcctttggttagggttttaaacctggtagaacccttgtcgtccaggtagtcggttcccagcacgtagggttggccgccttcggttttccaaacgaagttggtggttttgttgttgatggttacgtattgctcggtgaggtcgataccaggcgatgtggtggcaatcaccactttgcgttgcggagcgtacgtaaagtgggcctcgtctagaccaaacctgttgggcatattggccagcgtgaagtagttgttgctgatgtcgagtttagcaactggtgctagggggataatgcccagcaaggtaagctcgttgttagaaacgtttagttctttgagctgttcgctatggtcgaggatcaatcttgtaagcttgttgtacgacaggtttcctcttaccagtgcatcggcacgtcgcaggtcgaggttggccaagttgttgtggcttaggtcgaagtcggtaatggtgaagtaatcgtctaccgtgattgtttcaagctggttatagctgaggttcacgttggtgagcagactcttgtattgcgacttagacttgcctttcagcgagatggttttgagctggttgtgcgacaagtcgagcctttcgagctggttgttacgtcccaagtcgatggtggtaagccccgtatttacgagcgacagcacgcgcaggtcggttagttcggtaacgtctatgcttgtgatgtttaggtctttcacttcaagagccgtcacatagttgtcttgcggtacggttaccacgatgtttccgttacctgctcgctgaccggtgatgttggcggcagttggcttttcggcggtgatgtttacttctttttgttgtccgtttccaaagtctaccttaacttttacgggtttctgtggcgttgcgcccttcattcccacggttaagttgatggtttgtccagccgttgcggtggtggcaaagtctattgcccttacgtccttaccaaattcgctatcgtctttaacggtgaatggttcggtgaatagggggtattcgttgaaaatggtgttggtgaagataagcaccaccttgccgtctacgggcctaagcagcgttacctttccgttatcgtagtagtaatagctggcatccagctcggtacgtttggccagtgtgtctttatccagcttgtagagtttgcccaatgtggttgttccttcgcgcaaaacttgtttagagaagtcgagcacggtgcccaccttgtaggtatcgtccagcacaaggtcgcgttggtcgtagtaatactcgcgccacgtgttctgtggtttgggcagcgaggcgaaggtcatcaggtttttgcgtatgttgaagatgtacaagtcgggacatttgctcacgtctatagaggtgagtttgttgtggtttgctcccaacgtaacgagcttaggcactttgctcaggttaagcgaacgcaggttgttgcccgcacaataaaagtggcgcaggtctggacagtgggtgaggtcgatgtcatcgaacttcacatcggtgttaatcgtacccgaagcatgctcaatgtagagttcgttcagcttggagtttttgctgatgtctagcttgtttactcgcgtgtcgctaacgttcagtacattcaggttggcgttatgcgaaacgtcgatggtgctgatgtcggtcatgtcgaggctcaagcggcgcagcgtggtgcagcctttggtgtctacctctgtgatggtgcggcagtggtaggcgtcgaacgacaccagcttgggaaagttctttaactcgaacttagactgtacgtgtgcgcattgcgcaatttccagttccagaagttcgggcatgttgcccagcctaagcggcgtttgtgccgagaaggggttgtcgcgcaggtagaggaactgcaacgatttgaggttggaaaggtctatctgcttaatggagttgtaggccaatcgcaggtaagacagtttcaaatccttatgaaaggtaatttggtctatcttacaacccgtagcgttgaagaagtcgatcttgttcgggtcgccgtaaatctttacgattccgtccctggtaaccgttcccgagtagtcggttcctgtgggcacttctgcgccttgtttcagcttggcaacgccaacagacagttcttcgcgtccgttaccgcagtctatttctacgtattcgttgccttgtgtgctaccaagcgagaaggttacgataggcgattcgcctttattttcctcatacacggtggtatggaatgtgatgatgggttgctgacctttgttctgtgcgaacgcgggcaggcccaccactgccatcaatgccaacagcaaagatgcaagtagggtttgtttgtaattcatacgctgctagtaaataataatttttttcgctgattttccgttcacttggataaggtaaacgcctttgctccatgcgctggcgtcgatggctgtttcgtctcccacggccgattgggtgtgtgcaagctgccctgccatggtgaaaacgcgcacttccaattgcttttcgccagccctgaacacgttaaagcgccttggcccagccggggtgatgatggttttgttgtcggcttcggcggtgttgatgcctgttgagccggccttgcggcgtagcacttctttcagtccggcgtaggcatcgaactttcctgcgccccattgcacggggtctccctctttcacgtcattgtctacaacggccgttttgcggatgatgtcggcaacgtctgcggctttaagcgttgggtcggcttcgagccagagggcgatagaacctgctacaacaggtgttgccatcgatgtgcccagggtttggtgccagtaatagctcttgccgttgacggtgtgcttggcttgcaagcccacatcagagtagccgttcttggggtcttcaacggtgtaggtgttaaccgatgatataaccactgcgccgggtgcgcaaactaatggcaggttgcggccgtcgagcaaggtgccgaacgacgagaagcgcgaactcttacctttgggaaattcgttcttgttgtaaccatacacaaatccgtccatagctgcccagtggtcgcgaacgttatagcttcccacggtaatcatgcctgctgcacaggccatgtcgttgatggtgccgttgcgcgaacccttcgtccaaattccacttccattggcatcgttgtaggcaccgtcgtagtcgtcgaagtaaacaaactgcgcatcgccgtacaggtctacgcgtttgccggccttgccttctacaagtatgcctagtttgtatttacccgttttgttggttgtttggttgtcgctggttaggaaacgggcgatggcgtagtagcgacccgtttcagggtcttttgttccgcccaccattacgtatccttcaaaggcttggttgaagaccgaattgctggttatcgctccttcttcggcatattcgccgccagatgaatacatggttagcttaccgttgggactgggttctacggtgatacgtgtggcaatacggccgcgttcctcgttgaacacaaccacttgcatcttaaactcggtggcatccgagctgtaagcgtacacctgcccattgcgaaggttgtagtaatctttctttcctacggtttgttttcctgctgccattgggcggatgaaggtttgcagcttgttgtcggcttgggtgaaagtcttgttcagtgccacgggatagtcggcctcgttgcctgctgccacgcagatgatggcactgtctgtgcagctggctaagaagcggttcatcacgctagtgctgtcgtgcgagcccaggttgctgcctaacgagaggttgatgacgcatggcttggcctgcggccctgataggcgggcgtattgataaacatcgtctatgcccagtgcgatgaacatgtcgcgcaggtctccgcacgaagccaccaactccgattctgttgcaattccgtaataggggttgggcatttcgacgtttttcgacgtcttattgtccttggtaacggcaacggtggtgtttcccttatatcctccggccataattccggtggtgtgggtgccatgaaactgccctctgttgtcggtttcaaagtcttcaatggcaaacacgttgtccattgatttcctgtgtttggctatttcgggcaactgtgccttgggaaaatagctctcccagatgtatccgtctttgcctgcactgctggtgtaaagcctgcttaggtaaccatatcgtgtggttccgtcgggtttaagaaagttgatgttgttggggtcgatgcctccgtctacgatgcccgtaaccacccctttgcccgtataggcttgtggcaggccaacgccttggtgtattttgtttacgccaacggcctctctaacgcggtccattttctgtgcaacaggccgcgacagttgtattctgcgtacgcatttcagttcggcgatgcgttcaacgccatttagcggcatgctaacgatggcgatgttgccttttacccgcagtacgctcacgtcttttttggcaagagttccaagagcttccttcccgttaaactcaatcatgccaatcgttcgttggggctttgcgttgctctgtacgatgcttctggtttgtgggttgtaacgtggaatttttggatttagctcttctttcaacgtaacttggctttgcaagtcgattttcgactgtgcatagcctcccaataggaggccagcacaaatggtggtgagaaatgttcgcttcattacttgttgataaaaattttctttccgttaatgatatacagtccctttggcaggttcttctcttcaacgcgcgttccgtcgagtcggtaaaccacgcgtttgttggtcttgttagcggcggcggggttggcaatgccgttggtggaaatcccgttgaaccatatttcaaggcggtcgccgtttgcaaattcaagttcgtaggtgtgtcctcctccgcccgttgcttcaacttcttttccgttgagccgcactttaagtttgctcaggtcggttccgtcgaaggccagcgtgaaggggttgtcgtcttcaccgaatttgatggtgttctctccgttgttcagttgcacttccgttcggtcttgtcggttgaagtagaagaagcggtcggccagttgtttgctgtctacaaacaccgtagccgttttgtcgcgcttgggtgccgaagtctcaacgccgatgttcattccgtttttcagcgttatttcgtacacgccgtcgatgttgttcgtatattgcttgccgttcagccttagcactttaatcttgcatccgttctttgccctgaccttaaccacgcagttcgtttcgggcagttcgatggtgttcatgccgtcttgtaaggcaatgttgttttggttgtagtcccatccttggtataagatgatgttttcggcatggtctacatagaacatggcctttacctttccaagcttatgtgcggttatgtcgatgttcatgtcatcggtaatcgtgaggttaaggctgccgtatatggtgtttggcgttccgtttaccttcaccgcatcgatggcatgggtggtggtgttgaacgtgatggtgagccttgaaccggcctttaccgagaaattggggtcggtatagttggttacgggctttccgtctacagtaacactgcttacaacgcccttggcttcttcggtgttgaatgcgaatttaacgcggcagtctttgtcgggatagtttgcggtgatgtcgatcagtccgccgtctttgggcttaaccgtataggaagtgttgcctttgggcagttgcaatccgtctaccacgatgctgtaaagcggtgcggccgtgtatgatacagtactgatgacaatttctttctccacgtcgggaatccagtgaatggtgttgtcgccatcttttagcaccacgtctgtaaatgttccagagcgttgcatcttcacttttgccgcattgtctaccttaacggtgcacgaagccgtgcgtaatttggcgaaggtgttggtggtgatgttgatggtacacccattgtcgtcgggcaggttgacgtagacatagcagctggtcatgctgtaaatgttctgttttgtgtctcccttggcagttttctttaccacgtctaccaagcaattgccgtctgttgccttcacttcaaacgagccacttgtggtaagcgggatgttgttttctccgttaacaaggttgttt

SEQ ID NO: 1636 - DNA, 23696 bp, synthetic construct
  misc_feature 1..23696: note = Synthetic
  source 1..23696: mol_type = other DNA
tatgggttgcaactgcaatacggcgttatcgactttttctctaaccaataccgcaacgacctgcgagaagacgagcagagcagcaccatattcattgctgctggtaagcgagaatttaaaaatgtggccttgcaacctgtacttaacagcatgtggatgacggcctataacagaatagccgccgccaatgaccttatcgacaacgtgtcgaaagcaagcgattcgaagtttaagcaaggtgagatggaacgcaaaatgatatatggtgaggctttggccataagagcattgttgcattttgatatgctcaggctctttgctcccgcgcctgttaacgacgatggacaggcttacataccttacatcaccaccttccccgaggttctaggtgcgcatgttcccgtgaaggtgtctttggatatggtgatcaaagatttggaagatgcacgcgaactagtgagactttacgacttttcacccatgggcataagtgctaatgcttcggggaaagcccgcttttataataatcttgagtatggaatggaaggctatggaaagactgaaggccttgacgagtttttcttaggtcgcggctaccgcttctcctattgggccataacgggactattggcaagggcttaccagtataaagcagcctacaatgcctcgttctacgagaaggcaaagacacttgcacaagaagtacttgatgccaagtgcacagatgataaaggcgaaaccagttatagtcctttcaaaaatgaggactttaatgggtttgcctatgcacaagaccccgaacaaatgagagatgtccgcatggttggcaacctcttattgggaatttacagggacaacgaagccgaggcgaaactttcgggaatagagtccagtttccctcgtgagaagaagtcgccggcacaatatagtttctgtgctgtagatgtagatgggcaagacatctttaagacagcaggtggagttgatgagtcgaaagatgacatacgctgtttaaggttgctctacaaacccataaactcttacaacatctcgctttccaccaaatggtatgtcaagacaagagatgcggacgaacgcaaacgcacgctgaatatcttcccgatattgcgcacatctgagatgcgattcatcattgccgagacgctggctaggaacaacgagtttgacaaggcctacgaaatccttaatgagatgcgtagaaacagaggcttacgtaatggcgacttgcctacgcaggcttcgttggaaggtttcttgaaggacctcgtgcgcgagggacaacgcgaatggattagcgaaggccaattgttctacctatacaaaaggctaaactttgcagtgaaacgggacgacggcacatttgctccctttaagaaagaagagtgtgtggtgccattgcccattgaggaattaaaataacccttaacattttgtttatgaaaagattattttattatatccctttggccatcttggccttgttggtgggctgtaaggaggatgcgctactaacattcggggacgacagatacgtctatttcgagaagttctatcgagatgcggtggctcctggtacagagaaagccgactctactatggcgtcgttctttttctacaacgacgatgttaacagcatagacgccctattggaagtacatatcgctgggcgagacctaacgcacgatgaaacctttaagctgcgtgtggtgccaaaagaaaccacagccaagcccgaagaatatgaaattcaggacacctataccttccgtgcacgtgcggccgcacctaatgcgaccaatagaaacgacaccattgccatcaagatgaaacgctcggcccgattgaaagatttcccacatggattaaggctgatggtagaattggttccgcaaggcgaactgcaattgggacaaagcgaaaggactaaggccttagtggtactcactcgcgatgccatcaaacccaaatggtggaaagacgaagtggaggcaaatcttttgggtacttattcgagcaagaagtacaaactctttgtgacacatatcgacaccaagttaatcttcaatgacgaattggtgaagagaaatcctgcaaaggcaatacgactagtgagggactttaaaaggtggttggccgagcatcccaaggatgctgttgaggaagatggcgtaacgccgataacagtaaacgtatagttgcacttaaaaaacaaacatgtgttatgaaaaggattaaatatttcatgatatggctgagcgttccccttttgttgggagcttgtttcagcgacgagggaaactacgaatacgagtcgctcaaacctccaacgtggacacgtgattacatgagtagtccaatacagatttccgttagggaaggaagacccataagaatagacggaacgaagtgctttaattggggtaaactcgactcgttgcaacgcagtggggaagtgcgctacgaatggcgctactatgggaaagttttctgtacagacttgaaagccgaaattccctacgaagagtttatgaaacggtgtgagttggaagaaatgcccatctctgattatgagcgcggcgacttcgccattatcgagaaatccacaggcgttagctttaaggtgaagacaactttttatttccatgcgcagatagacgaggccgacttccttatctattcgacgaaatcacccaacgaaccccatgtaggaaaggttaacgtaatgcgcctagactattcgcgcgaccctaagacgggcggatatgtttctgattttgtattgagcgaccgccatttctcacaagatttgcctggtacgcccaaacaattagacctttctgctgcaaagaacgtgagccttgttgggtcggcaacggccatcaccgaagaaggcgatgcgtatgtgctcaatgcggccaacttgcaaaaggtttgggacatgagttcgcaattcgatgagggaacccccgctgactttaaggttagttcgcgtaaggaccaagatggaggcggaacagactcgtacgccttttcatgggtagcaacaaaagacggacgtgtgtttactagacagtttggaaggaactacctaggaggtaaattcataacggaaccttactacctagattcgttgggatataaaattacacagtttggacatacctgttgggggataacgaatatcccttgttacgatgagaagaacaagcgtgtgcttattgcaacgagtttacagaacggagcatacggttcttaccggagttatatgaccaccctctataaagatggatggaaaggtgtacccgtaatgaagatgcccgacgacacaaaagtgtactatctaacgttaatgaacggcgaccaatattgggacaacaatgcaaatagctggttccaaatatactataatacgggtggtaagtcgatggttggcacatttgcagtagacaatcgtggacgacgactaaatgaacctaactcgtacttattcccatatgaggtgaagggccatttgtttaataaggaaacagttttcctcgttgcagcaggaacgcgccttactaattcaagctcgaaggcttatatcgaccttttctccgaaggaaacgaggtgtatggaattaagcgtagtggtttgggctggcctaaccaatctagttacgagataatcaaacttccgcttaagggtataacttcgaagataacgagtatgacttataaccgcgatgacctattaagtggctcgaattatcacgacttggtgattggctgtgagaatggagacatcttggtttacgaggctgaagaattgttgaacccttcattcagaaagaaactaaacgtgggtggtaaggtggttgccatcaaacaacttggacttatccgcgccacagtagacatgtattaatacaacaacacggccaccccttacccaaggtggtggggtggccgcaaaacaaaaacagataaaatgcagaacatgatggttttaaaaagaagtgccgccgcactgatgatgctgttggctggcgcgtttgccgtacaagcgcaaagtgtagataaggtaagtctaaacgttagcgtggccaacaagggtggagcaccaactgttacgctcaaaaagtcgcccgaatgtcaggcctattgcctagcactgttcacatcagacattgccggcatcatcaaagacgaggtagttgacggatatttcacgggtcagaagaaaccccgatacaccgacaacgccaaagataagaaactggtagactacgggttggtggttgttccggagaaagaatacaccctcatcgcccttggttatggcaaggacggcaagcccggcaaggtgtctcgcacgcagtttaccgctcctcgcagacaaggtttcgcctcggcgcaggtgctggcacaggtaataaacatcggacccgacagcgttacggtgaagtttacgccgaacaccgacgtggctggctacgccttatgtcagtttgagggtggaaccatcgaacaaacagtgaaagagcacggccccatgatgggtttctccaacgcttacgacatgattaagcagttcagcggcaaagactacaccaccgaaaagcaacacacttggcgcgagatggtgcccgatgccaactacgaactctgcgtgttggcatgggataagaatggtgtcttccaagagataaccaaggttcccgttaccacgaaaaagcttggcggacccggcgaagccacagtcgacattaagattggcgagtttggcggcagcaagaaaggcggctactatcaagatgtagtgtactcgcccaacgaccaagcatcgttacaccgcgacatcatcattaccgaagaggccttcaacaagcccgacatgggcaatatcggtgttatcaagatgctgcaaaccgatcatcccaaagacatttactggaaccaataccgcgtggacagggctagatggaacgccacaccgctcaccacctactacgcttgctcgatggctaagaacgtagacggccagtggggcgagcttaaaaaggtgaagttcactacgcctgccgcaaaagaataacgcgaaatctataaaccgctcttgatgaaaccttgattttagctggcatactttgctcatcgctagggttgttcatggcaaaccgtgtacccttagcgagagcaaatgctgcccgcctaagcatcctgcgttctgaatgagcggcaacagacaagctcacagtgccatcttacagcttaaaagctgattctaaaaagccaatataaggttatttctgaaaccagtctttgtagataaaggcagccctattccaaacagagaatattcagaacaagccttaaacccaaattaagtggcaggtaggacgaaccgctctcggcactcatctcctccatcccagcatctcgcgctatccaactatacataacctaggggcatttcctaacactttcgcccccataaccttgcggatgccgaacgagatgcagctggggcaggcctgccgtgctacgtttgtcgagggtaaaccgatgacttaacatcgctaacaagtaaccgatttattgaaacaagaatgagtaacctaaaaacaatcctgcggggctgggcgctcttagccctgcttgtccccactaacttgcgtggacaaggcgttaaccaggccccacccatccccgtggacactgccgtaaggataggcaaactgcccaacggactgacctattacatacgccataacaactggccagaacatcgcgccgacttctatatcgcacagaaggtgggctcgatacaagaagaagagagccaacgcggactggcccacttcctagaacacatgtgctttaacggaacaaagcatttccctggcaacgaacttatccgttacttggaaacgcttggcgtgaagtttggcggcgacctcaatgcctacacctccatcgaccaaaccgtttacaacatatccaacgtgcctaccacgcgccagacggcactcgactcgtgcttgctgatactcagcgactgggcaaatgcgctcacactcgaccctgccgagattgacaaagagcgcggagtgatacacgaagagtggcgcgaacgcaccggagccacatcgcgtatgctagaacgcaacctgcctaaactctattcgggaacgaagtacggcgcgcgtttccccatcggactgatgagtgtggtggacaacttcaagcccaaagagctacgcgactactacgaaaagtggtatcatccctccaatcagggcattattgtggtgggcgacatcgacgtagcccacaccgaggccatgattaaaaagcttttcggcccattgaagaaccccgacaaccaagcgaagatagtggatgtgcccgtgcccgacaacgaagaacccatcatcgttgtggataaggatagggaacaggccaacagctcggtagaagtgtcgttcaaacacgaggcatggcccgactcgctcaaacgcaacgtagactatctcttggccaactatgccaagaacatggccctaggcatgctcaacgaccgctatgccgaggctgtacaaaactcaaccaactgtccttacttgggcgcatcggctgccgatggcacctacatcttcgccaaaacaaagggtgctttcaccattagtgcaacgccgcgcgacatggctggtactgccgccgcattgcaagccgcacttgttgaggctcatcgcgccgccaagttcggtttcacccaaagcgagtacgaccgcgccaaggctaacttgctcagtgcattggaaaaggcatacaatggtcgcgacaagcgtggcaacgcctcttttgccgacgattacaaaggccatttcctctcgcaagagcccatcccagccttcgaagactattacgagataatgaaacagctggtgcccaacatcccgttaaccgacatcaacgccattctgccgcagctgttgcccgaaaccgaccgtaatatggttatcatcaacttcaacaacgagaaggaaggcaacgtatatcctacgcccgaatccttgttgcaagctgtgcacgccgcacgccaaaccaaggtagaaccctacgttgatacggtgaaggaggttccattgatgaccaagttaccccgtcccggcaagattgtaaaggagaaaaagaatgccgaactgggttataccgagttgaaactggccaatggcgtaaccgttatcttgaagaaaaccgactttaagaaagaccaagtgaactttgccgcaagcgcacatggcggcaagtcgctttatggtccgaaagactacaccaacttggccgtattcaacgacatcgtgtccatcagtggcttaggtggattccgcagtatggagctacccaaaatccttgcaggcaagattgccagcgcaggtctttccatcggcgataagtatatgggcatgtcgggtggttcgtctaagcgcgatgtcgaaacgatgttgcagctagcccacctatatctgtcgggtggcatcaccaaagacgaacaggcgtttgccactgtgatggactcgtggcgcacggcgcttaaaaaccgcgccctcaaccatgatattgctttcaacgatacgctcgtggccactgtctacggtcacaacccgcgcttgttgcccgtgttggaggccgacttgcccgacatcaactacgaccgcatactgcaaatagcacgcgaacgcaccaacaacgccgccgcatggacgttcagcttcatcggcgacttcgatgagccgcagctccgcaagcttatctgtcgttatctcggttcgctgcccactaagggaaaggtggttaaaggccatctcaccagttcgtttgccaaaggtaagatagagaatgtgttccgtcgtaagatggaaacacccaaagctatggcttgcgtaatgtggcacaccaccgatgttccttattctgtggagaatgccgtacgcatgaacatgattggccaaattctctctatggtttacatcaagactatccgcgaagacgcatcggcagcctattcggtgtcggcagaaggcggggcaaccatcgaaggcgactaccacgactactccgtactggttacttgtcctgtgaaaccagagaaacgcgacacggctatggccatcatctatcgcgaggccgagaacatgacgcgcacttgcgatgctgccatgctcgacaaggtgaaagagtatatgcttaaaaatgtggctagtgccgagaaaaccaatgcttattggagtggcgttatcaacatgtatcgccgccacggcatcaacatgcacacccgctatcgcgacatgattaagcagcaaacacccgaaaagctgtgtgcgctgatgaaacaaatcttgcaaagcggcaaccgcgtcaccgtggaaatgctgccccaagagtagaaagacgtttaaaggtgaaaaggcatttaaaggtgaaaaagtgaaagggtgaaaaggtgaaaaaatggcttcgccctttaagggtgaaaaggtgaaaaggtgaaaagatggcttcgccctttaaaggtgaaaaggtgaaagggtgaaaagatggcttcgccatttaaacagcttgcctagtaaacctagtaagcctagcgtatctagaaagcctagtaagcctagcaaacctagcaaacctagtaagcctagaaaacctagtatatctagaaaacctagaatgcctagtgtatctagcaagcctagaatgcctagtgtatctagcaagcctagtatatctagaaaacctagtacaactagaaatcctagccccaccagcaagctaaaccaaatgcttgttagctcgccctctcattaccctttaagcacagataaacgccaagaaatcatagagtgatgataaaatgtttgtgattttaatggtttgatgaattaatggagaaacaaactggttcgtagaagaataggtttatcagagaagtcgcggagaaatagttggtcttcatgtcccattttgggcagaattctcttacgcttctttgctccattaattctttttaggctttccttggggcatctgccatgcaacaaaaagggggaacagccaaatcctcgaccatacgcaaaacacaaatgggcgttagcaatttatccctatgttgggtaaagggcgttgaaagcaacgattgtctatgttaagggttggcaatcgctcgttcaatggtcttcctggcatagggactttttatttgtgtttgttaaaggttaaagcccaattgggcattaaaatgttttaaagtaaagcgttacgataatcttcctctcgtgactgaaataccaatggccaactaaccatttgcccatattcagtgtttcctttggaaaaaaggaagcgaatgctattaatcccatcggttttcattaggccgttcatcaaacattttaagctgttttcatcgtttcctgttcctccttcgtttgtttatcggcatcctgtctgtctttttctagcaggcgtgtgggctacgtcaagagaaaaatgcagacaacttgcccaacaatacacaaaatctgtacaggccgatttgggtttaatgcccgatttcgtgataagcccaaatcattttttgcccggcacttttcacctttgaagggcgaagccatcttttcactttttcaccttttcacctttaaatgccttttaactctttcacctttattgcaattgtaccgaacaacggtgccgcattcccccatagtgccctctttcctcgttgcgccctaaaacaaataagcccctccgaagaggggcaatagggactaagcccttcggcatatagccttattgtgataagatgtagagtaaatcttatggctgcaaaattaacaaaaacattttgccctaccaaataattaatgtaattttacacctaaatcctaatgggatagtaaatagcaagaaacaaacaacaccataactaacgattatgaatacacgaatattgggtcttgatacgggtacaaacagccttgcttgggctgtggtagacagaaatgccaacggaaactacacgttggtgaaacgcggcgatgttatcttcagcgaaggcgtaaagatagaaaaaggcgtagaatcgtctaaagcggccgaaagaacaggacacaagtccttgcgggtgcagtatgctaggcgacgtctgcgtaagattgatacgctgaaagtgttggtaagtctcgacctatgcccttatctttccgacgagcaactgagccaatggaaagccaagaaaacatatccgctcaccgacgactttatgctttggcagcgttcgggtagtgccgaagagaacaacccttactattgccgctatcgttgcctaacgcaaaaactcgatcttaccgaccaaagccagcgctttcttcttggtagggcattctatcacttggcgcaacgtcgtgggtttcttagcaacaggctcgacaccagtgccgattccgaggagtcgggcaaggttaaatcgggcattgcccagctttctgtagagatggaaaaggctggttgcacgtttctaggcgagtatttctatcaactctacaagcaacacggcaacaccgtcaggctaagaagccgatataccgacagggaagaacattataaaaaggagtttttggccatctgcgaaaaacaagaactggatgcgcaatgggttgaaaaactgcaaaaagccttgtatttccaacgcccgttaaagtcgcaacgtaagggtgtaggcaaatgtaccttcgaacctaagaagccgcgttgcgccgaatcacaccccgattacgaagcgttcaggatgctctgcatcctcaataacattaagataaaaaccccaaacgacacttcgttacgaccgctaaacgcacaagaacgcgaaaagatttggccgctgttcttcagaaagtctaagcccaacttcgatttcgaggacattgcaaaggcattggcaggcaaaaacaactacgcctggtataaggatgcaggcgaaaagccatacaggtttaactaccgcatgcaccaaggcgtgtcgggctgtcccgtaacagcacagctgatagacatcttcggcagcgattggaaggcaggcattgccgaaacatacatggcagttgaaaagaagaacggcacaaagaccatcgacgagatggccgatgatgtttggaatgtgctttattcattctcgtcgaaagacaagttaaaggctttcgccaccgagaagttgcaacttgatgaggctcgtgccacgaagtttgccaatgccaaacttccgcatggctttgccgcgttaagtcttaaagccattcgcaacatcctgcctttcttgcgccaaggcttcatctacgcccacgccgtactcttagccaagatacccgacatcgttacaaacgccgtttgggatgatgcccacaaacgcgagcagatactttcggggctgctggagactatcgagaactataaccccaaagaccgtggcgttgagggtacgatagacttctgcattaaaagtcacttacaagacgtggtcgacctgcgcccaggtgctgccgatgcgctttatcatccctcgatgatagaggcctatcccgatgcaaagctcaacaagatgggcgtgtttcagttgggcagtccccgcaccaacgccatccgcaaccctatggccatgcgctcgttgcacatattgcgcagcgtggttaaccagctgttgcgcgatggcacaatagaccgtgacacggaggtgcacgttgaatatgctcgcgaactgaacgatgccaacaaacgcaaggccattgccgactaccaaagagaacaagagaagaaacggaaacaatatcgcgatgacatcataaccttatataagagtgaatgtcacaaagagatagagccgacagacaccgacatactcaagttccaattgtgggaagagcaaaaccatctgtgcttatatacaggcacccagattggcatctgcgatttccttggtgacaatcccaagttcgatatcgaacataccatcccccgaagtgttggtggcgacagcacgcaaatgaatctaacgctctgcgatgccacttttaataggcaggtgaagggtgcacgcctacccagccaattgcctaaccaccatgaaatactaaaaagaattgccccttgggaaagcaagtgcgaagacctgcgaaaaaaaatagacaagatacgcacgttcagcggaatggctaaggagaagaaagacagccagatacaaaaacgccatcgccagaagatggaactagactattggcagggcaagtacgaaaggtttacgatgaccgaggtgcccgaaggctttagtcgccgtcaaggtgcgggcattggtttggtttcaaagtatgcgggattgtttttaaagtcgcttttccacagcgcagacagccccaacaagagcaatgtgtacgtggtgaagggcgtaaccactgccgagttcaggcgtatgtgggggctacaaggcgagtacgaaaagaaatcgcgacttaaccattgccaccattgcatcgatgccataaccatagcctgcatcggtaaggccgaatacgataagatagcgcaatactaccacgacgaagaagtgtcgcgctggcatggttctgccggcaaaccccatttcaagaaaccttggccaaactttaccgaagacgtattggccttagagcagtcactcttgatcaaacatctcaccaaagacaacatgcctaagcaggccaaaaggcgtgtgcgaacagccaagggtaaacatcttgcccaaggggatgccgccagaggttcgctacatagggatacctactatggtgcaatcgagcaagagggcgagatacgctatgtgttgcgtaaaccaataagcaagttcgagaaagaatcggaactcgaaaatatagtagaccaagccgttaaggagaagataaaggtggccgttgctggtaagaactttaaggcagccattgccgaacccatatttatgaataaggaaaagggtataaggataaataaggtgaggtgttatgtgaaagccaaggaacgcttaaagattcgtcaacagcgtgacctatcgacaaaggaatacaaacaattcttctgtgtagaaaacgaaaataattatctattggccatctatgagggagaagtgaagggaaagaaagaacgcgatttttgtgttgtcaacaacttggatgctgccgcttatttaaagaggagcaacaaaggtaaggcagctccacttgtgccggaacggagtgctgaacgaaatctccctttgttggcagtattgcaacgaggtacgcaagtacttttttatgaggattcccccgaagaaattttgtttgataacccgcaagacttagtgagacgcctgtataaagtagtgggaattaatactaaaagggatgtaaagaaggggaagacctacctctatggcaatattgagttgaggtttcatcaaaatgctcaaaagaaagatgacgtgaagatggaaagcgggggatacaagaataatgaggctccacaccaaggtatagttctttctcataatcagtttaaggcacttgttgaagacatcgactttgagtttaacatccttggcgagataaagaagaaagaacaccatgcttaaaagaagtctcgtttttacttcgcccgcaactctgtgttgtggtttgatgtagagaaacgatataatacaactcaaacggcagtattgaataatctttatgagttgtggtttgatgtagagaaacgatataatacaaccagatgtgccgcttgaagaaagccgaaggttgtggtttgatgtagagaaacgatataatacaacccgcggcagccgaaaaggcatacagggaaagttgtggcttgatgtagagaaacgatataatacaacccttgtttggtgataagtatatatcatagcgttgtggtttgatgtagagaaacgatataatacaacacactgaaagtgatgtacaactttatgatgttgtggtttgatgtagagaagcgatatgatacaacagcacgacatcatcatggcttggcagcagagttgtggtttgatgtagataaacgttataatacaatgggttgtggagaataaattaatgtgttgtggtttgacgtggtaaccgactagtcatttaatatttctataaatagagaggagcttgttgtctttgtgttaacagcacaagataaacactcctcccatgtctgatgtgtaggacaaatcaacttgttggcttatgaactcgcgaaaaccaaacaacaggcaagtgcatcaactcatcaaattgcaatcgtaagaacccatcaactattcaacccatcaactattcaacccacaaactaatcaacttacaaactcacaagctcatcaaccaatcagctcatcaaccaatcagctcacaaactcacaaactcacgacctcacaaccgcatcagctcattagttcatcagttcatcaactcacaaccgcatcagctcattagttcatcagttcatcaactcacaaccttacaaaacttaatttgttgttttaattttacaatttcgttctgattttcgctctgttctagcgaaaatgtaggcaataaagtaggtaaaaagccacattttttagcctttcacggcttttgctttgtccgcttttaagcaaaatgcctgcattttgcaccattttgcctttctagattggttgacagctcgccgttttcactccccgaaaacggccttttatccctaaaaaactacttttttactgccatttagcaccttttctgcacacgttttcaatcgggtaggaaggtttttgcacttacattcacagcatatttatacatttcatcctgtatttagcggcaaattgccttgcatttagcagcaaatcgcagtgcatttagcagcaaatcgcagcgcattttgcaccaaaacgcggtctgtttagcaccaaaacgcagtgcattttgcatcaaaacgcagtgcattttgctgcaaataacccaaaatatggtgcaaatgaggttttctagaaataaatattcattttgctgcatgcgcatgctaacctctttttgcattagaaacaaccttcgcgagaatcgattttttgcggcgaggttagtggttggtggataaaaagggcactcttagtgttaaatttcttgctgaaaaacagacaaaaggagagtggctgacgagttgacaagcggacgggttgacaagttaaggagcgaataagttgattgccgaatcatctttcttatcatcttccacacccatcaactcatcaacttatcaactcgagtttgttgccgaggcatcttttcatcatgttctatactcatcaattcatcagctcattaactcgagttgattgccgaatcatcctttctcatcatgttctatgctcatcaattcatcaactcatcaactagagttgatagccgaagtattctttttatcatgttctaaaataaccccaaggggtggttatgcggcttatcaattgttttaggttgtttgcatcgctgcatgttcatctttcgtttccttgtcggcatcttgcctgccttgtccttttgacgtaacttgctacgtcttcaagaataatataggaaagatgctccacaatattacaagggctgagcaggctctaacggccgattgggataaggcaattgggggctgcgcaataacgaaaaggggatggcagaaaccaatctgccatccctttttgggatttctgccactaggcaggtgtgtgaggtttatttcaccattaccttggcaaccttattatttacggtaacaacgtatgcgcctttgggcagcgagaagctttggcttgtggcgttcatcttagccttctgtaccaaaccgccgtttatgccatacacgttaacggtgcttcctgttgcggcttctatcacgataccgccctcaacaaccttgataaagctgtcggtgttgtcggcatttacatcctcgatgcccgttgcgtcgggtatgaagcggatgtgcttggtgtgtagcagcagcttggggaacttggcattggtcattacgcaaaccaagtcttcgtagcgtttggtgagtttcagtgtggtaacgccgttggttacggtgtattcggcatcaacgtcaaactcctcaccttgcaggttaccgttcttatcaacgttcacattaccggtaaaccagcggtaaacggtgggtgttccgtcgacaacagcctcagaactgaggtctaccttgttgccgttggcactaacgtcaacggggttttgcctttgataggcataggatgtgcggtaagtgccgttggttggaggtagcgcggagaagcgcaggttgttgccaacaaggttgagcgcacgcaagtgggcgttgttacgcacattgatggacgtgagcttgttgttgctgacgaagagctgacccaagttgagcagcggcttacagtcgagcgttgtcatcgagttggccgttaggtcgaggctctccagtgctgtaagtccgcggaatttaacctctgtcaggttgtttcggctaaggcttaccgctatcagatctttgttcttagtaaggtcgagcttggtaagcttgttgtcggacatagacaagtgttcgaggttgggatacttcgagaggtctatttcagagatgttgttgcggctaaggtctagctgtttaagtgctgtgctaggtgcgaagtcgaatttggagaggccaacgttgtctaatgtaatggcccgggtgtctgccaacttgctgatgtctattgacgacatcttggcgttggtaatgctgaatacggtaagtttctcttcgggtttcgacaccaatacgcgcactttcacgcctttgttggtaagtgcggtaaagcgtgtgtaggtattggccttcaaaacgtattggctcatggctccgtcgccgcgccaatcgaagtaaacagacatgccctcgatgttgccacgtagtgatagctgaacgctgtctctgttgtttgtggtgataaacgaagccagttcgtttgttggtgcggggatgggttgcaccaaggtggtctttaagatgttcttacccgtgaatgcgggataggcagggtgtgatatttcgcaatacactttgcctttggttaggttcttaaacctggtagaacccttgtcgtccaggtagtcggttcccagcacgtagggctgtccgccttcggttttccaaacgaagttggtggttttgttgttgatggttacatattgctcggtgaggtcgataccaggcgatgtggtggcaatcaccacttcgcgttgcggagcgtacgtaaagtgcgcctcgtctaggccaaacctgttgggcatattggccagcgtgaagtggttgttgctgatgtcgagtttggcaattggtgccagggggataatgcccagcaaggtaagctcgttgttagaaacgtttagttctttgagctgttcgctgtggtcgagaatcagtcttgtaagcttgttgtacgacaggtttcctcttaccagtgcatcggcacgtcgcaggtcgaggttggccaagttgttgtggcttaggtcgaagtcggtaatggtgaagtaatcgtctaccgtgattgtttccagttggttatggctgaggttcacgtttgtgagcagactcttgtattgcgacttagacttgcctttcagcgagatggttttgagctggttgtgcgacaagttgagcttttcgagctggttgttgcgtcccaagtcgatggtggtaagcccagtatttacgagcgacagcacgcgcaggtctgttagttcggtaacatctatgcttgtgatgttcaagtctttcacttcaagtgccgtcacatagttgtcttgcggtacggtcaccacgatgtttccgttacctgctcgctggccggtgatgttggtggcagtaggcttctcggcggtgatgtttacttcttttagttgtccgttgccaaagtctaccttcacttttacgggtttctgtggcgttgcgcccttcattcccacggttaggttgatggtttgtccagccgttgcggtggtggcaaagtctattgcccttacgtctttaccaaattcgctatcgtctttaacggtgaaaggttcggtaaataggggatattcgttgaaaatggtgttggtgaagataagcaccaccttgccgtctacgggcctaagcagcgttacctttccgttatcgtagtagtaatagctggcatccagctcggtacgtttggccagtgtgtctttatccagcttgtagagtttgcccaatgtggttgttccttcgcgcaaaacttgtttagagaagtcgagcacggtgcccaccttgtaggtatcgtccagcaccaggtcgcgttggtcgtagtaatactcgcgccaggtgttctgcggtttgggcagcgaggcgaaggtcatcaggtttttgcgtatgttgaagatgtacaagtcgggacatttgctcacgtctatagaggtgagcttgttgtggtttgctcccaacgtaaccagcttaggcactttgctcaggttaagcgaacgcaggttgttgcccgcacaatataagtggcgcaggtctgggcagtgggtgaggtcgatgtcgtcgaacttcacatcggtgttaatcgtacccgaagcatgctcaatgtagagttcgttgagcttggagtttttgctgatgtctagcttgtttactcgcgtatcgctaacgttcagtacattcaggttggcgttatgcgaaacgtcgatggtgctgatgtcggtcatgtcgaggctcaaacggcgcagcgtggtgcagcctttggtgtctacctctgtgatggtgcggcagtggtaggcgtcgaaagaaaccagcttgggaaagttctttaactcgaacttagactgtacatatgcgcattgtgcaatttccagttccagaagttcgggcatgttgcccagcctaagcggcgtttgtgccgagaaggggttgtcgcgcaggtagaggaactgcaacgatttgaggttggaaaggtctatctgcttaatggagttgtaggccaatcgcaggtaagacagtttcaaatccttatgaaaggtgatttggtctatcttacaacccgtagcgttgaagaagtcgatcttgttcgggtcgccgtaaatttttacgactccgtccctggtaaccgttcccgagtagtcggttcctgtgggcacttctgcgccttgtttcagcttggcaacgccaacagacagttcttcgcgtccgttaccgcagtctatttctacgtattcgttgccttgtgtgctaccaagcgagaaggttacgataggcgattcgcctttattttcctcatacacggtggtatggaatgtgatgatgggttgctgatctttgttctgtgcgaacgccggcaggcccaccactgccatcaatgccaacagcaaagatgcaagtagggtttgtttgtaattcatacgctgttagtaaataataatttttttcgctgattttccgttcacttggatgaggtaaacgcctttgctccatgcgctggcgtctatggttgtttcgtctcccacggtcgattgggtgtgtgcaagctgccctgccatggtgaaaacgcgcacttccaattgcttctcgccagccctgaacacgttaaagcgccttggcccagccggggtgatgatggttttgttgtcggcttcggcggtgttgatgcctgttgagccggccttgcggcgcagcacttctttcagtccggcgtaggcatcgaactttcctgcgccccattgtacggggtctccctctttcacatcattgtcaacaacagccgttttgcggataatgtcggcaacgtctgcggctttaagcgttgggtcggcttcgagccaaagggctatagaaccggccacaacaggtgttgccatcgatgtgcccagggtttggtgccagtaatagctcttgccgttgatggtgtgtttggcttgcaagcccacatcagagtagccgttcttggggtcttcaacggtgtaggtgttaaccgatgatataaccactgcgccgggtgcgcaaactaatggcaggttacgaccatcgagcaaggtgccgaacgaagagaagcgcgaactcttaccttttggaaattcgttcttgttgtaaccatacacaaatccgtccatagctgcccagtggtcgcgcacgttatagcttcccacagtaatcatgcccgctgcacaggccatgtcgttgatggttccgttgcgcgaacccttcgtccaaattccacttccattggcattgttgtaggcaccgtcgtagtcgtcgaagtaaacaaactgcgcatcgccgtacaggtctacgcgtttgccgtccttcccttctacaagtatgcctagtttgtatttacccgttttgttggttgtttggttgtcgctggttaggaaacgggcgatggcgtagtagcgacccgtttcagggtcttttgttccgcccaccattacgtatccttcaaaggcttggttgaagaccgaattgctggttatcgccccttcttcggcatattcgccgccagatgaatacatggttagcttaccgttgggactgggttctacggtgatacgtgtggcaatacggccgcgttcctcgttgaacacaaccacttgcatcttaaactctgtggcatccgagctgtaagcgtacacctgtccattgcgaaggttgtaataatctttctttcctacggtttgttttcctgctgccatcgggcggatgaaggtttgcagcttgttgtcggtttgggtgaaagtcttgttcagtgccacgggatagtcggcctcgttgcctgctgccacgcagatgatggcgctgtctgtgcagctggctaagaagcggttcatcacgctagtgctgtcgtgcgaacccaggttgctgcctagcgagaggttgatgacgcatggcttggcctgcggccctgataggcgggcgtattgataaacatcgtctatgcccagtgcgatgaacatgtcgcgcaggtctccgcacgaagccaccaactccgattctgttgcaattccgtaataggggttgggcatttcgacgtttttcgacgtcttgttgtccttggtaacggcaacggtggcctttcccttataccctccggccataattccggtggtgtgggtgccatggaactgtgctctgttgtcggtttcaaagtcttcaatggcaaacacgttgtccatcgatttcctttgtttggctatctcgggcaactgctctttggggaaatagctctcccagatgtacccgtctttacctgcactgctggtgtacagcctgcttaggtaaccatatcgtgtgcttccgtcgggtttcatgaaattgatgttgttggggtcgatgcctccgtctacgatacccgtaaccacccctttgcccgtataggcttgtggcaggccaacgccttggtgtattttgtttacgccaacggcctctctaacgcggtccattttctgtgcaacagggcgcgagagttgtattctgcgtacgcatttcagttcggctatccgctcaacgccatttagcggcatgctaacgatggcgatgttgccttttacccgcaatacgctcacatcgtttttggcaagagttccaagagcttccttcccgtcaaactcaatcatgccaatcgttcgttgggggttagctttgcccttaccgatgcttctggtttgtgggttgtaacgtggaattttaaaattaagctcttctttcaacgtaacttggctttgcaagtcgattttcgactgtgcatagcctcccaataggaggccagcacaaatggttgtgagaaatgttcgcttcattacttgttgataaaaattttctttccgttaatgatatatagcccttttggaaggttcttttgttcatcaacacgcgttccatcgagtcggtaaaccacgcgtttgttggttttgttggctgtggcggggtcggcaatgccgttggtggaaatcccgttgaaccaaatttcaaggcggtcgccgttagcaaattcaagttcgtaggtgtgtcctccaccgcccgttgcttcaacttcttttccgttgagccgcactttaagtttgctcaggtcggttccgtcgaaggccagtgtgaaggggttgtcgtcttcaccgaatttgatggtgttctctccgttgttcagttgcacttccgttcggtcttgtcggttgaagtagaagaagcggtcggccagttgtttgctgtctacaaacaccgtagccgttttgtcgcgcttgggtgccgaagtctcaacgccgatgttcattccgtttttcagcgttatttcgtacacgccgtcgatgttgttcgtatattgcttgccgttcagccttagcactttaatcttgcatccgttctttgccctgaccttaaccacgcagttcgtttcgggcagttcgatggtgttcatgccgtcttgtagggcaatgtggttttggttatagtcccatccttggtataagatgatgttttcggcatggtctacatagaacatggcctttacctttccaagcttatgtgcggctatgtcgatgttcatgtcgtcggtaatcgtgaggttaaggctgccgtatatggcgtttggcgttccgtttaccttcactgcatcgatggcgtgggtggtggtgttgaacgtgatggagagccttgagccggcctttaccgagaaattggggtcggtgtagttggttacgggcttgccgtctacggtaacactgcttacaacgcccttggcttcttcggtgctgaacgcgaatttaacgcggcagtctttgtcgggatagtttgcggtgatgtcgatcagtccgccgtctttgggcttaactgtgtaggaagtgttgcctttgggcagttgcaatccgtctaccacgatgctgtaaagcggtgcggccgtgtatgatactgtgctgatgacaatttctttctccacgtcgggaatccaatgaatggtgttgtcgccattttttagcaccacgtccgtaaatgttccagagcgttgcatcttcacttttgcggcattgtctaccttaacggtgcacgaagccgtgcgtaatttggcgaaggtgttggtggtgatgttgatggtagagccattgtcgtcgggcaggctgacgtagacatagcagctggtcatgctgtaaatgttctgttttgtgtctcccttggcagttttctttaccacgtccaccaagcaattgccgtctgttgccttcacttcaaacgagccacttgcggtaagcgggatgttgttttcaccgttaacaaggttgtttattgcaacgccgttaaccttaatactcactcggctggcatcatcaacgtttatcttgatgttgctgtcggcataagcggccgacgaaaccatagttaaaattgttcctaaaagaaacgagtagaacttcttcataggctcaaagcatgaaaaattgcagcagttgatgtttggttgatacgaaatttccgatagccgggcggttggtacgcccaactctgtttgtgtcattaaatacatttttggtggattgagctgcttcaacctacc

SEQ ID NO: 1637 - DNA, 23678 bp, synthetic construct
  source 1..23678: mol_type = other DNA
  misc_feature 1..23678: note = Synthetic
atgagtgtcgaggacaacatcgcgtccgtgctggagatgaccaacaaaccccgcgaataccagcgcgagaagctcgaaagcctgctgacggagttccgcctgcaaaaggtgcgcaagaatctgggagaccagctatcgggtggtgaacgccgacggacggagattgcccgctgcctcgccatcgaccccaagttcatcatgctcgacgaaccgtttgccggtgtagaccccatcgccgtggaagacatccagcacatcgtctggcgtctgaaggacaagaacatcggtatcctcatcaccgaccacaacgtacaggagacactgtgcatcaccgaccgtgcctacctcttgtttgaaggaaaaatcctcttccaggggacgcccgaggaactggcagccaaccaagtggtgcgcgagaaatacctcagccagagcttcgtgctccgccgcaaggatttccagctccgggaagacaactgaaccacatcacgacacgggaggccgttcctcacagaaaggaagctccatcagtcccattttgtatacggaggcgcagagaatcccaagctctgcgcctctgccttttttgtaccgacgccgacagcctcagcagaaggcaggcaacttccgcctgaagactgccctgccctaccgaagggaatgtcccggacagcaaaaatcagaaagaaaccaaaatcacccgtccgcttgacaaaaacggcttaaacattcccttcagctaactcacactttgcaaaagtcgggcaaaccagcaagcaaacgctaacgaatgcaaacaaaaccgcccgaaaaagccttcgattttagaaaactatacacttcaattccggaatatgaacaaaacgcgcccggaacaatattgtttcgtgagccaaacaatattgtttgacgcgtcaaacacattagtttcatactccaaacactattgtttcgcccgcggaagtcaaacctttggaaaatggaagtaaaaagaagtgagtttcgttctctggaagaaggccggcgtcaacgaatcggaaggtaataaaaggaggggtaaaacggcgttatgaacagtcaaaggatacagttgccccatttcctccgtccccatgcaaccggaataagccatttgccgtcaatgtgtattttgcgaatcgcccgagaagggcctcggaatccacggaactgtattttggtgcgaggaaaggcactgtcgggcgcttcatttgacattttgacacttcggcatccggaggaagaaccgggcagtgtccgtacggatgcatgacggaaggcgaacgtactgcactccgacttacaggcacccaatatgttaattattggagggacggcgaaaaaagtggttgcatttattgccaattcaaataatatgcgttcctttgctgcgtaatggtgtaacatcaaagttacgagatttttattacatggtttttactcttcgcccgtcattctgacgcataggtaaactctctgtcattctaatcctttaattttattgcataccattgagagtccgtccggtcattgccggtcagtgaacggatgagctctgagagttttactatttattttatttaccattttattttcattatgaacatttatgtaggtaacctgaactatcgggttaaggagaatgagttgaaacaggctttgtcggagtttggtacagtggattccgtgaaaatcgtgaccgaccgcgaaaccggacgttccaaaggttttgctttcgtcgagatgcccaacgatgaagaggcttccaaagtgattgcccagctgaacggtgctgagtatgcaggccgtcaggtggtcatccgcgaggcgactccgcgtgctccccgcgaaccgcgtgaaccgcgcagacgtgaataaacccgacttccgccggtttccataaccggctccatggagtgacaaacaacagaagacgggtcggcatccgacaggagaaccgccccacccttcatgccataacagcggcaggacagattccccgacggaagggggttctgtgcctgccgctttgttttcaggcatccgtcttacgctgccctgaaaaaagcggaactgcaatttaatccattctctttttggggatttaaaagaataacgctaattttgcgcactcttatgattaataatgaggtaaagtcgcaataaaaatagtaatcattaaaaataaattgtcagaatgaacgtttcattagagaacattgacaaggtaagcgcactgcttacggtaaaattggaaaaagaagactacgaggcacgagttgagaaggccctgaaagacttccgcaaaaaggcaaacatgccgggtttccgtccgggtatggttccgatgggcttgatcaagaagcagtatggaactgccatcaaggctgaggaagtgaacaaagtgcttcaggaaaaggtttatgaatatctgaaagataacaaggtgaacatgttgggcgagccccttcccaatgaagagaagcaacccgccatcgactttgcaaaggacgaggctttcgaatttgtattcgacattgccctggctccggagttcgacgtcgtgcttgacaccaacgatgaaatcgactactataccatcgacgtaaacgacgagctggttgagcgtcaggtgaaaatgtacgcacagcgtggcggaaactacgagagcgtacaggagtacaccgaaggtgacatgctgaaaggtctgattgccgagctcgacgagaacaacaacgtgaaggaaggcggcatccaggttgagaacgccgtgatgatgcctacctatatgaagaacgacgagcagaaggctatctttgccaatgccaagaccaacgaggtgctggtgttcaacccgtcggttgcctttgacggcaacgaggctgaaatcgcttccttgctgaagattgagaaggatgccgttgccaacgtgaagggcaacttcagcttccaggtagaagaaatcacccacttcgttccgggcgaactcaaccaggagttgttcgacaacatcttcggcgaaggggtcgtgaagagcgaagaggagttccgcggcaaaatcaagagcgaactggaagagcagtttgtcaacgacagcaactacaagttcctcatcgacacccgcgaatacctgatgaagaaaatcggcaagctggaattcccggatgccatcctgaagcgcatcatgctgctcaacaaccaggagaagggcgaagctttcgtagccgagaactacgaccgcagcatcgaggagctgacctggcacctcatcaaggagaaactggttgctgccaacgaaatcaaggtcgacaacaacgacatcatggacatggcgaaggaggttacccgcatccagttcgcacagtacggcatgctgaacgtgcccgatgacatgctggacaactacgccaaggaaatgctcaagagaaaggacagcgtcgagcagctggttaaccgcagcgtagagtcgaagctggctaaggctctgaaagataaagtgaaactgaacaacaagactgtctctgtagaagacttcaacaagatgttcgaataagcagcttgttttgctaaatcttcctaaaagggaggcttttggtacgagttatattgtacatttgtgcgcaatatcggagagccagaagcctctcttttttgacccttaccgagcggttgccgcgctgcatgcccggcactccttaagggcctgaccctaactaattaagcaatgaatatgacagacgattttagaaagtacgccaccaaacatttgggaatgaacagtatggtactcgacgacgtcatcaagtcgcagggttatctcaatccgtacatcctcgaggaacgtcagctcaacgtgacccagctcgacgtgttctcccgcctgatgatggaccgcatcatcttcctgggcactcccatcgacgactataccgccaacaccttgcaggcacagttgctctatctcgactccgtcgacccgggcaaggacatctccatctacatcaactctcccggcggttcggtctacgccggtctgggcatctatgacaccatgcagttcatctccagcgacgtagccaccatctgtaccggtatggcagcctccatggcagccgttctgctggtagccggaaaagagggcaaacgttccgcgctgacccactcgcgcgtgatgatacaccagccgatgggcggtgcacagggacaagcgtcggacatcgagatcacggcccgcgaaatccagaagttgaaaaaggaactctacagcatcatcgccgaccactctcacaccgagtttgacaaagtgtgggcagactctgaccgcgactactggatgacagcccaggaagccaaagactacggcatgatcgacgaggtcctggcacgcaagaagtgaccccgtaactcaaggactcaaaaactaaaaacctaacaagacattggattcaaagaataaatcaaagagacattgtagcttctgcggacgtccggagagcgaagtcggctttctcatcaccggactggagggctgcatctgcaacgactgtgcagagcaggcccacgaaatcacccaggaggcaatgggcgaggtgatgaaaggacggctctcccgtctgaacctgaacgacctgcccaagcccaaagaaatcaaggaattcctcgaccagtatgtcatcgggcaggacgatgccaagcgctacctgtcggtgtcggtctacaaccattataaacgtctgcttcagaaagacgaaggcgacgatgtggaaatcgagaagtcgaacatcatcatggtgggcagcaccggtacgggcaagacactgctcgcccgcaccattgccaagctgcttcatgtccccttcaccatcgtcgacgccaccgtgctgaccgaagccggatacgtgggcgaggacatcgagagcatcctcacccgtctgcttcaggttgccgactacaatgtggcagaggctgaaagaggtatcgtgttcatcgacgaaatcgacaaaattgcgcgcaagggcgacaacccctccatcacccgcgatgtcagcggagaaggtgtgcagcaaggcctgctcaagctgttggaaggttcggtcgtgaatgttccgcctcagggtggacgcaagcaccccgaccagaagatgattccggtgaacacgaagaacatcctgttcatctgcggcggcgcgttcgacggcatcgagaagaagatagcccaacgcctgaacacccacgtggtcggttacggagcagtccagaacacgatgcacatcgacaaggagaacatgatccaatacattgccccgcaggacctgaaggccttcggactcatccccgaaatcatcggacgtctgccgattctgacctacctgaatccgctggaccgcaccgccctgcgaagcatcctgacggaaccgaaaaattcggtcatcaagcaatacatcaaactcttcgccatggacggtgtggagctgtccttcgagccggaagtgtttgagttcattgtcgacaaggccatcgagtacaaactcggcgcccgcggactgcgttccatcgtggaaaccatcatgatcgacaccatgtatgaggtgccctccaagcatgtcacggagttcaaggtgacactggactacgccaagcagcagttgggcaaggccaacctgtcgcgcctgcagaatgcctgaacgaggtcgggagccgaaaaagaggggacttattgcgtcggaacccgaaaatagtatcgaaataatttgtactttatagtaagttgtttataattttgttagtcattcatttcgatttattcaattaacgagaacaagcgatatggcggagaaaacagatttaacagcgcaactaaaaaagttctttggtttcgatacgtttaaaggagagcaggaagctattatccgcaacctcatggcgggtaatgacacgttcgtgctcatgcccaccggaggcggtaagtctttgtgctatcagcttccgtctttattgatggaggggacggctattgtaatctctcctctgatagccctgatgaaaaaccaggtggatgccatacggaacgtatgcgaagaagacggagtggcgcacttcatcaattcgtcgttgaccaaagctgccatcgaccaggtgaagagcgacatcctctccggcaagaccaagttgctgtatgtcgcccctgaatcgttgacgaaggaggagaacgtggagttcctcaaaggtgtcaaaatctcgttctatgccgtcgacgaagcacactgtatctcggagtggggacatgacttccgccccgaataccggcgcatccgccccatcatcaacgaaatcggcaacgcacccgtcattgccctcacggcaactgcaaccgacaaggtaagaagcgacatcaagaagagcctcggcatcgtcgatgccaaggagttcaagtcgtcgttcaaccgtccgaacctgtactacgaagtacgcccgaagaccaaaaacatagacaaggacatcatccgatatatcaaaaacaacagtggcaagtcgggcatcatctattgcctgagccggaagaaggtggaagagctcgccgaaatcctgcgtgccaacaacatcaacgcacgcgcctatcatgcaggcatggactctgccacccgttcagcgacccaggaccagttcctcatggaaaaggtcgacgtcatcgtggcgaccattgctttcggcatgggcatcgacaagcctgacgtgcgttatgtcatccactatgacatgccgaagagtcttgaagggtattatcaggagaccggacgcgccggacgcgacggtggagaaggccgatgcatcgctttttattcaaacaaggatctccagaaactggagaagtttatggaagggaaacctgtggcagaacaggacattggccgacagcttctgcaagaaacagctgcctatgccgaatcttccgtgtgccgccggaagctgctgctgcactacttcggcgaaacgtacaaggaagataattgtggaaattgtgacaattgtttaaaccctaagaaacaagtggaagctcaagatttattgtgtaccgtcattgaaacagttcttgccgtcaaggaaaagttcaaggcagaatatgtgattgacgtcattctcggaaaagaaacgacagaggtattagaccacaaacacgaagaactggaagtgtttggctccggcacgggcgaagaagacaagctctggaatgccgtaatccgccaggcactcattgccggatacctcagcaaggacgtggagaactacggactgctgaaggtgacggcggaaggaaagaaattcctgaaacacccgaaatcattcaagatagttgaagacaatgactttgaagaggaagaggaggagactcccgttcgcggaggtgcctcgtgcgctgtcgacccggcactctactccatgctgaaggacctgcgcaagaaactctcgaagaaactggaagtgccgccctacgtcatcttccaggacccgtcgctcgaagcgatggcaaccatctatcccgtcacactggaggagttgcagaacatcccgggtgtgggagccggaaaagccaaacgctacggttccgagttctgtgcactcatcaaacgccattgcgaggagaacgaaatcgaacgccccgaagacctgagagtccgcacggtcgccaacaaatcgaagctgaaggtgtccatcatccaaagcatcgaccgcaaagtggcgcttgacgacatcgccctggcaaagggtatcgagttcggcgaactgctcgacgaggtggaagccatcgtctactccggcacgaaactcaacatcgactatttcctggaggatgtgatggacgaagaccacgtggacgacatctacgactacttcaaggagtcgactaccgacagcctggaagtggcgatgaaggagctgggcgacgaatacaccgaagacgaaatacgcctggtgcgcatcaagttcatttcggaaatggccaattgattccatagacatatccggctcggaaagagccgtcggggacccccgctatgatgttgtaaatcatggcgggggtctctttatccgtgcaatcgggatgccgtggaaaagagtaaaaaaatataaaaaacgcacgacggtatttccgccgtaacggataaaacgtgtatatttgcacgcaataaattctaaagcttaaaagccctatgtcatttgttgcagataaaattgtgatggacggactgacgtatgatgacgttcttttgattccggcctattctgaagtattaccccgcaccgtcgaactcacgacgaaattctcacgtaacattactctgaacatcccctttgtgacagctgccatggacactgtgaccgaagccaagatggcgattgccattgcacgcgaaggtggcatcggtgtcatccacaagaacatgtccatcgaggaacaagcccgtcaggtagccatcgtgaaacgtgctgaaaacggtatgatttacgaccctgtgaccatcaagcgcggttcgaccgtacgcgacgcattgaacctgatggctgaatatcacatcggcggtattcccgtggtggacgacgaacgtcacctggtgggaatcgtgaccaaccgtgacctccgctttgaaaagaacatgaacaagagcatcgaggaagtgatgaccaaagagcatctcgtgaccacgactcaacagactgacatggaggctgccacacagattctgcaagagaacaaaatcgagaaactccccgttgtcgacaaggataacaaactggtgggcctgattacttacaaggatatcaccaaagccaaagacaaaccgatggcttgcaaggatgccaaaggccgtctgcgtgtagctgccggtgtcggcgtgaccaacgataccctcgaacgtatgcgtgcactggttaatgccggagcggatgccattgtcatcgacacggctcacggacactcgaagttcgtcatcgaaaaactgaaagaagcgaaacgcgagttccccaacatcgacatcgtagtgggcaacatcgctacggctgccgctgcacgtgccctggttgatgccggagcggatgcagtcaaagtgggcatcggtccgggttccatctgtacgacccgtgtcgtagccggtgtgggtgttccacagctgtctgcggtatacgatgtagccaaagagctggaaggcacaggtgttcccttgattgccgacggtggcttgcgctattcaggcgatgtcgtgaaggcgttggctgccggaggatactccgtgatgattggttcactggtagccggaacggaagagtcaccgggtgaaaccatcatcttcaacggacgtaagttcaagtcctaccgcggtatgggttcgttggaagcaatggagaacggttcgaaagaccgctatttccagagtggagagtccgacgtgaagaagcttgtccccgagggcattgccggacgtgtgccttacagaggcagtctctatgaggtcatctaccagctgattggtggtctgcgttccggtatgggttactgtggtgctgccaacatcgaacagctgcacaatgccaagtttacccgcatcaccaatgccggtgtgatggaaagccacccgcacgatgtgaccatcaccagcgaggctcccaactacagccgtccgcaataagccggcaagggctttcgtcatagcacaaacataacgcaacataataaatcgaaaagagggtgtgtcatccggcacatcctcttttcgattttatctccatacgttcgccccacaacgttccgaggacgtatccgaagcacaaaaaaagcccctccgaagaggggcgtaggagaaaactccttcggcatatagccttattgcgataagatgtagatcttatggcacaaatgtaacaactcattttgtcatatacaagtttattcctagttttatagacaacttttaatcacacaaccatgagtaaacgcatactaggaatcgatgtaggtaccaacagcctggggtgggctgtcgttgaccgcacaaactgtgacaattatacccttgtcaagagaggagatgtgatattccaagaaggagtaaacatcgaaaagggaaatattgaaaagtcaagagcttcagagcgcaccgggcatcggagcacccggaagcattatttcagaaggaggatgctgaaaataaaagtgctggagatacttgtcgaacatcagttatgcccctatctctcccacgaggaactgcaccagtggatgacgcgtaaggtctaccctactaacgaagacttccgcctgtggttacggaccaacgatgccaacgaccagaacccctatcatgacaggcatgtctgcctgcatgaacggctggacctccgtctgcaggagaaccggtacagactgggaagagcactctatcacctggcacaacgcaggggattcctcagcaaccgactggaacagaagagcaataccgatgaaaccggggctgtaaagtctgacatttcccaactgaacgaggaaatggaaaaagcaggttgccaatacctgggcgattatttctaccggctctatcaggaatgcggcaatcaagtcaccctgcgcgcccgatacaccgaccgaatacaacattatcagaaagagttcgaagccatctgccaaagacagcaactgggcgacgaacttgtcgacaagctgagaagagccatctacttccagcgtccgctgaaatcacagcgcgcaggtgtgggaaaatgtacctttgaaccggacaaaccgcgttgcgccctgtcccatccgcggtatgaggaattccgcatgctgtcttttctcaacaatgtcaaggtaaaaggtccgtcggatgacagcctgcgtccgttgagcccctcggaaaaggagaaaatcaagcctttgttcttacgcaagtcaaaagccaacttcgactttgaggatatagccaaggccatcgccggcaaaggcaaatatgcctgcatccgggacaaagagggagcacagaaaccctaccagttcaactatgcccttagtcaaggcgtcagcggatgcccggtcacggcaaagctgacagccgtcttcggagagtcttgggagcgcaacctcgtcaatgcctaccgcagccggaacgatacgcggaaatcggacgaggagattgtcaacgaagtttggaacgtattgtactcattctcatccaaagagaaactccgcgcatggggcatggagaaactgggactggacgaagcctgtgccggagaatttgccgacatcacactgccggcagcctttgctgcactcagcttgaaagccgtcaacaagatactgcctttcctgcgtcagggattcatctattcgcatgcagtgatgctggcaaacataccttatattataggtatggacaggtggaacgaccccaggcaacgtcagttcatcatggacaacctgcaagagctgttggataacttcactgcatccgacaaggcattgcaacagaccctggacttctgcatcaaggacttcctgctcaacaactacgaactggctccgggaaaagcagaccggctctaccacccctcaatgattgagacatacccggatgcaaaggcagacggacagggcatctaccaactgggctctcctgcaacaaacgccatacgcaacccgatggccatgcgctcgctacacatcctgcgaagggtcgtcaaccaactgcttaaagaaaagactattgactccgaaacggaagtccacattgaatatgcccgtgaattgaatgacgccaaccgacgttgggccatcaaccagtggcaacgtgaacaggaaacccgacgcaaagattatgccgagaagattcggaaagtttatgctgacgagttcggaaaagtcatcgaaccgacccaagaggagcttctgaaataccagctctgggaggagcagcagcacctgtgcctgtataccggggaacaaatcggactgacggatttcatcggccccaaccccagatatgacatcgagcacaccataccacaaagtatgggaggcgacagcacacggatgaacctgacgctgtgtgagcggacatacaaccgaacggtgaaaggcaacaggatgccgtcgcaactggcggaacatgaaagcatcctgacgcggataaaaccttggaaagacaaatacgaagagctgaccgtcaaaataaataaactccgtacgcatcccggcatggacaaagcatcgaaagacaacatcatccgcaaaaggcatctgctggaactggaacgtgactactggttccagaaataccagcgattcacgatgactgaagtccctgaagggttcagcctgagacaagggaccggtatcggattgattggcaaatatgcagggctgttcctgaaatcgctcttccaccatgtcaaagagcgcaaccggaaacaggtctacgtcatcaagggccccatcacggctgaattccgcagattgtggggactgcagaacctctacgaacagaagtcacgggacaaccatgcccaccattgcatcgacgcaatcgtcattgcctgcatcaatcctacggaatatgcacggatggcatcctactaccgacaggaagaagacttccgactgaacaagggaaacaaacctgtattcccaaaaccttgggctaccttcacacaggacctccaagcactggaagcagaacttctggtcgtacatgagacacggaacaacctgacaaagaagacccgtaagagagtccggacaaagggcggaaatgtcctgtcagaaagcgacagtgcacgcggaagcctgcacaatgacacctattatggagcaatccaaaaggatggcgtcataaggtatgtcgtgcgcaaagcgctgagctccttaagcgaaaaggacgtgaaagacattgtcgacaagactgtacgggagaaagtgcaggcggctatccaggaaaagggattaaaagaagcacttgccggcaccatctatatgaacgaggagaaaggcatcaccatcaaaaaggtaagatgcttcaccaaaatcgcctcaccactggctatacgcaggcaccgcgacgcttcagcgaaagagtacaagcggccctattatgtcacgaatgagtcgaactatgtcatgggaatttatgaagggtgcatcaagaaaaagaccaagcgtgaattcatcctggtaaataatctggaagccgtgcgacaactcaagacggcacgaaaacaaggcgtcgtcagctcgatactgcctcccgtaagtgcgaagtcgcaattccccttgaaatacaggttgtacacgggaactctggtgctgctctatgagaactctccggaagaaatcgatttcaccaatcaggcagacatctgcaaacggctttacaaagtcactggactgtcttccatgactgtaaccgggaatcagtatggcacaatccaactgagataccatcaggaagcccggcaggcaaaggacctaaaagcccagaatggagcctataaagagggtgaagaacatcgccccgtcattttcctgtaccatacacaatttaaagccctggttgaaggtaccgatttccgcatgaatatcttaggagagattgagcctctccgaaaataaccgggtttcgtgttgcgcatatccgagctcataaacaattcaataacctataaaacacaaatgccatgttaaaacgaagtctagtctttgaaaatcccgttatcttacggctgaaggataaacaacttgtcgtatcctttaaggaactgcctgatgaaaaacgtacgattcccatcgaagacataggcttcgttttaatcaatcaccccatggtatccatctcgatgcccctactgaatgagcttgcttccaacaatatagcagttgtattctgtgacgagaagggattgccacagtccatgttgctcaattttgattccaacctcacccaagggaagattatcagtgaacagctcgttgccggagaagtcttgaagaagaatttgtggaggcagattatagtctccaaaatcaagaaccaaagcctgcttctgaataagctgggacttgacggagagtctttgaagcccctgtacatgaatgtaaaatccggagacagcgacaataaagaaggtattgcagccagactgtatttcaagactttgttcggaaaggagttcacccgtgaccgtaatgccggtgggatcaatgccttcctgaattatggatatgccattttgcgggcagctacagtcagggcagctcttagttccggcttattccctgccctgggcatttttcatcatcacaggagcaatgcttttccattggctgatgatatcatggaaccattcagacccttcgtagacgaaatagtctatgacttgttccgacagaaccaatctgaacttaccaaagaaaataagggtaagctgatagcatccctgtattgtgacacctattacgaaaaagttacccgtccactttccgttggactttccatcacgatggcctctttggccaaatgctacatcaatgaacacaaaacactcaacttaccgtcggtcaaatgagcgaactaagacttaatgcatatcatatcatgtggttatttgtaatgtttgacctgccaaccacaaccaagaaagaacgaggattggcagccaagttccgaaaaagcctggaaaaagatggtttcacacgctttcaatacagcgtctacatccgcttctgcgggtctttggaaagttccaaagtccatatcaaacgggtaaaatcatgtgttccgcctaaaggctctgtaagcattttgtctgtcacagacaagcaatactccaacatcatcaacatttggggtgaaattgagaaaaaggcttatccggaaccacaacaactagaatttttttaatatttttgtttccaacaaagctcttcatttcgcaattgtatcgccattattgaacttaatcattgattatgaatcaaataaagcgcatacgttgcggtttgatgtagaatattgataaggaacaacatagttattaatcagcggagtgaatgcattcgttgcggtttgatgtagaatattgataaggaacaaccatggcttttcaagtaagattcagtttttagttgcggtttgatgtagaatattgataaggaacaactacatactctacacggtacaggatgttgtagttgcggtttgatgtagaatattgataaggaacaacctggatagcgaagaacggaatcgcggaaaagttgcggtttgatgtagaatattgataaggaacaacacgcaagcgagcgaaagcggcagtgtttagttgcggtttgatgtagaatattgataaggaacaacgtttgagccagcagaagcgacaccagcaagttgcggtttgatgtagaatattgataaggaacaacacgctacggcggcacaggctacgctgtctagttgcggtttgatgtagaatattgataaggaacaactcgttccatctatgttatgcagtaaatgcagttgcggtttgatgtagaatattgataaggaacaactcaaattcttgattcatcgcgacctgtcgcgttgcggtttgatgtagaatattgataaggaacaactaccccttttcgattcagcaatggactatcgttgcggtttgatgtagaatattgataaggaacaactcggcattttcgtaagatttcataattgtagttgcggtttgatgtagaatattgataaggaacaactatcccaatcccgttcggctaaccgtcggagttgcggtttgatgtagaatattgataaggaacaactaatgcaagtggaacatcaacctatgagtagttgcggtttgatgtagaatattgataaggaacaacttggcgagttcgccctggcacgcgaactgggttgcggtttgatgtagaatattgataaggaacaactcgtcggctgaacatcataggcatgttggtgttgcggtttgatgtagaatattgataaggaacaaccagtcgaagaccatcgagagcatcttcggagttgcggtttgatgtagaatattgataaggaacaacttgcgcggcttcggccttggcggcaatttcgttgcggtttgatgtagaatattgataaggaacaacaataaggaagcaacaatacgttaggcgtgggttgcggtttgatgtagaatattgataaggaacaaccggtagtaaaacagccaggggctggagtcgttgcggtttgatgtagaatattgataaggaacaactttatctagtacattagcattttcatctaagttgcggtttgatgtagaatattgataaggaacaacctcgtaatgccgtggacgctccgctctctagttgcggtttgatgtagaatattgataaggaacaacacattatttacaggtagtccggcgtcaaggttgcggtttgatgtagaatattgataaggaacaacttatcaattatcagagaacgttatccggagttgcggtttgatgtagaatattgataaggaacaactatatcatattcttatactctctacagtagttgcggtttgatgtagaatattgataaggaacaacaaggggttgcgcgccacacagaccgaccccgttgcggtttgatgtagaatattgataaggaacaacttgttttgattcgcgtttaaaatccacgtagttgcggtttgatgtagaatattgataaggaacaactctttcaaccgggatacctgattagaggctgttgcggtttgatgtagaatattgataaggaacaactgtcggtcaagcgtctgcgcgacgagtatgttgcggtttgatgtagaatattgataaggaacaactgacaccctccgagctcgagtggctcaggagttgcggtttgatgtagaatattgataaggaacaacccggggcaatgtcaataaactgaatcaatagttgcggtttgatgtagaatattgataaggaacaacgcaaggtgaatataaaagagttgtgactatgttgcggtttgatgtagaatattgataaggaacaacctatagataaatggtcagcggcggcccaacgttgcggtttgatgtagaatactgataaggaacaacgtcgcgacaaatcataaaggcggacgcgtggttgcggtttgatgtagaatattgataaggaacaactagctttacataccaatatgaacctaaagtatctacaaacgatgttattggctggcaaaacagtctatattttagacgattttgaagaagctgcagtacgtctcatttatgaagatgaagtcactaaggcttatctcaagcataaagggagaaaagaagttagtatacctcaatctaacaaaactgtgtgcgaaatcattcttgcaggcaaagagataacaaaatttgaatatgaaaaatacgaatgaatcgctacaaaagcacatgccggacaaactgaccagacagatactgcctgcatctcctccttccactacgccccaaagtgaagaggaagacggtcggatataaaaaatcccgctacaaccacaaaagccataacgggattatcttatccaggaacagtccggaagaggaaatgttcaccagcctacttctgacgtataaatatattgatgggagtaccgctcaacgaccagcgttcccgcatcttgttttccaagaaacggcggtaaggctccttcacatattgcggcaggtttgcaaaaaacacgaaggaaggtaccttggtgttgggcagctgcgtacaatacttgatcttaatatacttgcctttgatggaagggggcggataggcctcgataagaggcaacatttcctcattcaggcgagccgtagagatgcgtgtcgtacggttcttataaacctgttcggcagcctccagcaccttatagatacgctgtttggtgagagccgacgcgaaaataatgggaaagtcggtaaacggagccaaacggctgcgaatggcgttctcaaacgtcttcatcaccttatcgctcttgttttccaccaaatcccacttattgaccaccacaaccaaccccttctggttacgctgaatgagggagaatatgttcagatcttgtccttcgacaccgcgtgtagcatccaacatgaggatacacacatcggaattctctatggcacggatggaacgcatcaccgaatagtattccaaatcttccaccaccttgttcttccgacggattccggcagtatcaaccagatagaagtcgaaaccgaacttctcatagcgggtatagatggagtcacgggttgttccggcaatctcagtcacgatgttgcgttcttctccaatgaaggaattgataatggacgattttccggcattgggacgtcccaccaccgcaaaacgggggatttcgtcatccagcagctcaccggagtctttcttgaacttactgattaccaaatccagcaaatcgcccgtaccacttccgctaagagcagagatacaatgaggatcacccagcccgagcttgtaaaactcagctgcactatattgcaaatcattgttgtcagtcttattggccaccacgatcacgggcagcttggaacgccgcagaatagaggcaacctccatgtcgaggtcagtcaccccattgaccacatcgaccagaaacagcaccacgtccgcctcgtcgatggctatgattacctgcttgcgtatttcttcttcaaagatgtcgtcggaattgaccacccatcccccggtatccaccacggagaattcctgtccgttccattcgctttttccatattggcggtcgcgggtcgttccggcttcatcgttcacaatcgcctgccgtgtacgggtgaggcgattgaacagtgtcgactttcccacattgggacgtccgacaatcgctactaagtttcccataaataatttctctttactatgacgacttcacagtctgtcaggttgttattcaatccaggttgtaaccgaagtttttcaactccttatctgagctgcgccagtccttatccaccttgacaaaggtctccagatagatacttttgccgaagaatttctccagtgacttgcgtgcttctgtggctaccttcttcaaagcccgtccttgttttccaatgatgatgcccttctgcgactcccgttccacatagatgaccacattgatgtgaatagacttctcatcttccttaaactgctccacagccacttctacagcatacggaatctccttgtcataatacaggagaatcttctcacggatgatttcagtcacaaaaaagcgtgccggacgatcggtccattggtctttgtcaaaatagggaggagaatcgggaagcagctccttgatacgcttcatcaccgcatcgatattgaaacgggcggtagcggatatagggataatctccgctttgggaagcaaaccatgccactcctcgacaagatttgtcagagcatcctggttgctcaagtcaatcttgttgatcagcagcaaaacaggaacatccatcgcctgcaccttctggatgaagtcgagattcttatcaggcttctccacaacgtcagttacataaagcaacacatcggcatctttcagtgccgactcggagaagttgagcatggactcctgcaacttatagtttggcttaagcactcccggagtgtcagagaaaacaatctgcatctcatccgtattgataatacccatgatgcgatgccgggtcgtctgtgccttaaaagtggcgatggatatacgttcgccgaccagaaggttcatcagggtggatttccccacattggggtttcccacgatgtttacaaatcctgctttgtgcataaagtcttcagttggtttcgttcattataggacaaaagaagctgtttcaggaaaggatgggtttgtcatcatgcaaaaaagcacggacctcaaggatctcaccggtcgtcgaaacaaacttcccgctgtgtgtatccgtgaaatccgtgccttcgatattgcgtccttttgaaacagctctttgtcagtagaaaaacgtagttacttcttcacgttaccgtcgtaaccccatttcatataaacagctccgtaggtaaatccggctccgaaggctgtgaatatcaggttatcgcccttacgcaactggttctcataatcccacagacaaagggggagtgtaccgccgctggtatttccatagcgttggatattcaccatcactttctccatggggacctccagacggcttgctaccgcgtcgataatacgcaagtttgcctgatgggggataatccagttgatgctatccttgtcaaggccgttacgctcggcaatctcagccgtaatattcgacatgttcgaaacggcatatttgaataccgtacgtccttcctgataaagatagtgcatcttgttgcttaccgtaaaataagacgggggacatacggaacctccagccttcatgtgaaggaaaggcaagcccttgccatcggtacgcagaatgacatctttcacaccgaggtcttcagtcgtggcttccatcatgacagccgctgctccgtcaccgaagatgggacaagtggcgcggtcggaatagttcaccattgacgacatcttatcgccacccaccagaatgattttcttgtggcggcctgtagctatcagaccggctgcaacctcaagtccgtaaaggaacccgcagcatgcagctgagaggtcaaatgcaaaagcgttcttcaaaccgagcttgtcgcacaggattgaagcagtcgacggaaaatgataatcaggggtagtcgtgcagacaatcactgcatcaatgtcatcgggattggctccagtacgtttcatcaactgtttggcagccttacgacacaagtaagaagtacccaagccttcttcgctgaggatacgtctttccttcacaccgatgcgggtcataatccattcgtcattggtctcgaccatgcgcgacaactcatcgttcgtcagcacatattcgggaacataaccgccgactcctgtaattacagcatttattttttccatgtaactaaaaattctcgttataaaataaaagtagccggagagcagcactctctggctatattttataccgcctcgttagatagcggtttctttcacgattgccaacttacctctgtagtagccgcaagcgccacatactgtgtggtaaacgtgccatgctccgcagttcgggcaaatagccagcgtaggagctactgctttgtcgtgagttcttctcttagcagttctagtttttgattgtcttctcttaggatgtgccattgtttctaatacttttaattattatctattattttcttcaattcattccatcgcggatcaatatcttgcggagcttcagaagcatcgtcctcggggacttcggcctcggattcattccagccatcttcttcatcagcagaggtacgcaaatacttgttaagcttgcccatcatcgccttgttgcatttccccggcgcatgcacatgcttcatcggaatgctcaaagctatgaattcatacatgaaccatgccacattaatgatcccttcatcttccggtataattacgatatcaccatcttccgaataatcgcttcccagttttaccttgactacatcagatgaagagaccggttgatccatatcgtccaagcagcggtcacaggttacctgtacaaccccatcggtctgaaaggaaagatcataaattccaccggttttccttatgcgcaactggacgttgacttttcccttttggacttccggtccatcaatactttcaaagaaatgattgtccaacacaaactcacatgaatatgtgttttccttcattcccttcaggtcaatcttgtatgcatcaaactttcccatagttattgctaaaccagaacaatattatattcgggcgacaaagatacaaataaatctacttagattgctactaaagccagataaatctttagtttttagcttatattttcaagtaatgccccactggaaagggttattggaagcgctattccggacgcggcaagacctcaacccaatccccggcatatactaacgcaaaaagcctccgcaacactcatgctgcggaggctctgctttcaaaaacggcgactacctactctcccacttgcgcagtaccatcggcgtgacgaagcttaacttctctgttcggaatgggaagaggtggaaccttcgtgccatagtcacctgaataagttgatgttgtttacaaaccctttgtctgtcgtgcttgttgactttgtcttgacctgctctgtctgtcattcgtatctttgacagtcagaacccaagaaccaagcgtatcatccgacaccggaaggaagtttcgggcaattagtaatgctcggctgtgatgtcgccatctatacacctgcatcctatcaacgtcatcgtctgtgacgaccctcgtaaggaaatctaatcttgtggccggcttcgcacttagatgctttcagcgcttatccgatccagacgtggatacccggcggtgcgcctggcggcacaaccggtagaccagaggtctgtccaacacggtcctctcgtactagtgtcagagccacgcaaatttcctgcgcccacgatagatagagaccgaactgtctcacgacgttctgaacccagctcgcgtgccactttaatgggcgaacagcccaacccttgggaccttctccagccccaggatgtgacgagccgacatcgaggtgccaaaccactccgtcgatatgagctcttgggagggatcagcctgttatccccggagtaccttttatcctttgagcgatgtcccttccatacggaaacaccggatcactatgctctagtttcctacctgctcgacctgtctgtctcacagtcaagcgcccttatgccattacactctgcggacggttaccgatcgtcctgagggcacctttagaagcctccgttacgcttttggaggcgaccaccccagtcaaactacccaccaagcaatgtccgcgcgctgcgcgttagggaccagacaaatgaagggtcgtatttcaacagcggctccaccatgactggcgtcacagattcatagcctccgacctatcctacacatcacgtgcccggccccaatgctaagctatagtaaaggttcacggggtcttttcgtcccatcgcgggtaatcggcatcttcaccgatactacaatttcactgagctcacggttgagacagcgtccagatcattacaccattcgtgcaggtcggaacttacccgacaaggaatttcgctaccttaggaccgttatagttacggccgccgtttaccggggcttcaattcaatgcttcccttgcggtgacatctcctcttaaccttccggcaccgggcaggtgtcaggctgtatactgcttcttgcgaattcgcacagccctgtgtttttggtaaacagttgcctggaccgattctctgcgcctcacattgctgtgaggaccctttatcccgaagttacagggtcagtttgcctagttccttaaccgtgattcactcaagcgcc

SEQ ID NO: 1638 - DNA, 23678 bp, synthetic construct
  misc_feature 1..23678: note = Synthetic
  source 1..23678: mol_type = other DNA
tgtattaaactcaatttggcttgaagcttttaaaaagatcgctgcagccaacgaccttattgccaatgtggagaaaacaaaggatgatgcatttaaacgaggtgaaatggaacgtaagatgatttatggcgaagcattagccataagggctttcttgcatttcgatatgctcagattatttgctcctgctcctgttaacgatgatggacttacttatattccttatattgcaagtttccctgaaattcaagcaacgcataaacctgtaaaaacggtgttagacttggtgattgctgacttggagaaagctcgcgagttggtgaaaccttatgacttatcacctttaggaatgagcgctaatgcatcgggtaggtcgcgcttctataataatcttgaatatggaatggaaggctacggagcaacaggcgaccttgatgagttcttctttggacgtggctaccgattctcttattgggctataacgggaatgcttgcaagagcataccaatataagggtggctttgacgcatcgttctatgataaggctaaagtactggctcaagaagtgattgatgctaaatgtaccgatgctaaaggcgataatgcacattcaccatttaaacatgaagactttggaggattcgcttatgccgaagaccctgagcaaatggcaaatgtccgtatggttgagaacctgttatttggtatctatcgcgacaatgacgcagagcaaaagctctcgacattggagtctagtttcccacgtgagaagagatcaccaggtcagtataatttctttgctgtgaatgttgatggacaagacatcttcaaaactgtaagtggtgtggatgactcaaaagacgatattcgttgtgcaagactactttataagcctattaactcttatggtatattgctttctaccaaatggtatgttaaaacaagaaatcttgatgaaaggaaacgcacgttgaatatcttcccaatattgcgcacctccgaaatgagatatattattgccgaatcatacgcaagaagcaatgagtttgataaagcttacgaaatcttgaacgagatgcgtaggaacagaggtttatatagcagcgagctgtcaccgcagaccacattggaaggcttcttaaaagatctcgttcgcgaagggcaacgtgaatggattagcgagggccaattgttctacttgtacaaaaggctaaactttaatgtgaaacgcgaagatggtacttatgctcctttaaagaaagaagagtgcgtagtgccattgcctatcaacgaatcaagataaccccttaacactgtttggttatgaagaaattactttattatatccccatggctgcgttaactctgttgggagcatgtactgaagacgcgctgaaaacattcggggaagacagatatgtttatttcgagaagttctatcgcgatgcagatgctcctggaaaggagaaagcagactcgacaatggcttcattcttcttctacaacgacgatgttaacaccattgacgctttgttggaggtacatatggcaggaagagacctaacacacgatgaaacttttaaactaagggtggtgccagaagaaacaacggctaaacctgaagagtatgaaatacaggacgtgtatacattccgcgcgcgtaaggctcaacccgatgctactaatcgcaacgatactattgccattaaaatgcatcgttcaactaggttgaaagactttcctcatgggataaggctcatgcttgaactagtaccacaaggcgaattgcgattgggccaaagcgaaagagtaaaggcgctggttgtgcttacaaaagatgccatcaagcccaaatggtggaaagaagacatagaacgtgaccttttgggtacatattcgagcaagaagtataaactttttgtgacatatgtagatactaaactgcagttcaatcaagaactagtggataaatacacctccaaagcaatactattagtaagaaactttaagaggtggttggctgaacatccgagagaagccgttgaagaagatggcgtaactccaattacagtaaacgtatagtgtttcactaatagaaaggataaatattatgaagaagatcatatatttcatgatgtggctgtgcatacccttcttgacaggagcatgtttcagcgatgaaggaaactacgaatacgagtcaatcaaaccaccaacatggacgcgcgacttcatgagtagtccaatacaaatttcagttagagaaggaagacccattagaatagatggttcgaaatgctttaactggggaaagcttgattctttgcagcgaagcggagaagtgcgttatgaatggcgtttctacggaaaggtcttctgtgacgaactaaaggcagaaattccctatgacgagtttatgaaacgatgtggacttgatgaaattcctatctcttcattcgagcgaggcgattttgctatcattgaaaagtctactggcgtgagtttcaaggtactgacaactttttatttccatacgcagatagatgagagcgacttccttgtttactctgctaagtcgcctaacgaacctcatgttggtaaagttaatgtgatgcgcctagagtatgctcgcgatcctaaaacgggtggatataaaacggatttcgtgttgagcgatcgtcatttctcgtcagatttacctggaacgcctaagcaattagacctttctgcagcaaagaatgtcagcctcattggctcggcaacggctattactgaagagggtgatgcttacgttctcaatgcagccaatctgcaaaaggtttgggacttgagttctcaattcgatgaaggtattcccgacaactttaaggttagcgcgcgtaaggaccaagaaggtggtggaacagaatcgcaagcctttacttgggttgcaactaaagacggacgtgtgtttactcgtcagtttggaaaacactatttaggtggaaagttcctcagcgaaccttattatcttgactcgcttggctacaagattacgatgttcggacatacctgctggggtattacaaacattccttgttacgacgaaaagaataaacgtgtgcttgtagctactagcttacaacataatgcttacggctcttatcgtagctatatcactgtactgaaatcagaaggatggactggaacgcctgtgatgaagatgccaaacgatacggaagtgttctatctcacacagatgaatggcgaccagtattgggacaataaccaaaatagctggttccaaatttacttcaatacagcagggcagtcggttgttggtacattctctgtaaccaatcgtgggcgacagttgaatatgaccaactcatattcttatccctatccagttacaggtcacttgtttaataaggaaacagtgttcctcacagcagctggtacacgcctcactggaagtagttccaaaacctatatcgatcttttctctgaaggtaatgaagtgtacggtatcaaacgtagtggtttgatgtggcctggacagttcgattatgagataataaaacttcctttaaaaggtattacttcgaagattaccagtatgacctataaccgcgatgacctatttactacatcgaattatcagcatctagtgattggttgcgagaatggagacatcttggtttatgatgctgatgaacttcaaaatcctacattaaagaagaaattgaatgttggcggtaaggttgtttcgattaaacaattaggccttatccgagcttcagtagacatgtattaaaaaaacaactacagcagctgcccttaccacaagggtggggcagctgcacaaacaaatatagataaaatgcaaaatatgatggtttttaaaagaactgccggcgcatttttgatgctattagctggcgcgtttacactgcaagcgcagaatgacaaagtgaacctcaacattagcgtggccaataaaggcggcgcacccactatcacgcttaagaagtcggccgaatgccaagcttattgtcttgccttgttcacatcagacatcgctggcatcatcaaagatgaagtggttgacggatatttcaccggacaaaagaagccccactacaccgataatgctaaggataagaaactggtggattatggattggtggttgttcccgaaaaagaatacaccctcatcgccctcggttatggcaaggatggaaagccaggtaaggtagttcgtacacagtttgttgctcctcgcaggcaaggtttctcttcggcgcaagtgttggcacaggttatcaacctcggacccgacagcgttacggtgaagttcacacccaataccgatgtggctggctatgcactttgccagtttgaaggaggaactatcgaacaaaccgtgaaagaacacggaccaatgatgggcttctctaatgcttacgatatgattaagcaatttagtggaaaagattataccaccgaaaagcaacacacttggcgcgaaatggtgccagatgctaactatgagatttgtgtgttggcatgggataaaaatggtgtattccaagaaattactaaggttcctgttacaaccaagaagcttggcggacctggtgatgccactgtagaaattaagattggtgaatttggtggtagcaagaagggtggttatttccaagatgttacttacactcctaacgaccaagctgctttgcatcgcgacatcatcatcaccgaagaggctttcaataaggccgacatgggtaattttggcgtaatcaagatgttgcaaaccgaccatcccaaagatatctactggaaccaataccgtgtagacagagctagatggaacgccactccactcaccacctactacgcttgctctattgccaagaacgtagacggcaagtggggagaactcaaaaaggtgaagtttaccacacctgcagctaaagaataaaacaaactctttgcactagcttctggctatcatgtaatattcagttggcgggttttgcttatgcctcgtcgttggtataaaaccacaccaaaggcattcgcaaaatagttcaccaaggcctactatgcctataaacttagtgatgaaccaccaattcaacagaatggagtggggcggccaaccttcattggccacccaataactaatgatactcgtatttagttgatggtaggatgataccgcacccggtgtgttttactcctccatacgcatgtcgcactatccaacttaacataatcttaggggtgtttcctaataagataagccccataaccttgcgaatgcggagtgagaaaacatccggggcggctctgctaggatgctatttgcaacagtggcacgttttacgctgtctaaaaacctaaaccacttatcgaaacaaaatgaataacttgaagacaattctatctggttgggcttttttagccctgcttttacccactagcttgtgtgggcaaaacgctaatcaggccccgcctatccccgttgatacagctgtgaggattggtacgctgcccaacggattgacgtattacatacgccataacaattggcccgaacatcgagccgacttctatattgcccaaaaggtgggctctatacaggaagaagagagccaaagaggtttggcccacttcctagaacacatgtgctttaatggaacgaagcatttccctggcaacgaacttattcgctacttggagacgcttggtgtgaagtttggtggcgacctcaatgcttacacctctatcgaccaaaccgtttacaatatttctaacgtgcccacaatgcgccaatcagcactcgactcgtgtttgctgattctaagcgactgggctaacgcacttacgctcgaccctgccgagattgataaggaacgcggagtgatacacgaagagtggcgcgaacgcaccgggcctaacatgcgaatgctcgaacgcaatctacttaaattatattcgggaagcaaatacggtgctcgcttccctataggactgatgagtgtggtagacaacttcaaacctaaagagttgcgcgactactacgagaaatggtatcatccatctaatcaaggcatcatcgttgttggtgatgttgatgtggcacacaccgaagccatgattaaaaagcttttcggccccttaaagaaccccgaaaaccaggctaagattgaagatgtggctgtgcctgataacgaagaacccatcattgtggtggataaagaccgcgaacagcaaagcagtgctgtggaggtgtcgttcaagcacgaggtttggcccgattcaaagaaggctaatgttgattatcttcttgccaattatgccaagaatatggctctaggtatgctcaacgaccgttatgccgaggctgtacaaaagtcggccgattgcccttatcttggcgcttcggctgccgatggcaactttatctttgccaaaacgaagggggctttcaccatcagtgccacaccacgcgacatggctgggtcggctgctgcattgcaagctgcattggttgaggctcaccgagctgccaaatacggatttactcaaggcgaatacgatcgcgctaaggccaacttgctcagtgctttagaaaaggcttataatggccgagataaacgcggaaacgcctcttttgccgacgactacaaaggtcatttcctttcgcaagagcccattcccgccttcgaagactattatgagataatgaagcagttggtacccaacatccccttggccgacatcaatagcatccttcctcagttgttgcccaataacgaccgcaacatggttatcgtaagtttcaacaacgaacaagaaggtaatgtttatcccacacccgaatcgctgctcgcagctgtacatgctgctcgtagcaccaaggttgaaccctatgttgataccgtaaaagagaaaccattgatgacgaagttgcctcgtcctggcaagattgttaaggaaaagaagaatgccgaactgggttacaccgaactcaaactctctaatggggtaacggttatcctgaagaaaaccgactttaagaaagaccaagttaactttgccgcaagtggtcatggtggtaaatcactctatggagctaaggattataccaacttggctgtgttcaacgacattgtcgcaattagtggacttggtggttttagcaacatggaattgcccaaaattcttgctggtaagattgccaatgctggtctgtctatgggcgataagtatatgggcatgtcgggtggctcgtctaaacgcgatgtagaaacgatgctgcagctggcacatctctacctctctggccacatcaccaaagacgcacaatcgttctcggcactcatggattcgtggcgcacggctctcaagaaccgttctttaaatcacgacatcgctttcaacgattcgctcgtgtctaccgtttacggccataacccacgcttgttgcccgtattggaaaaagatttacccgacatcaattacgaccgcattctgcaaatagcacgcgaacgcactgataatgcagccgcatggaccttcagtttcattggcgacttcgacgaaccgctgctgcgtaagctcatttgccgttatctaggctcgttgcccactaagggtaaggtggttaaaggccatctcaccagttcgtttgtcaaaggaaaaattgagaatgtgttccgtcgcaagatggaaacgcctaaggcaatggcctgtgtgatgtggcataccaccgatgttccttactctgtagaaaacgctgtacgcatgaatatgattggtcagatactttcgatggtctacctaaaaaccatccgcgaagatgcatctgctgcttattcggtatcggctgaaggtggagcaaccatcgatggcgactatcacgactactcggtgctagttacttgcccagtgaaacccgagaaaagcgacaccgcaatgaccatcatctatcgcgaagctgataacatgactcgcacctgcgacgcagctatgctcgacaaggtgaaagagtatatgctcaagagtgtggctagcgccgaaaaaaccaatgcttattggagtggcgttatcaacatgtatcgccgtcatggcatcaacatgcacacacgctatcgcgacatgattaagcaacagacgcccgaaaaactctgtgcgctgatgaagcaaatacttcaaagtggcaaccgcatcacggttgagatgctgccacaagaataaagggttgaagctgaatggttaaatagaagctgttgagaggtgaaagggcgctgggtgagaagatgaaaaggtgcacacaccagtaatggcctatgcttaaaggcggtgaatcaatataatacgatggggttagcgaaccccttaaatcacccgccctcacgctcatgaagcgtggagcaagcatattttcacctttatctccttgctcttctgcctctcattcacagattctacatgtctttacagctattaagtgaaatatagaataatattaaaatgtttgtgatttaatggtttgatgaattaatggaacaggaaactggttcgcgatgaataggttgcgcagagaagctgagaggggaaggttggtcttcatgccccttttgtttgggcagaatcccctcttttccacttctctgctccattaattccaactacagtctttgcactgatagttgttggcttgtggacttagcatgtaaacgctagtcccaaccgcccaaccaccaatggtcttggcttgtagccgctgagcggttgccctgtctagagcacttaattggaaaggtaaatgggtgagaaaataggaaagctgaaaacttctagctgtcgcgtgtatggcaatagcctagcgcctatgtttgttttcaactttcctattttttccaactcgttctaaaactggtcttttagtacagttttcagttctagtcttaattggtgttgcttattttttagggggagaatgattagctatctaccccaacatacaagtaagtggcgccagattaagcccaacacatcgaagcactaagccccaaagaagcgccccacacactgcgtgcgcaacttttatagccagtcttcgcactttgtctttcccagtctttgctctaataaaaatatcagacgctacgtttggagaagtgagtatgataagagagagaattaaaaaatatagcatcatgctcctcttctcttcacgtagcgcttttttctttgttttatggcttaacggtgtacattcgccagccgtctccgctaaaaattgttcttcaatagtcccatttgccgtttggcttgtcctgcccaatgagcattatcattggattcaacgctttgttcaacttgcaaaatgtcagcaagaagggggctatccattaaatttccagcataatgtgtgccaaccatgttgaaaaagcagtaggtttagccttattgccgctaccacccattttgtttatgcgtcgcatttcgtgcctgtacagcgcacatttgccctatcataccatgacttttaacgttatacatcccgaattattgtttccattagatttttttcaaagcaaaatgagtgcttcagcaattgtttctcctcacaaataagtgtgattatatggccgccttcacacatgcatgccagccatgaagttttgcgcccatcggtatatagttcgctctgtgtcgagttttgtctgcttttatgcgtttttatgttgtctaacgatagtttatgtaacgtttcgcagtacttctttcttaagttttacataaaaaaagcccctccgaagaggggcaatagggtcaaggcccttcggcatatagccttattgtgataagatgtagaatatatcttatggttgcaaaagtaaaaagaatatttgttttaaccaaatttttacagtaaatttacgcctatattttgtgtaaaaacaaacgataaaaacaatcaacttaaccccatttggttatgaaaacaaaaatattaggcctagatacgggcacaaatagtttagcttgggctgtggtagaacgcgatgagaacggcaaatacagccttttgaagtatggcgataccatctttaccgaaggagtaaagatagaaaaaggaattgaatcgtctaaagctgccgagcgaacggggcacaaagctttgcgtgtgcattattatagacggcgactacgcaaaattgagacgcttaaagcgcttgtgcaacttaacttatgtccttatctttctggagagcaacttgccgaatggaaacggaaaaagacttatccactcatgtccgactttatgctttggcagcgttcgggtagtgctttagaggataatccttatttttgtaggcacatatgtttaacgcagaagcttgatctggccgaccaagggcaacgtttcctccttggaagggcaatgtatcatctggcgcaacgtcgtggatttcttagcaacaggctcgacactagtgccgattccgaggattcgggaaaggttaaatcgggcattgctcagctttctgttgagatggaaaaggccggttgtcattatctaggcgagtatttttatcaactctacaagcaacacggcaacaccgtgaggctaagaagccgatataccgatagggaagaacattatcaaaaggagttctttgccatctgcgaaaaacaagaactggatgcccaatgggttgaaaccctgcaaagggccttgtatttccaacgcccgttaaagtcgcaacgcaagggtgtgggtatgtgtacgttcgaacccaagaagcatcgttgtgctgagtcgcaccccgattacgaagcgttcagaatgctctgcttcatcaataacgtcaagatacgaacccctaaagacgtttcgttgcgcccgctaaacgctgaagaacgcgaaacgatttggccactgtttttcagaaagtctaagcccaactttgattttgaggacattgcaaagacattggcaggaaaaaacaactacgcttggtttgatgaatcatgcgaaaagccatacagatttaactaccgcatgcaccaaggcgtgtcgggctgtcccgtaacagcacagttaatagacatcttcggaagcgattggaaggctggcattgccgaaacatacacggccgttggaaagaagaacggcacaaagaccatagacgaaatggcagatgatgcatggaacgtgcttcattcattctcgtcgaaagacaagttaaaggctttcgccaccgagaagttgcaactcgatgaagcctgtgccacgaagtttgccaatgcaaaacttccgcatggctttgccgcgttaagccttaaagccattcgcaacattctgcctttcttacgccaaggcttcatctacgcccacgccgtactcttggccaagatacccgacattgtttcaaacgccgtttgggatgatgctcacaaacgcgagcagatactttccgggctgctggagattatcgaaaactataaccccaaagactgtggcgtagagggtacgatagacttctgcatcaaaagtcacttgcaagatgtgatcgacctgcgtccaggtgcagccgatgcgctttatcatccctcgatgatagaaacctatcccgatgcgaagccgaacgccgaaggtaaattacagttaggtagtccgcgcaccaactctattcgaaaccccatggccatgcgctcgctgcacgtgttgcgcagtgtggttaaccaattgttgcgcgatggtattattgacagaaacaccgaagttcatgtggaatatgctcgcgaactgaatgatgccaataagcgaaaggcaatagccgattatcaaaaggatattgaacgcaaacgtgcggattatcgcaaacgcattattgaactgtataaagacgaatgccacaaagagatagaacccaccgacacagacattcttaaatttcaactatgggaagaacaaaaccacaagtgcctatacacagacagcgagattggcatctgcgattttctaggtgataatccgaagttcgacatcgagcataccatccctcgaagtgttggtggtgacagcacacaaatgaatctaacgctctgcgatgccaagtttaataggcaggaaaagggtgctaaattgcccgtacagcttagcaatcacgacgatatattggttagaatttctccttggaatgataagtgcgatgaactacgaaagcagatagataggatacgtacttttagtgggatggagaaggggatgaaagaccggttgatacaaaagcggcatcggctgaagatggagttagattattggcaaggtaaatacaataggtttacgatgaccgaggtgcccgaaggctttagtcgccgtcaaggtgcaggcattggtttgatttcaaagtatgcggggttgttcttaaagtctctcttccacaacgaacaaaatcccaacaagagcaatgtctacgtagtgaaaggcataacaacagccgagtttaggcggatgtggggattgcaaggcgagtacgaaaagaaatcgcgcgttaatcactgccatcattgcatagatgctatcaccattgcatgtataggtaaaggcgagtacgataggatggcgcaatactatcacatcgaggaactttacaattggcatggttcaacatctaagcctcattttgataaaccttggcccaaattcgctgaagatgtattggatatagaacattcgttgttggtgaagcatctcaccaacgataacatgcctaagcaggccaaaaagcacgtgcgtacagctaagggtaaatatcttgctcaaggcgacactgccagaggttcgctacataaagacacttattatggtgcaatcgagcaagaaggcgagatacgctatgtgttgcgtaagtctttaagcgactttgatagtgaatcggaacttgaaaatatagtagaccaagccgttaaggagaagataaaggtggctgttgctggtaagaactttaaggcagccattgccgagcccatatttatgaataaggaaaagggtataaggataaataaggtgaggtgctatgctgacagtgttaagaatccgctacatatacgtcaacaacgtgatttgtcggataaagaatataagcaacaatttcatgtggttaacgatagcaactatatgttggcgatttatgaaggggaagttaagggtaaggtgaaacgcgattttgtgcttgttaataatatcactgcggcatcgttcttcaagcggagtaatcgtagaaagaatgctgaaacgcttgtacctaaaacaagcccgaaaggtaatttgcctttacttgttatattgaaaataggtatgcaagttcttctttatgagaaatcgtcagaagagataaagtttgacaaaccacacgatttggtaaaacgtttgtataaagttgtcggacttagcatagacggtagttgtattatgattgatctaagatacaatcaagaagctaggcaagccaaagatgtaaaacccaagaaaggtgcgtatatggaaaacgaacagtttagaccttgcataagacttaggcacacgcagtttaaggcacttgttgagggcatcgactttgagtttaacattcttggcgagattaaaaagaaagataaccatgcttaaaagaagtctcgtttttacttcgcccgcaactctgtcgttgaagaatgcacaactggtgataactttaaaggaacagcccgatgcttgtcggactgttcccattgaagaacttggagttgtgttggtggatagccccatggtaagcctaaccatacctttgataaacgctttggccgacgagaatgttgcccttatcttttgcgaccagaaaggtatgcctaacgcccttacacttagcctacatgccaacgccagtcaaggcgaaagttatcgcgaacaagtatctgcaagcgaaacgttgaagaaagtactatggaaacaacttattgaggcgaagattagaaatcaagcgcgtttgcttagcaaacaaggcaaacggggagaactgttaaagccactttatatgaacgtgaaaagtggcgatgcagataataaggaaggtgtggctgctaaactgtattggaccgaattgtttggtaaagacttccggcgcgaccgcgacctgcctggtctcaacatcctactaaactatggctatgccgttttgcgtgccgccaccgcacgcgctttgatggcttcgggtttacatcccgccttcggtctgtttcaccgtaatcggggagatgctttccccttggccgacgatgtgatggaaccctaccgtccttttgttgatgaaatagtatataagctagctgcagaacaagcacttagcctcgataaaacaacgaaaggtagtttaatcaccatgttgttttgtgatgtgcaaatgtccaaagttgttcgtccgctcagtgtagcattaaccatgacaactgcatccttagagaagtgcttttcgaaagagattgataaactgcaattgccgatttttcaatgacctacgaacgtttaaatcactaccatattatgtggctttttctcatgttcgaccttccaacgtccactcaaaaagaacgtaaagaagctacgcgctttagaaaagatcttgaacgcgatggctttaccaagtatcaatttagtgtatacgtgcgttattgcggatcctatgagagtatgaatgtacacataaagcgaattaaatcgtttgctcctagcaagggatttataagtatattgtctgtaacagataagcaatattccagcattgttaatgtatggggtgagatagaaacaaataaacacccaaaacccatccagttagaatttttttaataactttgcatcacaaagctatatctttccacttcgtgtgattatgttacataaacaaatttccttaatatcagtgatttaagtgatacacgttgtggtttgatgtagaataacgatataatgcaacccaagccccacgcgtgccgtgttgatgtagttgtggtttgatgtagaataacgatataatgcaactattctacccctgcaatgatgggaagtacagttgtggtttgatgtagaataacgatataatgcaactaatcagcaaggcgatagccatcgattgcggttgtggtttgatgtagaataacgatataatgcaacatagcagttgaaaaatctgtaggatatattgttgtggtttgatgtagaataacgatataatgcaacatcttcaacgcattctttgacgaggtatcagttgtggtttgatgtagaataacgatataatgcaacattgtatgttttttcgtcaccattgcgtgcgttgtggtttgatgtagaataacgatataatgcaacttggcaatgcgacaaaacattcgttattgagttgtggtttgatgtagaataacgatataatgcaactctgcgcgctttacttctgcatcggctgcggttgtggtttgatgtagaataacgatataatgcaacttcaactactctgatagggtttcgcactaggttgtggtttgatgtagaataacgatataatgcaactttggatggagaagtacagcgaagaaacaggttgtggtttgatgtagaataacgatataatgcaacaattgcgtgttcctttaattctctcgtgggttgtggtttgatgtagaataacgatataatgcaactaatgaagtggcagcatatagacttagagggttgtggtttgatgtagaataacgatataatgcaactttgcgagcattgtctgaatacggaataagttgtggtttgatgtagaataacgatataatgcaactaaatttttattaactacaatagcaagcctgttgtggtttgatgtagaataacgatataatgcaacttacaatgatgttactttttggagtaataagttgtggtttgatgtagaataacgatataatgcaacctcatgatgtctttaattgaggtgcgaaacgttgtggtttgatgtagaataacgatataatgcaacttaagaacgacagcggcgcgagtggcggcagttgtggtttgatgtagaataacgatataatgcaactaaattgtttatcattattagcccacgtcagttgtggtttgatgtagaataacgatataatgcaacgcggttgcctgtgttggttgcagcggagtggttgtggtttgatgtagaataacgatataatgcaacacagttgcgctttcctccaactctctcgtggttgtggtttgatgtagaataacgatataatgcaacgcgttgttcgcggtattcgggctgctgatagttgtggtttgatgtagaataacgatataatgcaaccggcgaccgcgagaacttcatgcgcctctgttgtggtttgatgtagaataacgatataatgcaacgattccttgtaaacgtgatttataactgctgttgtggtttgatgtagaataacgatataatgcaacccaatcgccgtcaactcctacaaacctatcgttgtggtttgatgtagaataacgatataatgcaacgcgaaatagttctccatgtaagcgcgttggttgtggtttgatgtagaataacgatataatgcaacgcgagtttttttggggggctgaacattcaggttgtggtttgatgtagaataacgatataatgcaacaggtttgtgagaatggttttcatgcctgcggttgtggtttgatgtagaataacgatataatgcaacccatttcctacaatttcctacaccggcctagttgtggtttgatgtagaataacgatataatgcaacgcatccaagcgaacaatgaagcattgggtagttgtggtttgatgtagaataacgatataatgcaacaggtttgtgagaatggttttcatgcctgcggttgtggtttgatgtagaataacgatataatgcaacaacgaacgcgaacagaaaatgtgtctggcagttgtggtttgatgtagaataacgatataatgcaacctacgctttagaagagaggaacagctacttttagtgcgacgtgataacgcttatgccaactcattataaattgcaattacaattattgctgtccggtaaaaataaactgaaagctctgtatccctttatccatcggtgttgcagccgttttacttatccatgggcttggttttcagttttaaactgtaagcattataaaatgtgcttattttgacaaggaaagccctataataaccaaataaattaatgaaatcataagtttaagcctattttatctaacacagataactcccaaaagttttatcggacaccaataaattacaatcgtatttaatgcagcatggtgatgtgtttttaaacgaaaataggatagcacccatagtccacaccacaatagagaatggtgcaaggtaggggttgtgccttatcaaacacaagggaatagtgttgatggcgcaaaccaatttttcgtgtttatgatgttaaaagagtaataaaagtttacaaaacacacccctcggctcatcgcattctagagaaaatagatgctcaaaagcatgaatttaggccgttttttagccctctttactttatttttacattcgctttctgcaaaatatcggcattttgcaccatttaggctttctatttgctcgattgctctcgatttttcaccgtccgaaaatgggtttcagtcgctaaaatactacttttttaagtcgtttttacctgtaaaagacgcattttttagttgtttcgacgaccataaaatgctgtcttatccgtaaaatgcaccattttaccttgcgttttgtaggagttagcactgcgtttagcacgagttagcactgcatttagcacgagttagcactgcgttttgcatgagttagcactgcattttgctacaaatagcacaaattttagcgctaaacaccgtttatttcatcaaaaattcgctttatttgcaatgggtggcgaagtggtttttgggttaagcaaacccctcgcgagaatcgattatttgccaccgagtgactagttggtgagaaaaaagccactcataatgttaaattttctgccgaatattttacagtttaagtatgtgtactttcttaaacttcaaccgatggccataccgctttttgcatgttttatcttgttttcattgcttccacgtcatttttcgtttgcttgtcggcatcctgcttgttttattcttttgatgtaccgcattacgctttcaagaaaatcacaggttattccccatcaacaagcgcgccattgtagctgagcattagttgtttgagcaatcgcttagtgccgaatgttttctaaatgctgcacaatcgcattttgagcgttcattagcaacgagcgtctaacccaaaagcgtggggcaaagacctaaaaaataagtccggcaacatcgctgctgtcggacttcaggaaaactaattctaccaaataaaaactaaatatcaatcaaactaaacattactagtgttatgtgtcgctactctattgagagcgtatttcttagccatggcaatgcgcaagcaagcttggcattgcccaatggcacaactaaaaccatttaaattatgaccatcagccttagccaatctcaatgtttctaaactgcttttgttcttccttcaccaccttgggtaagtcaacagtcagcacaccatcgtttacacgggctgcgatagcttcgcgattaacgtcgtcgggtaggacaagtgtctgttcatatttagaatagctaaactcccttcgtaggtaatgcgttttttcgttctcgttggtttcctcgcgtttttgttccaatttgatgttcaggttgccgtcttcgttcacgttaacactgaaatcttctttctttaatccaggtgcagcaagttcaacggtatattgtttatcgttctccaatacattgatagcaggagccgttgcgttggttcgaggcatgaagttggtgtttaaaaagtcgtcgaacacttcgggcaaccacgaatttcttctcattactggtaacataatcatatctcctatctttataagttgttgtttgtaattttcgttttatgtcttagccttggctttgccttggcttcacaagcctatacacaagtttcgtaccaacgaaataatatacgccaaattggcaaaacgatgtgacaaaatggcaaaccgttgtattcgttattgcttgtttatagccgttatgtgtttatctataatcagttatgctgtttaggctgctaagtggcaaatataattatggtttagggcaaacacaatgggcgaagatgtgtgaggcatgttgcgagtttaagttggcgttgtatttttttatcattgcgattaaccccctttcgctcatttacaagcccacaagtttacaaccataaccatgtttagcccttgcaaaagcaataaataggcttttcgttttttcacctttattatcatcctagtcacttacgaactcaaaaaaaatacttatctttgtccacgataactaaaatatagctctgcataagggcctagccgtgaggcattcccccacttaataaatatgccaagaagcacacgctaacaatcttaacagcaattttttacacaataataataggtatcaagatgttaattacaacaactcccaccatcgaagggcgtcccatacaagcgtataagggcgtagttacaggcgaaacgattgtaggcgccaatgtatttaaagattttttggctggcatacgcgatattatcggtggtcgtagtggctcttacgagaaagttttgcgcgaagccaaagacacatctctagccgagatgcaacagcgagcagcagaattgggagccaatgccattgttggtgttgatatagactacgaaacagtgggccaaaatagttcgatgctcatggtggctgttagcggtacagcggtggtaatctaagtattatcacgttagggccacattttcatataccttcgttgcatgttagttcatctttgtagcacaaaataggggtggcaatgtgctaatcatgaaaccaaaggctaaaaataacggcacccaacaagacgttggagtcgagataaaagcccattctaaccacgaaaattaactaaaaacaataacaactatcaatgacttgtttatcgcaaattaaaagtaagaagccatttggccgtggtctacgcgcttcgcgccaatcccttgcatgggcaatagcctgtctttgcttgtttaacacggccgatgccatggccgagagtcatgcatcgaggcacgacaacagcaaaacagccgtactggcacaagataataaggccacaattacgggcacagtgaccgacggaaacggcgaaccactggtgggagcaagcatcttggccaagggtaaaaacgaaaatgcagtgaccgatatcgacggtcggtttgccattaatgttccaattggtacaatgctcactgtgtcgtatatcggtatggaggctaaagaagtggtggcccagcgcacaatgagcatcgtgatgagcgacaatgtgaaggatctcgaagacctagtggtggtgggttatggcgtgatgaagaagaaagacctcacgggaagtattgcctctgtgggtgcaacagacatcgccaacgcacatgccaccagcctttctacggccttgcagggtgcagcagcaggacttactgttacgcgcaacaacggaacacccgacggcaagccctcgttgctggtgcgtggcgttacaaccatcagcgataccagtccgctagtgattatcgacggcgtacctggcgacatcgccaacgctaaccccgacgacgtggagacactctctgtgctcaaagatgcagcatcggcagccatctatggttcgcgtgcagcagccggtgttatactcatcaccaccaaacgagccaagaacaatgagataagtcttaactactcgtttgagcaggcttacaccaagcccaccgttttgcccaagtatgtgggttggaaacgttttatgcaaatggtaaacgaaacacattacaacgacaaccctacaggtggcgaatatcaaacctatgccaaagacctgatagacaattacgaacgtaacaacgctaccgaccccgacaagtatcccatcacgcaatgggaagactatttgtttaaaaacacggcctcgcagcaaacccattcgctcagcatcatgggtggtggcaagaacgttcgcaccaagttgtcgttgcgctacgataaaaacgccggtttatatgccaatcgcaattttgaaagatatatcgcccgactgaacaacgacctggatatcaacccttatattgaggcacatgttgatgccaattttgcttataccaagttggcaacaccacataacaacccctttgaaagtggggcacgcaacattccgcccatctatgccgcctattggcgcaatggcaactatggcgatgtgaaggacggcgagaacattttggccaagattaacgagggcggaacggtgaaaacatccgattatagcattgctgcaaagggcgaattggtggtgaaaccattgaaaggactacgcatctcgctggtggcagcgcccaatttcaccttccacaatgtgaaagactttgttaaagaactaacatacacacgtgccgacgacccacttacggtggctggtcatgtgggaggatttcgcaccacgtcgctaaccgagacgcgaaacacccactacgacatcaccacacaggctttagccaactacacgcacgactttgggctgcacagtctcacgggcatggcaggctttgagtattattacatgcgcgacgaaaacctctgggcaagtggcgataagtttcagatggcagcctttccgtacctcgacctttcgccgagagacgctcgcaacaatggtggtaacgcgctggaatactcttatcgttcggcatttgcccgtgtaaactatgcttacgccaatcgttatttgctcgaagccaatgtgcgctacgatggttcgtcgcgcttccacaaagattatcgttgggcaacattcccttcggtatcggccggttgggttatctctgaagagaatttctttaaagacaacgtgcggtggatggcccatctgaagctgcgcgcctcttatggccagctgggtaacgaacgtataggcagctattacccctatcaatcgtcgataaggtttggttcggcgctgctgcttaacggcacaacgcccgtaaccgtaccctctgcggcacaagtgaagtatgccgttaaggacattacttgggagacaaccgagacctgggatgtgggttttgatgcccatttgcttgatgcccgccttggtatcacgttcgactggtatcgcaaaaacacgcgcaacatgttgttacctgtgcaaattcccatcttcttgggttacgaaaatcccgacgttaacgcaggcgacatgcacaccaatggcttcgacctagaactaagatggcgagacagaataggaaaggtggactattgggctgcacttaacctatcagactacacctcgatgatgggcaacatgcgcggaacagaatttactggtgtgaagattaaccgcgaaggcagtgagtttatgaactggtatggctatgtttgcgatggtatttaccaaacacaagccgacgtggacaactcgccaaagcttaataacaacgttgctgtgggcgacttgaaataccgcgacatatcaggacccgacggaaaacccgatggaaaaatctcggccgagtacgaccgcgtgccgcttaaaggttctttgccccactttgtgtatggcttaaacctcggcgcagcctataatggcttcgactttagtttgagttttcaaggcgttggcaagcaatggagccgcaaaacacctgtgatgatagagggattggtgaacaactggaccaacttccccgaactaatcgacggccagtattggagcaaatacaacacagcagaacaaaatgcatcagcccaatacccacgactaaccgacaccagtcgtgcaaacaactacaccatgagcgacttttggttgttcaatggttggtatctgcgttgcaaaaacatcacgctgggttacaccttgcctaagcaaatcacccaaaaagccctgctcaagcaagtgcgtttgtatctttcggccaacgacctctttgcaattagcaactatcccaaaggctgggaccccgaagtaaccgacaacggctatcccattatgcgctcgttgatgttcggacttaacgtaaacttctaaacattccacaccacatgaaacgcaatttcattagaaatatattggcggtagcacttgttttcatcgccactgcttgtcacgatctcgatatgaacccgctttcttcggcagcaacgggcaactggtatcgcgacttacagcaaatagaaatggcgcttaacgccttagactcggccaaatattggcgtcccgaaggcgataaccaaaccgattggagcgacgatgccgtgtatcgcaacgccctaaccgagatggagaacgccacactcaccagttcttaccacctggttgaaacctattggc

SEQ ID NO: 1639 - DNA, 23675 bp, synthetic construct
  misc_feature 1..23675: note = Synthetic
  source 1..23675: mol_type = other DNA
gctatcccgacggcgacagcataccgtggcacaaactgggaggagtgcacagctaccaggcttgcttccccgacctgcaggatgtgcagattctggcagcccagcagcacggcgtaacgcctgtggcaaaccgggaggaggccgaaaggaggaagaacgaactggtgtatgtgggtgctgacccttacttctgtatagataagaacatgacgcacagcataccctatctggtgcccagagcacatgatttgctgagcgacataggccgcaacttcctggacagcctgtatgtgaagggaattcccctgcaccgcatcatcgtatcaagcatcctgcgcaccgaagatgacgtgcagaggctcaggaggcgcaacggcaacgccagcgagcaaagctgccaccgctacggcaccaccttcgacatcgcctacaaccgatactctacggtttcgcatccagacggtcccgaatgccgtgcagtcaggaacgacacgctgaaatgggtgctcagccaggtgctgagagacctccgtgccgacagcgcctgctacgtgaagcacgagcgcaagcagggttgtttccacatcacagtacgctgaccgccctcccccaccgcacatgccaagcgcatgcagggaagcaggagaaatgacataggagtctgagtgccaacgctcaggcttctttctttttccaaagaaaatcaatccggttctccgcccgattcctttgcccccaagaggcagcacgctgcattcccgtttccagcgcgctgaccagcccgttgcagcacgctgggattgcccccgcagcactatccaaccaagcgagaagcctgcctatagccccttgcacgtaggctgaaggcaggctggcaataggctgagcggcatccgggaggctatttcccgccaccagacataagcccacgaaaagcactctataataaaaaaagggaaaaaaaggacgcatggctaatataaattggctaactttgcaaggaaatacgtaaactctaaacatacaatagtacacaatgagtacacaagcagaaaagatcaaggagctggttgagctccgtgccaaagcccgcatgggcggtggcgagaaggccatcgacaagcagcatgcaaagggcaagtacacagcgcgcgagcgcattgccatgttgctggacgaaggttcattcgaagagatggacatgttcgtacagcaccgctgcaccaacttcggtatggaaaagaagcactacctgggtgacggcgttgtcacaggtagcggaaccatcggcggacgcctcgtgtatgtcttcgcacaggacttcaccgtgagcgccggctcactgagcgagatgctggcaagcaagatatgcaaggtgatggatatcgccatgcgcgtgggtgcacctgtcatcggactcaacgactcgggtggtgcacgactgcaggagggcatcaacgctctggcaggatatgccgaaatcttccagcgcaacatcatgtcaagcggcgtgatacctcagatcagtgccatcatgggcccctgcgcaggcggtgcagtatatagccccgcactcaccgacttcactttcatggtggagaactcctcttacatgttcctcacaggacctggtcccgtgaaggcagtgctgggtgaggtggtcacacaggagcagctgggtggtgcaagtgtgcacggcagcaagtcgggcgtaacacacttcacagccactaccgaggaggagtgcatcgctatgatcaagcagctgatgacctacatacctcagaacaacctggagaagactccccgtgtggaatgcaccgaccccattgaccgtctggaggacagcctcaatgaaatcatccccgagaaccccaacatgccttatgatatgtatgaggtaatcggcggtatcgtggataacggcgagttcttcgaggttcagcccaacttcgcaaagaacatcatcgtgggctttgcacgcttcaacggcgagagcgtgggtatcgtggccaaccagcccaagcagctggcaggcgtactggactgcaattcaagccgcaaggctgcacgcttcgtgcgcttctgcgacgcattcaacatccccatcgtgactcttgtggatgtacccggattccttcccggtaccgctcaggagtacaatgccgtgattctgcacggtgccaagttgctctacgcatacggagaggctactgtacccaaggtgacagtcaccctgcgtaagtcttatggcggcagccacattgtgatgagctgtaagcaacttcgcggcgacctcaactatgcttggccttctgccgaaatcgctgtgatgggtgccagcggcgctgccagcgtgctctatgccaaggaggcaaaggctctcaaggaagagggaaaggccgaggaggcaaaggcattcatcaaggagaaggaggaggagtacaccaagctcttcgccacaccttaccaggccgccaagtacggctatatcgatgatgtgatcgagccacgcaacacacgtttccgcatcatacgcgcactggagcagctggctggcaagaagcagcagaatcccgccaagaagcacggaaacattcctctgtaatcgctcacatataatataaggaagcattatgacattacttacaaactggcccactgtatggttgatgaccggcatgggcgtaggcatagtcttctgcatactgattatcctggtgctcatactgaagttcatgggcaacatcaacgcacgcaccatgggcagcacgaaggctcaggccgctgccgacggctgcccctgcggctgtggcgaggcagaggcttcagaggccgacctggctgcagtggccaccgcagtacatctgtaccagaatgatctgcatgactacgagagcggagtactcacctggcatcccacagagactgcctggcacagcgagctgaacccctctctctaaacattatcaaacaaccaaacgattcgacaaaagatgaaagactataagttcaagatcaatggtcaggactatgccgccagcgtggaagagcaggacaacggcactctcaacgtgaccgtcaatggcaaaacctaccaggtggagttgcccgaaaaggcacaccactgcactcgtcccatggtgagaccagcagtatcagccgcagcaggtgcacctgcagtggcacgtccggcagctgctgcacccggtaatgtagtggctcccctgcccggcaccatcaccagcgtgaaggtgaagaagggccagaaggtgaagaagggcgatgtgctgctggtaatggaggccatgaagatggccaatgacattaccgccgaggccgacggaaccatcaagaacgtgtgcgtgagccagggacagagcgtcaaccagggtatgattctgatagagttcgtagccgatgcacagcctgctaccgcagctcctgcacccgctcctgctgctgctcccgcaccggcaccccagcctgctgcaggtgccaactgcgtagtggctcctctgccaggtactgtcaccgaggtgttagtgaaggtgggcgacaaggtaagtgctggtcagaacgtactcaaactcgaagccatgaagatggagaactgcatcacagccgaaagcgccggcactgtgaaggccgtaagagttcagaaaggtgcccaggtacagggcggtgacgtactgatagaaatggcttgaagacatgaagaaacatctgcgcgccatgtgcctcatggcattgtttttgctggtggccactcctatgatggccggagacttcaacttgggcaccgcccttgagaagttctacagcgagatgggattcacatccttcttcatcggaacaggctggaagaacctggtcatgctggccgtcggctgcgtgctgctctatctggctatcaagaaagagtatgaacctctgctcctgctccccattgcctttggtatgatactcaccaacctgcccggtgcaggcctgttccacaccgagatgtggaatgatgagttcctcaacccagacagcccctactaccacagctatcgtcatgtgatggccgagggaggactgctcgatgtgctctacataggagtgaaggcaggcatctatccctgtctgatattcctgggagtaggtgccatgaccgatttcggtccgctgattgccaaccccaagagccttctcctgggtgcagcagcacagttgggcatctttgccacctttatcgttacacagcttgacttcttcggtttcaacgcccaggaggctgcttctatcggtattatcggtggtgccgacggtcccactgccatcttcctcaccaccaagctggctccccacttgctgggtcccatcgctgtggccgcttacagctatatggcactcgtgcctgtgatacagccgcccatcatgcgaatgctcaccaccaagaaggagcgcatgattcgcatgaagcagctgcgtactgtgagcaagaaggaaaagatcatcttccccatcgtagtggctattctggtgtcactcatactgccttctgccgccactctgattggctgcctcatgctgggcaacctgatgaaggagagcggtgtagtggagcgtctgagcaaggctgcacagaatgagttgaacaacatagtggtcatcttcctgggtaccaccgtgggtgctacagccactgcagaggctttcctcaactggcagacactcagcatcctgtgtgtaggcatcgtggcattcagcgtgggaactgccggcggcgtattgctggccaagctgatgaacctcttcatgaaggagaagatcaatccgcttatcggttcggccggcgtgagtgccgttcccatggcagcccgcgtaagccaggtagagggacagaagtcagatccccacaacttcctgcttatgcacgctatgggtcccaacgtagcaggcgtgattggttcggctgttgcagcaggtatcctgctcagcttcctgggctaagacagagcacaccagactacatggaagcagccagagagtactgacggacgatactggaaacccttttgaagcaaacaggaagaactgccgcaccacacagaaccctctattgaagcacctataatataaataaggagaaagcccaaaggccgacccaatcaaacaaaagacacatgcagagcaacagactctatacattcataatgctggcagccataggggctgccagcgttgtttctgcccagagcgacaattggacagaagcacgcaaggctatccaccgcgacagaaacctgtgcggaagcaattacaccgcctaccccactcccaccgagaagctcacaccggctcccaaaggctacgaacccttctatctcaccaattatgcccgccacggaagccgctggctgtgtggcgattggcagtaccaggatgtgatgaaacccctgcaggcagcacgcgagaagggcaaactgaccgccgagggagagcaactgctcagcgcagtggaggagttttacaagggcgccaaaggccgcataggcgaactcaccaccaagggtgaagaccagcatcacggcataggcagacgcatggccaggaacttcccccaggtgttcaacgccaagaactcgcgggtggatgcacgaagcaccgtggtcatacgctgcatcctgagcatggaagccgagtgtgaggagctgacacgccacttccccaacctgctcatgcacaatgacgtgagcagcacataccagtggtatctggcacccaacacacccgactacgtgaaggaagcagaagaaggccgcaagggactggagcagaagtggcgcaaagagctggtgcatcccgagcgcttcagcaaactcctgttcaacgacgaggcttacgcacgcgacgaagtcaactgcgagcgcctgatgagacgggtgttcgaggtgtgcggcaacatgcagagccactacggagcacctgacctgtggcattacttcaccgaggatgaagcctacgacctgtggaaactgtacaacatgaggttctacgccgagtttggagcctctaactatacgcgcaagaaagcacctttcaaggtggagactctgctccgcaacgtcatcgagactgccgataccattgtgaaccagaaggattatcacggagccactctgcgcttcggacacgaagtgttcctcatgccactggccacgctgatggaactgggcaatacaggagagacggtggagaacctggatacgctggaccgtgtgtgggtgggttccaacatcttccccatggcaggcaacatccagctcatcttctaccgccccaagaagggacgccagggcgatatcctggtaaaggctctgctgcaggagcacgagatgacgctgcccgtgaagcctgtgaagttcccctactaccgctgggaagacctcagagcctactatatcagcaaactggagaacgcccgcaactgacctttccaccccaaagccagcacacatgacaggcaatgactacacgctgtatgagctcaacaggatggtgcgctcggtgcttgaatccagtctcgacgaggagtactgggtggtgggcgaactgagtgatgccacccagggctacggcggacacttctatggcgaactcatcgagaaggaggaggacggcaagaggatacttgcccgcgccagagtgacctgttgggcacgtacctacaatctgctcagcctgcgcttccagcgcgatacggggcagacgctacatgccggcatgaaggtgcgactgctggtcagagtcaccttccacgagcaatacgggtatgcactcaacatgctggatgccgactccaacttcactctgggcgacatggcaaagcgccggcgcgagattctggagcaactggagcgcgacggcatactgcatgacaaccagaccctcaaactgccccgcctgctcaagcgtatagctgtggtgtcggccgcaggcgctgccggctacggcgacttctgcaaccagttggccggcaacgactatgggcttgccttcaccacccgcctcttccctgccgtcatgcaaggagcacgggtggaggagactgtttcggcagccctgcaagccattgccgacgaggcagaaagatgggatatagtggtcatcatacgcggcggaggagccacaggagacctgagcgacttcgacagctatctgctggcatcctgcatcgcacagtttcccctgcccgtgattacaggcatcggccacgagcgcgacgagacggtattggattatgtagcgcatacacgcgtgaagacacccactgccgctgccgccttcatcatcgaccatcaggctcaggaagcggctctgctcgacgacctttaccgccgcatcgcccattcggcacaggagcggttgctgcgtgagcgcaaacggttggacatgcaggcttccctgttgcccctgctcatacgtcggaagaccgaccgcatgcaggttcgcctcgaccagatgctcacctcgctgcgcaccgtcaccatacagcgtttcgagcgcgagcggcatcgcatggagctcatggagcaaaggctcaaagcctctgacccatccctgctcctacgacgcggctttaccatcaccacacaccagggaaggatgctcaccgacctgtcctgcctgaagccgggcgacaagctgcgcaccatcacgctggaaggagaaatcaatagcacagtaacatcatgcaagaagaaaaactgacctacgaagaagccatgcagcggttggaagacctgaccaagcgcatggagagcggtgaaatcaccgttgaccagatggccgaaagcctgcgccaggcacagaagtggatgaagcaatgccgcgagcaactgtatgaagcggaaaaaaattgcaattccctgttagatgtcaacgaaaaggagtaactttgcaccaacgctgccgacattttgcctacagcttgtaacaaaaggactataactcattataatatgaaagaaatagactggaataacctttcattcggttacatgaagacagattacaacgtgcgttgctactaccgcaacggtgcgtggggcgaaatagaggtgtgcagcgaggagactatccccctgcacatggcagccacatgccttcactacggtcaggaagccttcgagggactcaaggcatatcgctgtcccgatggcaaggtgcgtgtgttccgtcccgacgagaatgcagcccgcctgcagagcacctgccgtggtatcctcatgcccgaacttcccaccgagaagttcattgagatggtagagaaggtggtgcgcctcaacgaacgcttcattccgccttatgagagcggagcaaccctctacgtgcgcccactgctcataggtacaagcgcacaggtaggcgttcatccctccgacgaatatctcttcctcatcttcgttaccccagtgggaccgtatttcaagggcggttttgccaccaacccatatgtcatcatccgcgaatatgaccgcagcgcacccttgggcaccggtatctacaaggtgggcggcaactatgcagccagcctgaaggccaacaagatggcacacgacttgggctacagttgcgagttctatctggatgccaaggagaagaaatacatcgacgagtgcggagctgccaacttcttcggcatcaaggacaacacctatgtgactcccaagagcacctctatcctgcccagcatcaccaacaagagcctgatgcagctggctatggatcttggcctcaaggtggagcgtcgccagatacccgaggaagagttggccacctttgaagaggccggcgcatgcggcaccgcagctgtcatctcccccatcgagcgtatcgacgacctggagaacaagaagagctacgtcatcagcaaggatggtcagcctggtcccatcagtaccaagctctaccacatgctgcgcgacatccagtacggtgtacttcccgacacccacggatggactcacgtggtcatcgaataagagtcaaacgggctgcacagcccatcatacacaaacgagccgaacttctccatcaggaggttcggctcgtttgtttccgttcagcagcatgattcttcggccaagccattcagccaagcctgtttacctatgaccataaaccttaggactatcgctattggccatcgagcgctataccaagcagatttccgtgccatcactttagcccaaacgcccaaagccttttgcctatccttatatataaggtagcaagaaagacatgcagggtgttccagatgatgaacatcacatcgtccatatcaccccgcctctcatcccggattatcgtagccagttctcccgccatctcggcatactcagtatccgtactgaaaaccttgtcacacggatgacaatcctttatctccttctgtagaatcactatcctcctcatcctatccatatattaaagtccgaaggcaaagataacaccttttctcccgatatccatccccaccgccccacaatcttcttcccggattgatgtgtagggctgcaacactcaagacacagtacccagataaggccatcaaacctactatcataagaacgcaagtatgctctcagggtggcttttgagacttacaaacgatgcgagaagcggttttcatgaagcatctgggtcaaaatggtgcgggaaacagacgattccattcgctccggcatagctttttctcttttttgttggctcaccatcatttttgttgtaacttcgctaacaaacaaagacagtagcatggaaacatcaggctttaacacacatattgtccgagcaaacccacagacgggcaaggatacaaaaaagcctctccgaagagaggcgctaggaattcatccttcggcatatagccttattgtgataaggtgatgaattttatgttgcaaatataaggaatatataaataacaagcaaaacaaatcataagaatatggcaaaaaagcgtgttttaggccttgatactggctccaacagcctcggatgggccattgttgaccgcgaagaaagcggtgaacagacattggtggacaaaggaacactcatctttcaggaaggagtcaagatagagaagggcatcgagtccagcaaggcagcagatcgaactgcccacagagcattgcgacgccaatacttccgacgcagactgcgcaagatagaagtgctcaaggtgcttgtcaagcacaatctgtgtccagcattgacagaagatgatctgaagctgtggcatacgcgcaagatttatcccagaaaagatgaattcatgcagtggcagcgcacagatgagaacaaaggcatcaacccctaccacagtcgccacatctgcctgacggaaaagctcgacctcaacaagcaggctgaccgctatactctgggaagagccctttatcatctggcacagcgcagaggattcatgagcaatcgtctggatgccaatgaggaaaaagaaagcggagccgtaaagcaaggcatttcggagttgagccaagagatggagaaagccgggtgcaaatacctgggcgaatacttctacatgctatacacgcaacagggaaacaaagtgcgcatacgcacaagatacatcgaccgcgaagagcattacaagaaagagttccatgccatctgcgacaaacagggattaagccaagagataaggcatgaactggaacgcgctctttacttccagcgtccgctcaaaagccaacgtcaaagcgtgggcaaatgtaccttcgagaagaacaaaccacgatgcagtgattctcatccactgtatgaggagttccgcatgttgtccttcctcaacaacgtgcgcatcgaagacccttatgacatggaacctcgtcccctgaacgaagtggagttgtacaagattaagcctctcttctatcgagtgagcaaggccaactttgactttgaggagatagccaagaagatagcaggaaaaggcaactaccagtatgcgaaggaggctggcaaaaagccatacaagttcaacttccgcatgacgcaaggtgtgcctggatgtcccacgacagcccagctccgtaccgtctttggtgacaactggatggaaggaatagccgagacattcgacatgaaccaatgcaaggacggcagacaaaagactgccgaagagatggcatgcgacatctggaacgtgctctatttcttcgacagcaaggacaaactgaaagagtttggcatcaaccacctgcaactcgacgaggaacatgccgagaaatttgccaagatacgccttagccacaacttctcatcactctcgctcaaggccatccgcaacgtccttcctttcctgaggatgggcatgctctacagtcatgctgtatttatgggcaacattcccaaactggtgggtgccgacatatggaacaacccagagaagcgtgagcgaatccttgaccaggtgaacaagatggcaacaacgccacttgacgaagtgagagaccaacgttccacactcgaattctgtatcaaggatttcctgcacgaggagtttggtgtctgcgagaaagcattggagaagctttatcacccatcgatgatagagacttatccggatgcaaagcccaaccatgatggagttgtccttctgggcagcccgcgtaccaatgctgtgcgcaaccccatggctatgcgttctctgcatgaaatacgcaaggtagtgaacacccttatcaaagaagggaagattggacccgacacagaagtgcacgtcgagtatgcccgttcactgaacaatgccaatatgcgtgccgctataaacgaacatcagaggacactggacaagaagcacaaggaatatgcagaggagctgaagaagctgtacagggagcaggccaaccgcgatatcgagccgacagagaccgacatactcaagttccaattgtgggaggaacagaaccacgtgtgcctttacacaggtaagaatatcggcatcactgatttcgtcggtgcaggcactccctttgacattgagcacaccatacctcgcagcgtgggaggtgacagcacccaggagaatatgaccctgtgtgacagccattacaaccgctttgtcaagaaagcccaactgccttccaagctccctgattacgaacagattcttgttcgcatcgagccttggaagaagaaggtagaagaactcacgaaacagatagacaagataagcacgcgaggtgtttgggacaaaactaccaaggacaatctcatacgcaagaagaaccgcctgaagatagagcgcgattactggcgtggcaaataccagcgcttcactatggaggaagtgcccgaaggctttgcactgcgtcagggagctggcatcggcctcatctccaagtatgctgccctctatctgaagagctacttccacgatgtggtacaccctgaacgccgacaggtattcagcatcaagggtcccatcacagcagagttccgcaagatgtgggggatacaggaagagtatgaaaagaagtcacgtgacagccacacgcaccattgcatcgatgctatagtcatagcctgcatcggcaagaacgagctcaaccagatgagcagatatcatcatgagatgtatgactatacagagggcaaaggcgaaaagcccatattccccaaaccctggagcacgtttacccaagacctcaaacagataagcgaagagttgcttgtcgtacacgacactcctgacaacatgcccaagaaagcctgccgtatgatagacactccccatggtaagaaacaggccaagggagattgtgcccgtggcagcctgcatcaggatacctactacggagccatagagcaggatggtgacgtgaaatatgtggttcgcagaacacttgacagcactttcaagctcagcgatgtagataagatagtggatgaggtagtcagagagaaagtgaaagccgcctttgtgaacaaggtgctccagctgcccgtattcatgaacgaagagaagggaatcgagattaagaaggtgcgctgctataccccatctgtcaagacgccacttcacattcgtcatcatcgggatgtcagcaccaaagaatacaagcagacattcaatgttgtcaacgccaacaactattgtcttgccatatacgaaggcctggtcaaaggcaagccaaagagagactacgagattgtgaacaatcttgatgcggcagcttattataagaagagtgcagatgccagaatgtacccactggtaccagaaaagagcaagagggattttgaccttaaatacacgctgtatattggcacacacgttcttctatatgaaaagactaaagaagaactcgccgaactctctacaaatcttttgaaaaatcgtctttacacgattacaggtatcagcaatgggtgtacaacagcaggcggaatcatcacctaccgcttcggaataataaccctgcgacatcatgctgaagctcgtcaagcatcagaattgattgtaaagaaaggagagtatcatcaggatgaagaactcagacccatcatcgctctgactcacacccaattcaaagctttaatagaaggcgtggatttcgagattacgccaattggtgaaatcaagctaaaataatcagtatgcttaaacgcacactttgtttcacctcccctgtgcaactttcgctcaagaatgcccaactggtaataaccatcaagggcattcctgacgaagtgcgtacagttcctatagaggatactggtatagtcatcattgagaaccaattggtcagtgtgacgatgccactgctcaacgaacttgtagataacggagtggcagtaatcctgtgtgacaagaaaggcatgccacatgccatgctgcaaaacctggatgccaacaatcttcagggagaattcctgcgcaaccaaatcaatgtgggagaagtgcagaagaaacagctatggaaacagattgtggagtctaaaatcagcaaccaagctgcattactggacaagctgcatggcaagggacatatcctcaagcctctatactccaacgtaaagagcggagactgtgacaacagagaaggaattgccgcaaggctgtattggacagaactgtttggcaaagacttcttcagagaccgcaatgaggacgggataaactctcttctgaattatggctacaccatcctgcgtgcagcaacagcccgcgcgttagtggctgcaggattgactccttccctgggtatattccatcacaacagaggaaacgcttttccgcttgccgatgatctgatggagcctttccgccccttcgtggatgaaatagtctataatctctgcgaagaaggcaaacttcaactgaacaaagatactaagtttgagctgttatcctgcctgtcgtgcgacacttactatcccaaagtcacccgcccgctacaaataggattgtccatgaccatggcatcacttgccaaatgctatgcaggggaacagaagaaactatcattgcctaccctcaaatgagcgaaacacgtctcaatgcatataagataatgtggattgttgttatgttcgacctaccaaccgtcagcaagaaggagaaacatgattatgcagttttccgcaagagtcttgaacgcgacggattcgtaatgcaccaatatagtgtgtacattcgtttctgtgcttcactcgaatcaagggatgtacacgtcaagcgggtaaaactcttcatgcccagcaagggaagacttagtataatcacgataaccgacaagcaatactccaacatcatcaatatatggggagagatagaacaaaaagtacaaaagaagcctgttcaacttgagtttttttagtaattttgccatagataaggaactcaccattccatttcctgtacaatattcatcgtgtaactgtatcatattacaacacataagaaatacaggttgtggtttggtgatgaaagaggatataacgcaacatttctttgaataaggggttactctccatcgttgtggtttggtgatgaaagaggatataacgcaacatcgtaaatgtgaacaagaacagagagagggttgtggtttggtgatgaaagaggatataacgcaaccttcgtggatgacttcctgttcatctgtcgttgtggtttggtgatgaaagaggatataacgcaaccaatgccgtgagcatcaccctggagcgtctgttgtggtttggtgatgaaagaggatataacgcaacccttgcggtcgtgcgcgtccttgccgaacagttgtggtttggtgatgaaagaggatataacgcaacgccgacgcgctcatcaagtacatcatacgcgttgtggtttggtgatgaaagaggatataacgcaactgatggatacattcattttccttatgatagttgtggtttggtgatgaaagaggatataacgcaacatgaccagcaggattctgtacccgtcagcgttgtggtttggtgatgaaagaggatataacgcaacggcaattttgttgtagtcatgccaccagtgttgtggtttggtgatgaaagaggatataacgcaacggtgtggctgcgcaatgctcgttggtgtgggttgtggtttggtgatgaaagaggatataacgcaacggatggttaagagcataacgagatgcatcgttgtggtttggtgatgaaagaggatataacgcaacgtttcataaccttatatcttttatgtttgagttgtggtttggtgatgaaagaggatataacgcaactgcaaaaggtcatcattcgaaagtgggacagttgtggtttggtgatgaaagaggatataacgcaactaagacgtaacaagattggacgcatttgtgttgtggtttggtgatgaaagaggatataacgcaacatgggcttcggcttcagataagcctgcttgttgtggtttggtgatgaaagaggatataacgcaactgatgaacttacggaattgattatcatcaagttgtggtttggtgatgaaagaggatataacgcaaccgtttccatgttttctgccttacgagtcaagttgtggtttggtgatgaaagaggatataacgcaacgaatagagacacgaccatcacgaacagaagttgtggtttggtgatgaaagaggatataacgcaacagagccatcgaacgcgctgcacgcttggcagttgtggtttggtgatgaaagaggatataacgcaacgttagcctgccaagcgtcaagatttgccgagttgtggtttggtgatgaaagaggatataacgcaactaagtcaagtttagcagaatcagaagtaagttgtggtttggtgatgaaagaggatataacgcaacttttgaaatttgagcacgcttctcacggtgttgtggtttggtgatgaaagaggatataacgcaacgcaacaaaatcagaaggtttgacatttgtagttgtggtttggtgatgaaagaggatataacgcaacaaaacagtaatggtgtcactccacgtaaagttgtggtttggtgatgaaagaggatataacgcaaccatcaataaccttcgagcctgcaaaagtagttgtggtttggtgatgaaagaggatataacgcaacgataagacggggaaaccgccctgccatgggttgtggtttggtgatgaaagaggatataacgcaacatttgcctgccatgaatcgagatttgctgagttgtggtttggtgatgaaagaggatataacgcaacgcgcccgttttaattccctgcataagtgggttgtggtttggtgatgaaagaggatataacgcaaccaacatttccagtcaaaagaccagcaatggttgtggtttggtgatgaaagaggatataacgcaacggcatcgtcatcttttcgaaacctcattgagttgtggtttggtgatgaaagaggatataacgcaactgttcgcagtgtttaacacatagctgactagttgtggtttggtgatgaaagaggatataacgcaaccaatcaggatttgacaggaaccgcatcaaagttgtggtttggtgatgaaagaggatataacgcaacgctaccgcatagcaattcaacattacctaagttgtggtttggtgatgaaagaggatataatgcaacgctccattgcgcgataaagcatgcgccactgttgtagtttgttgatgaaagaggacatagcgcaacaaccacactgtagatacagagtaacggatggtgattccgaggctgtacaagggaagccgattggtgaacagggagatgtaggcttcttcggcacttcctgcgtgtcttcacatcagaaaagaagttgtccttgaccgtccaacccaaggctggacggtggatgaagcttgcttacttggcaaagtaatatatattctctgaccgtccagccttgggttggacggtggagatgtacggcacacccgccctggaggctaaatgattcatgcacatgagacatctgctttacactcgcaaatagccctttccccgggacttgcacccgttagacgatgctcatgccgagcatacgataacaaaaaatccctgtggagaatcattccacagggactttttgtttgtataggttgcttatttgtcagcggttcccttggtaaggccataagccagtaggttgcttatttgtcagcggcatccttaataaggccataagccagtaggttgcttatttgtcagcggcatccttggtaaggtcataggccagtcagggatttgcttatctataggttgcttacttgtgggtacccactatggtggtgggaggaagttgcgagttgcggcggtcggtctcggtaaccacacgggcagccaactgcatgaaggcatggccggtgggagttgttgggtcgagggcagcaggcgttccttcgtcaccactctggcagatatcctgcaccacaggaatctgccccaggagaggcacattcatctcctcggccagatgcttcacaccttcctgcccgaagaggaagtaacgctcgtcgggatgctgggctggagtgaaccacgacatgttctccaccagtccgagaataggcacattcaccttgtcgttctggtacatgttgatgcccttgcgtgcatcggccagcgccacttgctggggtgtgctcacgatgacagcacctgtgatgggcaatgtctgcaccagggtgaggtggatgtcagaggttccgggaggagtatcgaggacaaaatagtcgatgtcgccccagttggcatcacctatgagctgcttgagggcattgcatgccatacctccacgccagagcgttgcctggtcgggattgacgaagaaaccgatgctgagcaccttcaccccgtacttctccacgggcatgatgaggtcgcggccgttgatgcgctcgctatagggacgagcatcctctatctggaacatcttgggcactgaaggaccgaagatgtcgcaatcgagcagagccaccttcatgcccatcttggacagtgccacagccagattggcagccactgtgctcttgcccactccgcccttgccactgcttacggctatgatgttcttcacgccgggaagcagatcggggaggtctggacggggagcctgcaaggctttggtcttcacctcaacctccacatccttgctcacataagcgtgtatggcagcctcgcaagccttcaccatgctcttcataaaggggtcggtgggcttgtcgaaaatgagtgtgaagctgacgtgcatgcctgcgatgcgcaagtcgtcctccagcatcttcatttccaccacattctttcccgttccgggataacgcacggtggagagtgcgtcggttatcagtttaggataaagttccatctgtttataatttagaattgggaattttgaactgcgagcggtcttccgtgcttcatgagctggcctgtgcctcctcatcaattcaaaatccccattcgggttcttactctttgttcaatcctccatcatgctggccactaacggctgacctccagactcgagcgcttctgccggctgtaggagcggtactcatcgagcggaatctccacgtcaggctctgtcagctgtccctcgagcggcaagtggaagcacaaatacttgatgtcgatgcctctgccacgccacatgctctcgtagtaggtctgtattgactgtgccactgctatcatcccctgggccggttcggcatagagattgcgcgtctcggcaatgggctggatgccgttggcagaaagcatctcgcgcgtgtatgtatatagaaagttgctgtcggtcttgacatgcaccagtccgtcctgctgcatgaatgcgcgatagcgctgcagaaaggcggtgcccgtaaggcgcttggtcaccttcttcatctgcgggtcagagaaggtgagccatacctcgctcacctcgccaggggcaaagaagcggtcgatgaactcgatgttggtgcgcaggaagcccacattctgcatgcctgcagccactgcctcctgggctcccgtccacatgcgtgctcccttgatatccactccgatatagttcttgtcggggaacatccgtcccagccccaccgtgtattcgcctcgtccgcagcccaactcgagcacgatgggcttgtcgttgtggaagaagtcggtgttccacttccccttcaggtcaaacccgtcggcctggagaaccgcaaatgggcactccaccaccagcggattggctgccatgtcggcaaacttagccagctttcccttgcccatgcttacttgttgatagtgtatgaggcggtgccgatgttctgcccgtcggcaaagatgtcaacacgataggtgccggtgctgagtgtctcgttcacgtcccaatatacggttacgctctgctcctcacctgtgtattcgatgtccttgcgtatgctgtactccaactggcggttctcatactggaaggtgccacccgaggtgagcacgctgcccatgggtgtggagatgcgcagatagatgcttcgcagtccggtgctggtggtcacgttgcgagagatgttgaagctgatggcaaacttcttcacgtccttcacctttctggcttcacgtcccttcttgttgcgtgcctcgatgcggatgcccgtagcatccagctggctggctatctccaccttctcagagagcgactcattctggctgctgaggttggagatatgctgctgggcctgctggttcttgtccttcaggctgttgttctcctgcgtcagctcctgattcatgcggttgagggaatcaatctgcagcacgtagctgcgcaacaccttacgcagtgtggccagctccttcttcagtcgcatgatctcggcagcattgctgctcttcaccctcctgagctcttcgaggagttcctcggtgcgctgctgctcctgctccagttgtgccaccagtgagtcgttgttgattttcatcttcatctcattgtactgcatggcaaactgctcatactcgttctccatctcgcgcttgtccatctcggccagctcaagcatctgtttgttcttctcattctgcttgtgcatgcggaagccgagaaatacgattaccgctacaagtacagctgccacagctaccgacagcatgatggtttgtttcttgctcatatccttggtgtattttattctatattatgaaaaacgcaaattaccgtgcaaagttaagcataaagtctggaatgccagccaagattgccggttcatttgctcgatttaacttctcttgtttcagaaaccagccactcgagacgcagaaaagagcaatagcggcaaggggaactgcctctcccagccccaagaagctgcccccccgaaatgccacaaaatatttttccaactgagaaaaattatttccccaactgaagaaatctattccctgccctacaaaggccgaagacggaagaattcgaagctaattggagaaaaaggagcaagaaggtggcgcttgcccggcaaaaagcatttcgcacttgggagaaatgtcgtatatttgcagccagaagaaaccctaaataaaaaaatggtaacgcgcgggcgtgcggagaccacctcactgcgcccgaaagcggactttcacatccacaaaatgaagaaaaccttaacatcggtactgcttctggccatcaccatgacggcaggagcacagaagctcacacggatgaacgcaaccaccgtgcaggctacactcgacaacgggcagtcgctctacgtcgatttctacggtcctcacatcttccgtctgttccaagacccacaaggaggaatcatccgcgaccccaaagccaacccgccagcacagatactggtagataatccccgccgccaggtggaaggcctcaaggtggagggtaacaccatcagcgtgggcgacttgcaggttaccctgggcaagcagggcgaaatatgcgtgaagcgcaacggacaggaagtggtgaagcagacttctgccaccgacttcggacgcagcaatgtgacactcacattcgagcagagtgcgaacgactggttctatggaggcggcgtgcagaacggacgcttcagccacaagggacagtccatcgacatccgcaacaccaacaactgggtggatggaggcgttgccagccccacaccattctactggagcacacgcggctacggcatcatgtggcacacgtttgcacccggcacctatgacttcggcaagtcggaagccggagagacccgactgagccatgagacgaagtatctggacctcttcgtgatggtggataacggcgctgtggccttgctcaacgacttctaccagctgaccggtaaccccgtgcttctgcccaagttcggtttctacgaaggccatctgaacgcctacaaccgcgactactggaaggaggccgaagcaggcaagaacggattcatgacctatgaggacggcaagcaatacaacgagagccagaaggacaacggcggcatcaaggagagcctcaacggcgagaagaacaactaccagttcagtgcccgcgcagccattgaccgctatctggacaacgacttccccctgggatggttcctgcccaacgatggctatggagccggatacggacagacagagactctgaagggcaatatacagaacctgaaagagtttggcgactacgcccgcaagcgcggtgtggagataggactgtggactcagagcgacctgcatcccaaggagggagtggaggctctgctgcagagagacatcgtgggagaagtacgcgatgccggcgtgagagtgctgaagaccgacgtagcatgggtgggagccggctacagtttcggcctcaacggtgtggctgacgtggctcaggtgatgccttactacggtgcccaggcacgtcccttcatcatcagtctggacggttgggctggcacacagcgctacgccaccatctggacaggcgaccagaccggcggccaatgggaatacatacgtttccacatccccacctatatcggcagcggactgtcgggccagcccaatatcaccagcgatatggacggtatcttcggcggaaagaacgtgcctgtcaacgtgcgcgatttccagtggaaggcattcacacccatgcagctcaacatggacggctggggcagcaaccccaagtacccgcaagcgctgggcgaaccggctgcaagcatcaaccgctactacctgaagctcaagagccggctgctgccttatgcctacagcatagcccgcgagtctgtggatggcaagcccatgatgcgtgctatgatgctggacgaggagaacgactacacacgcagcaagcgtgccgactaccagttcctgctcggtcccagcattctggtggcacctatatataaggaaacgcgcgcgaaggaaaacggcgacgatgtgcgcgacggcatctatctgccccagggtcagtggatggactacttcacaggagaggtttatcaaggcggacgcatcatcaacgacttccccgcacccctgtggaaactgcccgtgctggtacgcctgggggccatcatacccacacacaagcccaccaacacacctgctgagatagactactcgctgcgctgctacgacatctatcccacactgggcgagcactcgtttaccgaatacgacgacgacggacgcacggatgcctacctcaacgggcaggctacccacaccaccgtaaaacagcagtccgacaagaaaggtacgctgagcataaccatcgagaagaccaccggccactacgaaggtttcacacccgagaagagcacacagctgcgcatctactgccagcaggaacccaagaaggtgactgtgaaggtgggcaaccgcaagcagcagctgacccgcgtggaggactatgccacatggaagcagactgccaactcatattactacggaaccggcgaggatgcctaccgcaaggtgcctgcgctgatggtcaacatcgccaagaccgatgtgacacagaatgctgtgaccctgctcacacaggctaccatcgacaccaccaaccatctgctccagaccaaaggccagctgcagaagcccgtatgccgcattaccg

SEQ ID NO: 1640 - DNA, 23675 bp, synthetic construct
  misc_feature 1..23675: note = Synthetic
  source 1..23675: mol_type = other DNA
tgcgctccactttcggactcgtactgctcctttcggtgctcgtgggctgtgctcccacggtgcctcatgagggcagtaacctgatgaagcacgcccgtcggctcacgctcttcgagactgactcgatggtggtggccaccgtgcgcaacccatgggacacgaccgctgtgctgcaacaatatgtcctcgtgccgcgcgatcgccccctgcctcgcgttttgccgaaaggcatcctgctgcgcacgccccttcgccgcaccgtgatgcagagcagcgtccatgccgctttggccgaacacctcggcacagcgcgccgggtgcagggcatctgcgatgcgcgttttgtggtgagtgagcgagtcaaatccctccggctcaccgactatggcagttccatgcagccagatgtggagcgccttgtggtcgacagcgccgatgcgatttttgtttcgccctttgagaatgccggtcatggtgcgcttgaccgtattggcattcccctcatcgagtgtgccgactatatggagacgacgcccctcggccgcgccgaatggatgcgtttctatggtcgcctttggggatgtgccgaacgcgcagacagcctgatggccgccgaaaccgaacagtacgaaagtttgtgccgcaaggtggctgccgcccgcgagaccgctcccacgctcctcatcgaccgcaaagaaggggcaacgtggtacgtgccgggcggcgacagttatttggccaccctctatcgcgatgccggtgcccgctatgtttttgccgcccatcgtggagcgggaagtgtggcgctcgatgtcgaaaccgccctcgccgaaggacgagatgccgacctttgggtcattaaatatggtgcaccgtccgacctcacccttaccgcactggctgccgacaacgccgcctatcggcaatttcgtgcctttcgaaaggggcacgtgatgggttgcaacacgctccaccggccttactatgaggagttgccctttgccccctcgcgcttgcttgccgaatgggtgcgcctgctccatcccacgctcgtgccctcccccgttgccgaacctttcttcacaccgctgcgagaacgttgacacctcatggtcgcatccgctgtgggtggcacaatgaggcataaggagcgaaagcttcactctccgagtaaccccatctaaaacgataaagaaccgatttatgaattggcaggaaaaagccttagcgctccttgagagaactctgaaaccgattccccaagaactcaatgagatggattggaaaggcggcctttctaacgataaagaacggctggctcaacatatttcggccttctccaatctgtccggagggggtacactcgtgtttggcatccacaacgatgccacttttgccgaactgatgcaagcggaaatagagaagacggtgacaaggctggacaatatcgctcaaaatcggatgtctatgcccatccagattgaacatgccgtgttggagtatgagggtcatccacttttgtttgtccacattccggaagctcgtgaaaagccggtgcatctgcgtggaggagatatttacaattgctacatccgctctgccggtcataccgtgaaggcggctcgccagttcgtacgccgattggtggcggaatcagaaggagtaacttatgaggaaagaagtgcaaaaagcggccttacgccagatgaagttctgcgcttattggactatcataaggcgtttgaacttctcggtcgtcaagtaccgtctacttcggaggctgttttgagtttcatggaggagttgggaatttgcagcaaagagattgtgggatatatgattactcacctgggggctgttctctttgctcactcattggccgaattcgacaatatgcaagcacgagcggtcatcgtgcggcgatatgtcgggaataacaaccggcaactgctctgggagcaaaaaggtgttatggggtatgccgtaggactcgaagggctgatttcttttgtcatgaagaatacaggttccgagaagatagatggcgccgtcagagaattagtgccaacgtaccctcgtgtcgccatccgagaatttatagcaaatgccctcgtccatcaggattttgatgtcaaaggtatgccgattacaatagaaatctatggtaacagactgaccatcactaatccgggctactctttgaatgacgtaaaccgcctcatcgacctgccgcctcattcacgcaatgaaaagatggcacagctcatgctgcaactcggattgtgcgaacgccgcggcagtggtgtcgatcgtgcagtagaagccatggagaaaatgctccttcctgcttataaggcagaaagtggtagcaattttacccgcgtgactctctatccattgaaacctcttgcagaaatgaccaaggaagagcgggtggaggcttgctaccagcactgctgtctgacttataccgataatgcgacgatgaacaatcagtctgtccgagagcgtttcggattgaacaaaaatcagagtacaatcgcatctcatatcatcgcggataccgtggccaagggattaatcaaatcgtccaatcctgattccgactcaaggaagtttgtttcctacgtgcctttctatgcttagttttattttcgcagaaactccaataggtttgtaagaggctgtaaaacagctcctttctatcttcgcagaaactccctgcaagaaatggcatggcgagaataaaccccaaaagaccactataaggctttgcttgtcgttcaaattttgtatctttgctccaaggacaaaaagtacccattttcaccatccttccctacccataaaaagagataacttaccagcctttgaaaaaaacataggtcgcagaaaaaactacctcagaggtagaaaattttagctcagagatagaaaaaactacctctgaggtaaattcaccccctcctacggccgccttgtccggccgttgttatcgtgtttcctcttcaatgccctgccccatcatgatgcgcttcctttttcttgtggccttagtgctcctgttggctttggccaatctgctcatgggcagtgtccgggtgagtgtggcagaggtgtggcaggtgctcacgcatcccgcgacggagagcaccgcgagcttcatcgtgctccaacatcggttgccccagttgctcacggccttgctggccggggcttcgctggccgtgggaggcgcggtgctgcaaaccctcttccgcaatccgctggccgatccctcgctcctgggcgtcaacgctggggcgagcctcggtgctgccgtagccctgttgctttggggtggggtggtgagtgccggaggttgggtgctgtcgggctttgtgctcaccttggtttttgcgctggccggtgcgctggccgtgctcttcctcctcgtcggggtggcgcggcgcctgtcgggagcgggaggactgctcatcgtgggcgtgatgctctccttcatcgcctcgtcggccgtgtcgctgctcaactttttcgccacggccgagggcgttcgctcctatatgctctggggcatgggcgacttctccaccctgggagcggatcgtcttccccttgtggctgtagcgctactgcctgcctggattggtctgattgtggccatcaagccccttgatgccctcttgctgggcagcgactatgcccgctcgatgggagtggatgtggggcgcacgcggtggcttctgctgctggccgtgggatggctctcggccctcgtcaccgccacctgcggcccgatcgcatttttaggtttggccgccccccatctggcacgcctgctctttcgcacggccttgcaccgcaccctgctgcctgcggctttcctgaccggagcagcactggccttgctctgcctgctcatcagtcgatggccggggacagacagcattctccccatcaacgccatcacccccctcatcggtgcaccgctggtcatcgtcctgttgctcaaaaaatgaagcacagaccgctggacagccgaatgcatctccgatggagaagaccgattacgtctttcgtcgaaagaacgctttccgccttttcctttcaaaacttatcccaaaatattcttcgcttatgcgtccgcttattctcctttccaacgacgacggctatcaagcccaaggcattaacgccctgattgaaagcctccgccccttggccgatctcttggtggtcgctcccgacggcccacgttcgggcaattcgggtgccatcacctctctgctgccgctctacaaccgtttggtgagccgcagtgaagccaccgacacgctcggtagtgtagaggtttatgcctgctcgggcacaccggtcgattgcgtcaaaatggccttcaacatcctcttgccgcgcctcggccgcacgccggccttggtggcttcgggcatcaaccacggcgacaactcctcggtcaataatttctattccggcacgatgggtgcggcttccgaagctgcgttgcaaggagtgccggcggtgggattttcgctctgcaacgagcacgcccacgccgacttctcgccttgtgcgccctacatcgccgaaatcgtggccaaggtgctgcgcgaagggctgccgactttctcgacgctcaacgtcaattttcccaacacacccgaatatcgcggtgtgcgcgtctgccgtatggcacgctcgcggtgggtcaaggaagtggcggaatcccttcgtcccaattcgcaaaaaccacattattggcttacgggcgaacccctcgaactcgagcccgaagccaccgacaccgaccgctgggcgttggcacacggctatgtggccgtcactccgcaaacgctcgacgtgacccactacggcctgttgaaagactggaaactggacggcgcagaagggtagtggggcatcgtgcgctctgacaccgattgatttttgttttcacaaaccctctctacttcccctttctcgaccatgcgctattttctcattgccggtgaagcctcgggcgacctccatgccgcccacctcattgccgccctccgccaagccgatgcgaaggccgaatttgtcggtttcggcggcgatttgatggaagcggccggtatgcgcctgctgcgccattattccaccctcgcttttatgggatttgtgcaggtagcgctccatttgcccaccttgctggaaggactgcgcgagtgcaaggccgccatccgcgagagtcgtccgcacgcggtgatttttgtggactatcccggtttcaatctccgcatcgccgcgtgggtacgccgccatctgcccatccccaccatctattatatcgcccccaaaatttgggcgtggaaggaagggcgcatccgcaacatccgtcgcgacatccaaatgctcctttccattctcccctttgaaaaggagttttttgagggcaaacaccactatcccatccactatgtgggcaatcccacgctcgatgaggtggaggcgtttcgcgaagcctatgccgaaccacgtgaggacttctgccgccgtttgggactcgacgagcaccgtccactgctggtgctgatgcccggttcgcgccaaagtgaaatccgtgccaacctcccgcggatgctgcgtgccgtgggcttggccgaccctcaggggctgcaacaactgctcttggtggccgctcccggactgacaccggagttttacaccccttatcaacaggacaatttgcgcctgctcttgcaaacggagactcccctccccgctcaccccgctgcctatcctgcgctgtttcatgccgatgcggcgctggtgaccagtggaacggccaccctcgaaaccgccctcttcggtacgcctcaggtggtgtgctatcatctgcgcggtgggcggctcatcaatcggttgcggccgtattttctgcgctgtcccttcatctcgctcgtcaatctcattgcggggtgtgaggtggtgcccgaactcattgctgccgacactgctcctgccgtcatcgcacggcatctcgcgcccctgctcgacaacgcttcggtggagtggcgcaaccaacaactccactacgcccaactgcgtgaacgcctcggtgccctcggtgcgccccaccacgcagcacaactcatcgtggagcgtctccacgaacgcccccaatagtgcgcagcgccactgcctgcgatactttcttctgccggaagaccgctgtgccttcctacgatattcctatctttcgtcaaaaaaaacaaacacaagataatgtacaaaaagaccaaaattgtcgccaccatttcggatatgcgttgcgacgtcgaattgctccaaaaactctatgatgccggtatgaacgtggtgcgtctcaacaccgcccaccaagccaccgaaggtatgcgtcgtgtcattgaaaacgtgcgcgccgtcagccccaacatcggtatcctcatcgacaccaaaggccccgaagtgcgcaccacggcctgcgaagcacccatcgagttccagaagggacagaccgtgcgcatcgtgggtaatcctcagcaactcaccacggccgaatgtatcgcggtgaactacgtggacttcgtgaaggacctcaaggtgggtgctcatgtgctcatcgacgatggcgaattgggtttcatcgtttacggcaaagaggaaaacgaactcatctgcaccgttgaaaatgacggtacactgggttcgcgcaagagcgtgaacgtgccgggagtgcgcatcaacctcccttctctcaccaagaaagaccgcgccaatctgggctttgccatcaacaacggcatcgacttcgtagcccatagtttcgtgcggtcgaaggaagacgtgaacgatgtgcgcgccatcctcaatgccggcaacagtgccatccgcatcatcgccaaaattgagaaccaagagggcgtggacaacattgatgaaatcatcgaggctgccgacggtatcatggtggcccgtggtgacttgggcatcgaggtggactataagttcattcccggtattcagcgccacatcatcgagaagtgcatccgcgcccataagccggtcatcgtggccacacagatgctccagagcatgatcaagaacccgcgtcccacgcgcaccgaagtgaccgacatcgccaatgccgtttattcccacaccgatgccctcatgctctcgggcgaaacggcctatggcgactaccccgtgcaggccgtggaggtgatggccaacattgctttccaggctgagaaggacatccacgccgacggcggtaaaatcgacattcccctgcctgcgcgcccctcaatcaccgaatttttcgccaaagaggccgttcaggctacgcagatgatgaacctgcgcgccatcatcatggacagcctcaccggtcgcactgcccgcatcgtttcgtcctatcgcggacaaaacaccgtcttggccatttgctacaaagaggaaaccacgcgtcacctcgccctcagctacggcgtgagcgccatatatatgcccaacaaaagtacaggccacgagtttctccaagccgccctgcaacacctcctcgaccacaaactcctcacgctcgaagaccgcatctgctacctcggttcgcaccgcaaggagcagagcacgagctttatggaactggacgaagtgcgcgacctgctgcccgactacgaagccacgtgtcaaatctaaaatctcggtagatgcgggatggggaagcagcgtaggcgcaggagatagatgctcgctttgacctgccgcctatgccccatctgccccctccctcatctgctctcgttttcctatctccccaccctccaatttttcctgtttatgtctaccatcgcccatcaatttgccgaactccttctcgacgttcagtgcatcaaactccaacccgaacagcccttcacttgggccagcggatggctcagtcctttctattgcgacaatcgaaagaccctcgcctatcctcacgttcgcacctttgtgaaagaccaattggccgccctcgttcgtgagcgctatccgcaagccacagccattgccggtgtggccacaggtgccattgcacaaggggctctcgtggccgatgcccttaatcttcccatgtgctacgttcgttccaaggccaaggaccacggtatgggcaatctcatcgaaggcacgctgcccgaaggcgccaaagtggtggtggtcgaagatctcatttccaccggcggcagttcgttgaaagccgttgaggcgctccgtgccgccggatttgaagtattgggcatggtggccgctttcacctacggtttccctatcgctgccgaagcctttgccgctgcgggcgttgaactcaccacgctcacccactacgaagctgtggtcgaaaccgcccttgcctcaggctacatcaacgaagcccataagcccctcttggcggaatggcgcgctaatcccggtgcgtggggcaaataggctttatttacaacacatccttctgacatgactaagtacgaatcgcaaatttacaccatcaatgcgccgcaggatcaggcttatgcccgcatggccgacctccgcagttttgagcgcatcaaactcgccctttccaatcccgcagcgttggagcaaatcctcgcccaactgcccgaaggcaagatcaagccggaacagattgagcaggcacgtgagcaaatcgagaaaatggagtttaccgaagacaccctttcggccgattccaaactgggtcccatcacgctggccattgtggagcgcgatgcccccaaactcgtgaaacttaccacgcaaaatgctcccgtcagcgccacgctttgggtgcagttgctccccaagggcgaagcacagacggcactgaaagtgacggtgggggctgaactcaatttcttcattcgtaaaatggtggaaaagcacctcaaacaagcgcccgacggcattgcttctttcctgagcaatgtcttggccgtggggtagccctttccgtaccttcttctttctcgacaacgacggagcgcacccctatcccttagaggtgcgctccgtactttttcttttcgtcccgatgttcaaagcgtttttctcctttctctgtgcgctcctgctggggctgatgagtgcctgcacgaacgatgtggtgtcggtctatgctccgcaccccgcctttctgcgctatgctcccgtgcccacagcgcctccgttgctgtcggcgctcaacagtcccggccagtggtgctccatcacctacacccacctacaatacaccatcgccgcgcccggccacacgtccatcaccaccccggccaccgcgctcgatgtctacggccgcccacgcagcattgccggttttatcgtgggtacgccctcgctgcccgaagccaccggtctgcatgaagcccgggcttatgacctcgtttgcccctcctgctatcggactttgagcatcgcccgtgccctcaccctcagcgctactacccccgatcgggctgactgcccgcgttgtgcccgccgctacaatctggccacaggcacgcaggaaaatgcccccaaggacaaccaagacaatgcgcccctttatcgctaccgcttggcctacaatcccgcccaaggcgtgatggtcatccaaaattgacccttcgcctaaaaactctgcaatcttcctctgttctcctcgttctgcaaaaaataagaccgtacccgaagctaaaaagctgggcgcggtcttttaggttgaaaaaccttcggcatatagccttattgtgataagatgtataatcgcgagcaaaaataagcagaaaaagtgattcttcaaaactttttaaacaaaaaattgtggggatagaaaaataagtgtacttttgtgctgtgagaatgtgcttttttgtgttctctggttctcttttgacgatacaacctacttaccatttacaatctcctcatcatctaatttccatatttttctatgcaacgagttttaggcatcgataccggcaccaacagccttggatgggctgtcgtagatcgcaacgccaatgaacaaggcgactacgctttgattgataaaggcgtcgttattttcgaagaaggcgtgaacaagggcaaggaatcttctaaggcggccgaacgcaccgggcatcatgctcttagaaccggctattttcgtcgccgactgcgcaaaatcgaaaccctgaaagtgctgattgcccacgagctttgtccggcattgagtgaggaggacctgcaccgctggagaacaaagaagatctatcccttgacaaaagacttcatggcgtggcaaagtacgaacgagcatgaaggacggaatccctatgcctgccgccatcggtgcctacacgaacaactcaatcttgaagacacggccgaccgcttcgtgttgggtcgtgcgctctatcatctctcccaacgaagaggctttttgagcaaccgtttggacagtacgcccgaaaaagagtcgggggcagtcaaggagggcatcaaagatctttcggccgaaatgcaaaaagcgggtatggagtatttgggtgattatttctaccacctttatgctacaaagggcaacaccgtgcgcctacgtgcgcgttacacccatcgcgaggagcattattataaagagtttcaagccatctgcagaaagcagcagctcccccaatctctgtgtaaagccttggagcgcgccctttatttccaacgtcctttgcgttcgcaacgacaaacagtggggaagtgccccttcgaacccaacaagtcacggtgcgccctgtcgcatccggcctatgaggagtttcggatgctccagtttgtcaacaacatcaaagtggtggacatcgatgctgccaccgacccgcttggcgagcagaaaaaactccctatgcgcccactcaatccggaggagcgagcactggccatcagtcgtttcaccttgaaatcgcacgcatcaaaatcgaccatcgactttgaagacattgccaaagcgattgccggcaggggacagtatcagcatatttcggaccccggcgaacgtgcctaccgcttcaactatcgtatgaagcaagggtttgccccttctcgtaccaccattgcacttcgccaactatttggtgaagactatcgcgccggtattgccgaatgttacacccaaaacacccatcgcgacaacacacccaaaactttggacgagatggtgaccgatgtgtggaacatcctttactccgtagaagaagacaaacatgtggtgcgttgggcaaagcgctacctacaattgtcggataaagaggctgagcagttttctgaaattcgtttgatttccggttttgcaagtttgagtcttagcgccattcagaagatgctgcctttcttgcgagaaggctatctctattctcacgccgcgttcttggccaatgtatctaccatcgtggggagtcagacttggacagcacaccaagatgagattttgcacgatatccgttgtattttctccgatgaaagcatccgcggaaacgatggcgtctcacaagccatcaaggattatctcaaagacaattggaccgatgagccgggggcgaccgatcgactctaccacccctcgcaactggaagtatatcccgacgccaagcgcaatgcgcaaggcattctgcaactggggtcgccacgcacttcgtccatccgcaaccccatggcgatgcgttcgcttcacgaagtgcgcaaactcataaacttcctgctgcgtgaggggctcatcacgccccagacggaggtgcacatagagtatgcgcgtgaactgaacgattccaacaagcgcgcggccatcagagattggcaaaaagatcaagaaaaacttcgtgccaaggcagtgaaagaggtgagtgccgtgctcaaaggaggtacgcccacggaaatggacattttgaaatatcagttgtgggaagaacaaggacgttattgtttgtatacaggagatcaaattgcgcccagcgacttcctctgcgccaatcccctttacgatattgagcacaccattccccgcagtgtgggtggagatagtaccaaagaaaaccttacgctttgcaatcgtcgcttcaatcgcgaagtgaaacaggccaaactgcccacagaactggcaaactacgaagacatcaaagagcgcctggaaccctggcgtgagaaagtggagaaactgcggaaggcgctcgacaaagcgcgcactttccaaggcatgacgaagaaggcaaaagatgacaccatccagaaacgccacaaactcaagatggaactcgactactgggagggtaagttgcgtcgctttgagatgacggaagtgcccgaaggcttcagtctgcgtcaaggtatagggattgggttgatcagcaaatatgccggtctgttcttgaaatcacttttcaaatccgaacatcttgaccgcaatggaaagaaagtgcccaatgtacgtgtgattaaaagcccgcttacagcagagttccgccgtttgtgggaactgcaggaagattatgaaaagaagtcgcgcgacaatcacgtgcaccattgcatcgatgccatcacgattgcctgtatcggtgctgcagaagcacgagatatggctgagttttatcgcgcagaagaggcgatgcgttggggacgttccggcaaaccgcatttccgcaaaccatgggctaccttcactgaagatgttaaagccatcgctcaagatctccttgtggtgcaccataccgccgacaatctgaacaaagcagcgcggagaagggtcaaggggagtgatggcaaacttcacctctccatcagcgactctgcgcgggcgagcctgcacaacgacacgtattatggtgccattcaacaaggagatatagtgcgctatgtgcagcgtcgtccattgtcgggtatgaaagaaaccgatattaaaaacatcatcgatgatgctgtgcgcgaaaaggtggaaaccgccattcaaaaatggggaagccttgccaaagccattgaacaaggtatctttatgaacgaggaaaaagggatacgcattcaaaaagtgcgctgctatgcaccatctaaatactctaatttagcgcatattcgtacccaccgcgatgagtctcgccatgattataaacgtactttccatgttgctcccgatggtaactatatgcttgccatttatgaaggcaaggtaggttcccgcatcaaacgctcatcgcaaatcctatcctacctcgaagccaccaaacttttcaaaaaaggagcaactcgttccacattgtttcctgcaacctacgagggactgaatttgaaatacacccttaccaaaggacaaatggtactattgctcaatgaaggagaagaacatttggacttcagtaacaagaagctgctggctcaacgattgtttgaagtggttggaatagcgtatgaagtagcagcaaaacgaggttttattacgttaaaacatcaccaagaggctaaaccctctggagagttgcagtttcaaaaaggttctttttcatccgaatcttggagaagcacatatatacaagctcatactcaattccgtgcgctcatcgaaggacgagattttctcatttccaacgatggaaaaatcagcccccgatgaaacgtgtgctggttttcacccatccgtgccggcttaaactgcatttgagccaaatcgtcattactcgcgaagaggaggaagagcgcaaagtgcccatagaagatgtaggtctattactattggagcatcagcaaatctccattacccttcccttgctcaatgcacttgccgatgccgatgtggcggtcgtcatttgcgatgaggggcatgttcccaacatctactgccaaagtatgaacagccatagtttgcagggcgaacaactccaacagcaaatcgatgcaggacgggtgctcaacaaacagctgtggcagcaaatcatttcgcaaaagattgccaatcaggctgccgtactcactacagttgggcaatctccactttcgctcattcacctctcccgtcatgtaaaaagtggcgacgcagataataaagaagggcaggcagcccgcatctactggcccctactaatgggaagcgattttcgccgagagcgcgaggcaaagggtgtcaatgccttgctcaactatggttacgccatcctgcgtgccgctacaattcgtgctttaatcagctctggtctgctcccggctttgggtatttttcatcaccatcgcagcaatgcctatcctttggccgatgatgttatggagccttttcgcccttttgttgaccacattgttttctctttggtaaaagaggatgaaatggaattaacgacttctgtcaaacagcgattggtgcgagtgctcttctccgataccatcatcaaggaagaacgttcccctttgatgatagccctcacgcgtaccaccgcttcattggctaattcatacgcagaaaagtctcctctcctccttcttccctcttttgtggaaatggggtaagacttcttctctcggcttcaccattcctcttaatttctccccattatgtctgaggttagattaaatgcttatcatatcatgtggctgatagcaatgttcgatttacccaccatgacaaagaaagagcgcaaagatgctgcgcttttccgtaagaatttagagcaagatgggtttgtgatgtttcagtttagtgtctacatgcgtttctgtgcctcgcttgaaagcgcagaggttcatctcgagcgtgtacgcctgtctgtcccagatcatgggaaggtgagtatccttacgattaccgaccgacaatatggcaatatcgtcaacatttggggagctatcgagaaaaagaaaacgcctcaacccatacaactggaatttttttagtaattttgccaagataagatacttacatttccacttcttagagaactctgcacttgttatttcattgtcttttaaacctttgcatttcctacgttgtggtttgatgtataaccgccaatagaaacacttgaagcgtctacgactccattggcaagacggttgtggtttgatgtataaccgccaatagaaacacttcgcgctgcaaatttagcaaacaacttacggttgtggtttgatgtataaccgccaatagaaacactcacttcccggatcgtctccccgagatgaaggttgtggtttgatgtataaccgccaatagaaacactcagtcgtaaccgagtatgacgtggattatagttgtggtttgatgtataaccgccaatagaaacactaatcactcgtactaatgtcacccttgttcagttgtggtttgatgtataaccgccaatagaaacactcaatctcattacgttccttaccaagcttggttgtggtttgatgtataaccgccaatagaaacactaaatgtaaccccactttgtaatcccacgtggttgtggtttgatgtataaccgccaatagaaacactgccatcggttcagtcgtcccagtcatcgggttgtggtttgatgtataaccgccaatagaaacactgaagccgtcatattctctttacgccaatcggttgtggtttgatgtataaccgccaatagaaacactgcatgtgatggtggtcgtgagcaagagcgagttgtggtttgatgtataaccgccaatagaaacactcaaatagttgaaatcatgaagaaatcaccgttgtggtttgatgtataaccgccaatagaaacactgatgctcgcccaggctggtcttaccgagtcgttgtggtttgatgtataaccgccaatagaaacactggaaatatggacagataaactccgtattctgttgtggtttgatgtataacccggtaaggcgagcggaaaagtagcaaaagatatttgaacagatttgttggatttctcactcgacagagcgatcccaaaaggagtgtcctatggacggaaatcgaacaaatctgttcaaatcaaacaaatcggaatgttttcgttcagccgaacgtactgagacgaaagaggagttttgagcaattccgtgacgagaaaacatctgtaaaacgaatgttttcgtaggatgaatcgggacgaatacgctgctcgcgacatcgggtttctgcttatcttcctcagaggtagtcttttctatctcagaggtagttgaatttagctctgaggtaaaatttccccgctcctattgctttctctcgcgcgcgtatgcgcgcgtcactacatgtaagtcgtgttttttgccttcactgccttcacctggagagacaaactgttgaaaataaagatgttatcaatgaaggcgaagccggtgaaggaggtgaaggatgaaacacctcttgccttcacccgcaactcgctgtcgctctgggacttagttcttcgggtgaaggcagtgaaggcaaaatgcacacactattgtagggatacgcgcgcgaggaaggggaaaggatgggcaggtttcgggtgcgttgctctttgtggaaatagaggtttaagagtggttggcctacacctccatcgtgtaccatccggcccaggtgtcgccgggggcagtgtgctggatgtagggacgcccctcgatgttgccggcaaattcctgcgggtcgcagaggccataccaaggttcgacgcagaggaatggggcgtgctgtccctggggcgaccatacgagccaaaccggggccgaagaggcgaagcgcgcgatgcgttgcttgcgaaggtcaagcacctcgatggccgatagttggttgcggtcgaaaatcagtgcctcgttggcaaaggtggtcaccgagatgggcacgagggcattgacgggctggtggcgggcaagggcgttggaggtttcgatgtcgttgctccaggggatgggcacgcgcttcggttcggtgcacccttggagggaagcgcggaggaggtcgatggggcgaccttcaaagcggaggtagccctgaacgtcctgtccttcggctttccagtcggggaggaggagcgagggatgtccgcccatttggaaatagagggtggaggcggaggaggggttgtgcacacggaggtcggcacggagtgtgcggctcgtgagagaataggtcacttcgaggtgatagggccaggggaagatggccaactcttcggccgtgttttcaatggcaaaggtgatgctgttgcctgcgggtgcatttcgggtttcgggaacgcgcgtccattcgcgcttgcgcacaaacccatgtttggggatggcgtaggtttgaccgttgatgcggcaaacaccgttccacattccgcctacgatggggaagaggatgggggcacggcccttccaataggctgggtcgccctgccagcagtattcttggcctgtgttgcggtcggtgagcgattggagttctgcaccttgggcagagaacgtggcttgtaagtgctcgttttggagagtgaagagtttctgcatagttcagaggatgttggtggagcaatctcctgtggttatactttttcgtactaagggttacacgggcaaaaatacaaataaaattcggaaatgtgcgctctgactgttaaaaaaatcacgccccacatctttacggatatggggcgtgttgaggagatcagaaaaaggggaatttcctttttgtaaaatagcatcaattcttactgatgcgcgcctgctgccaagtgcgccaaagcgcgaaagcgagggcgagtgccagcagggcgagcgcagcgtaggcaatggcatcggtggtggccaccgaagtcgggcggaactccagacggagttcgtggcggccggcggggatgcggagggcgcggagcacatagttgacccgtccgatttcgaccggccggccatcgatggtggccgtccaccccggataatagatttccgaaagtacaagtacaccgcccttgtcggtctgtgccgtgtagtggagttcgttgggggcatagtgggtgagctgcaccgaccctgtgccgaggggcgaaccatcgagttgagccttgaagcgcacatcggccacggccgccgtcttcgtgtcgagacctttgagggccgcgatttcggcatcggcgttcggcacgaagcgaagtcggtcgacaaaccacgcattgccgttggccgcgggattgcgcatcgcgattttgccctcggagaggatgaaccaacgggcgttgagcatgttgaggatgggcgtttgcgcctggtcggcataggctttgctcacttcggccatcatcgaggcttcgtcatggatgccgcgcgcagcaaagtggagactgtcggccatgacagccttttgggccgactcgatgccgcggtgggcagcgttgcactcggcgatgaggtagcggtcgatgaggtcctgatagcggtggagtttggccgcatgatagccgccgatggacttgtggcggaaggccgtttggttggtcgattcgttgaaggggttgccctgtgtgaggttgagcacacgatagtcgagggctttgtcggagaggatggtcttgtcggccggggtttcagcaaaaccttcgaggcgttcgttgggatcagagaaattgtcgtcgttgaggtagcggcgattgacattccacaagtcgcccaaggtgaggacgaggagcacgatcactacgctccaagccggcaacaacttgggtttgcgtacatagagcagcaagagagcagcggccacggtgatgagggcgaaagagcgccaagcggtggtcgagagtatggcggcgtgcatcgtggcgatggcactgcggtagcccgtcaagaagtcggccggcataccgagattttgcatttgatcgaacatctgcaggtcttgtgacgacatcaggttggccagactgggggcgagggcaaaaaggaagcagacgcctgccgtaagtgctaaactgatgccggcaccgatgcggttgcggcgttctttccacacgccttcggggtcgctcagcacgcgcgacagtccgaggatggcgagcagcggcagggtgaactctgccaccacgagggccgaggagacggtgcggaacttggcatacatcggcagatggtcgatgaagaagtcggtgagaggcatggtgttttttccccaagcaaaggcgaacgagaggagggtggcggccaagagtgcccacttcatcggtccgcccacgatgaagagggcgagcacggcgagaaagacaatgattgcgcccacatagaccggtccgacggtcatgggctggtcgccccaatactgcgacatgccgggcagataactgccgccggtggcttgctgcaactgcgaggcgtgttggtagaagtcgtcgtagccttcgaggtcttcgacgccctcgcggtccataatgctctgcgaaccgccgcctttgaagtcgggcatgaggagggtgagcgtctcgtccacgccatagctccactgcgtgatgtagtcgcgctccagtccgccggtggccgctttgccatcggtgggttgcgccttcgtggtgagttctccctttccacgcatcgactctttggagtattcccacgtgtggtagaggttggggaggttgatgagcgcaccgagcaatccgcccaccaccacagcggcagtggctttcgcccagtgtccccactgtcgctgccgcagggcgtcaatgccataggccacgacgatgaagagcatcgggaagaggaaatagtaggtcatctggatgtggttgctcagcacctgcaaggcggtgaacagccccgtgacaatcagtccccagaggtatttgccgcgataggcgagcaccaatccggcgatggtgggcgggatgaaagcaagggtattgaccttccaaatgtgtcctgccgcgatgataatcagaaagtaggtcgagaacgcccacgccgtagcgccaaacgccgaaagcaaggggcggaagcggaaggcacgcatgagcagatagaacccgaagagatagagaaagaggtaggagagcggaccggtggtgaacaagcccacgatgcgtcccacccagccgagggtttcggtcgggccgtaggtcggtgcaatctggtaggtgggcatccccgaaaagatgctgttcgtccagcgcgtacgttcgcccgtggcttcatagaaggccgcttgttcctgcccttgccccatgccggccaccgtgtcgtgaccaccgagcacaagcccgtccagaatgggcgtggcaaaatagaggaaactcagcagaagaaaagacagcacgaccagcacatccggccatgagcgtttgaggagttctttcatgattttggaagttgggtaatggttttacgtgcaaagatacatcaacctcggcgaaaaatacgtatatttgccggaaaatatcatccccaaccttatgaaacttggaattatctctgccatgacggtagaacacgagcaaatgtgtcgtttgctttcccacgccaccacgttcaccgctgcccactacaccttcacccaggggcgcatcggaccccacgaagtcaccctcatgcagtgcggcatcggcaaggtcaatgccgctatcggcgccacccacctcatcgcccatacccgccccgatgccatcatcagcaccggttgcgcgggaggcatcgacacgtgtttgaacgtgatggacgttgtggcgagcagcgccctggtctaccacgacgtgtggtgcggcgaaggcaatgcctacgggcaggtgcaaggcttgccggagcagtttgccgcagatgcccgcctcctggcggctgcccgttccttggcggaacatcccgaggtgagcactcccatccactgcggcctcatctgcacgggcgataagttcatcaccgaccgcgcccaactcgatcacatcaaaagcgagtttcccgaaggcttggcggtcgacatggaaagtgccgccatcgcccatacctgccacttgcacaacgtccccttcctgagtttccgcatcatcagcgacacccccggtgttgaagcccactgggaacaatatcaggacttctggggcgaaatggcacaccgttcctttggtgtcacacacacattcttagcacaactgcccgaacaattgtaagaggtgcactgccctcagcgtctacgcccctcccctttcgtttcatccccttcccgcctttttgcaccatgtcttcgtcttcctgcatttttcgcttcagtctccgccttttcggcctcgctttcctgctcagcacactgccggcagtcttttctctacgaacgaacgcacagcccttgacggccgatacccctgccgctactgctgccatcctcgacacggctcaaagtcgcaccctacgtttggaggtcgagggcatggcgttctttcacgacaacgagttcgacggcaccatcagcaagggctattcgctccccggatttcgtgtgcagccccgcttggtctatcagccgttgccccacctccgcttggaaggaggatttcacgcacaggtctatgagggcgcgggaaaatatcccaactacgccttccacgacatcgccacgtggaagggcacacaatggcaggaaggggctcacctgctcccgctcctccgcgccaccgcccgcctcagtcgctccaccacgctcgtgctgggacaagtctacggcagcacgcaccacgacctttccctccccctctacaatcccgaactcgctctcagtgccgaccctgagatgggcgcacagttgctcgtcgacacccggcgctggcagatggacgcgtgggtcgattggcagagttttatttttgagcaggacacccaccaagaggcattcaccgtggggatgacccaccgcctttggctcactccgcgcgcccaccgcagttttacgctctcgctgccggcgcgcctcctcgtgcagcaccgcggaggcgaacaggacctgccgagtctcaacctcggcgtgcaaaccctcagcaacgcttcgctgggacttgctgcgcggtgggagcgcccttcgggagcgttgcgcgcgcttgatgccgaagcctcggcgttggtgagctaccagcaggccggccggctctggccttggacttccggtggtgcgggctggctctccctcacggccgactggcgcagcggctggcgcacacagttggggttgctctatgcccaccgctttgtttcgctctatggtgcccccttcttcggtgccctctcgctgaaagaaaaaggcggacgattttcctatatgggcaccggctacgtgggggcggaatacgctcgctctctcggcgccggttactcctggggggcgcacgtctacctctatctcacgcggcagggacggctcaccttccccgatgcccgccctgcgcaggccgagcgctgggggaatgccttttccttcggcctcttcctccgtttccgtccctctttcctgctcaagaggtggtgaatgctgttgattccggcgtaaggagaaaatagcagatggtaagtaggtcttcaaaattagacatagcaatctcagaggaagtagaatttatctcagaggtagttttttctatctcagaggtagttgaatttagctctgaggtaaattttccccgctcctattgctttactccctcgcgcgtacgcgcgcgtcactactatgtaagtcgtgttttttgccttcactgccttcacagggagagacaaatgtctgcaaatgagggagtttccggtgaaggcaaagccggtgaaggaggtgaaggatgggacatcttttgccttcacccgcaactcgctgtcgttctgtgatttatctcatcgggtgaaggcgtgaaggcaaaatgcacacactattgtagggtacgcgcgcgaggaagggcgggactgttttctcctctcgttttgtgcgaattgcaggaagtcggtgaacgaaatgaaattattgatgtccggtaaaagtttttttgctgtaaaaaaataaggctgaaatcctcttgtaggatttcagccctgcactttcaaaatcgaagtgcaaaaaaagaatgaatcgttacactccgatttttaaagtacaaattgactctacgttgaaatttattgttacatttgaggtgtccttaatcatttaaccaacgtaagcccatgaaacgctttctttttctccctttgtggctgattttatgctgctactgttgcatttgcaatgcgcaaacttccttacctaccaatgcgattaagataggaaaatgtgtggtacgaggcaaagtgcctgcaatgctcgctatgaagttaagtttaaccgtggtgtataacgatttctttgcctctaatgctgacacgtatgatttaagtattgacgctgaaggcaatgtaagtggagagcttcctctgcattcgctttatgcgcatgctgctgtgcagcttgatttggaggagaacagtcaaacagagtttgttttgctttcgcaaaatgatactttgagagtttgggtagataatcaaaagaacttgaaggcagaaggggcaagatgttcttctgtttttaagagtttcgattggctaacctttgtgtttgcttctgatcgataccttccccaaaagcagtcaagcgtaatcgccaagttccctgttaaaaagataag

SEQ ID NO: 1641 - DNA, 23675 bp, synthetic construct
  misc_feature 1..23675: note = Synthetic
  source 1..23675: mol_type = other DNA
gaagtgaaacgcatgttgcagagtcccgataagaccgaactgatagatagcttctataaagatttggaatttggcacgggaggtctgcgcggcattatgggggcaggaagcaaccgtatgaatatctataccgtaggtgccgctacccagggattatccaattatctgaataagtgttttgccggcaaggggcaaatctctgtagtggtagggcacgattgccgcaataacagtgataagtttgccaaaatcactgccgatatcttttcggcgaatggcatcaaggtgtatctttttgaagatttgcgtcctactcctgaagtgtcatttgccattcgtcatttcggttgccaaagcggtatcaatatcacagcaagccataatccgagagagtacaacggctataaggcttattgggatgatggtgcgcaagtacttgcgccgcacgatacggctattatcgacgaagtgaataaggtaacggtggatgacatcaaattcaatggaaataaagatctgattcagattatcggtaaggaggtggatgaagtttacctgaaacaagtgcataccatttccatcgatccggaggtcatcaagcggcagaagaatctcagcattgtatatactccgcttcacggcgccggcagagtgctgattcccgattcactgaaggtgtggggctttgaaaatgtgaattgcgtgcccgagcagatggtgaaggatggcaatttcccgacggttgtttcgcccaatccggagaatgcggaagctttgactttagctattgcgctggcgaaaaagatagatgccgacatcgtaatggcaagcgacccggatgccgaccgtgtaggcatggcttgcaaggatagcaagggcgaatgggtacttatcaacggcaaccagacttgcctgattttcttatactatatcatcaagaatcgcattgcaatgggcaagatgaaacccaatgatttcattgtaaaaaccattgttactaccgaactcatcaaggctgtggccgacaagaacaagattgaaatgcgcgactgctataccggcttcaagtggatagcccgtgagattcgcctgagcgaaggcaagcagcaatacattggtggcggtgaagaaagctacggcttccttgccgaagactttgttcgtgataaagacgctgtttcggcatgttcactgctggccgagatttgtgcttgggcaaaagatcagggcaagacgttgtatgatgtgctgatggatatttatgtggaatacggtttctccaaagagactaccgtcaacgtagtgaagccgggaaagagcggtgcggaagaaataaaagccatgatggacaatttccgtgctgattcgccgaaagaaatcggtggctcggctgtgtgcttggtgaaggattacaaaaccctgaaggctacggatgcccggggaaatgtaacagttttggatatgccggagccttcgaatgtgcttcaattcttcacggaagacggaacgaagatttctgttcgcccgtcgggtacagaacccaaaataaagttctatatcgaagtgaagggtgaaatgggatgtcctaaatgttatgccggtgccaatgccgacgccgagaagaaagtggaagctgtgcgtcaatcgctcggcatctgaaagaaaatcaaaacagattctgattgctgtccgctagctccggcggacagtaatcattgtttatactcttttgaagcatgtttgcaatgcttcaactccccccctccaatattctacctgcatctcatcttactcatccgtagcagcgtgttatctatataacacggcaaagtctgtactgcgataccggctataggttcatcttttccaagccttatgcaataaggaacaaacaaatggttctttttctttttctcagactgtcgttttggggttgagatactgtccgtggccggcactggcaccataattgatggcattcttcgggcaacggtgcaggcaaccgagacagatggcacatttctcttttgtccacaccggatgtcggtcggtggggctttgcgcattggcattcggaaccatcgtgatagcttgaaccgggcacttcttttcacatagggcgcaaccgatacacttattctcgtccacgcggaagcgtttggtctgctgttcatacgagagcaggacactcattatccgtcgcataatgtatggcaggcgaatgcaagtgtgattacctgtcacacgatttctcacttgcccgattacccggtcaatcctggtttcagccatctcaatgattcgagcgatatatttcttatgattggcactgaagataggagtgaagttttccggcatatggatgctgaacgatgcattcagcgtgataccacggccggcaaacagacggcgtgcatcttcaccgcttgcgccgggcagtaaaccgaaagtggacacataaaatatgtagttgttttttgccgtcgtgaattgcgttttcatcagaaactcacgtgccggcaacgacacccccaaccaattggtgggtgccactaaaccaatgacctcattatcccgaaacttgatggtagcaggggacctttcaatagaacagacctcttcgccgagagccttgccaatgcgctcggcaacatacttgctattgcctgtggcagaaaaataataaatcatatgtatcgtttaatcataatacgttcggcaataattgcgactgcaaagatggttctttttcttcatttcatgaataggttgggcctgtttatatcggattttacattatctttgtgccctgaatctgtaattttgggtgtatagtggattggctatatgatttatttgtcgaacattccgctttgcaggcggttgttatcctctcattggtctctgccatcggtctgggactcggaaaattgcgtatttgcggtgtctctctgggagtaacttttgttttctttgccggcatcatggccggacacctcggtttgtccattgattcacagatgctgaattatgcggaaagtttcggattggtaatattcgtgtatgctttgggcctgcaggtaggccccggctttttcagctctttccggaagggcggagtgcaactgaatatgttggctgcgggagtgatactcatcggtaccttgatggccgtactgggcagctatgccttgaaaatatccttgccggacatggtaggaattctctgcggtgccgtaaccaatactcccgcgctgggagcggcacaacaaaccttgaaacagatggggctggaatccaatacgccggctttgggatgtgcggtggcatacccgttgggagtggtcggggtgattttggcgatactggccatccgtaaggcgttggtgcgtaaagaagatttggagctgaaggaaaaggaagacgcgaacaagccttacatcgtagcctttcaggtgcataatccggctgttttcaataagagcatcagagagataggagggctgaacagctatccgaagtttgtaatctcccgtttgtggagggacggaaatgtcagcattcccacttccgagaaggtgataaaggagggtgaccggcttttggtgataacctcggaaaaagatacaccgtcactgaccgtactcttcggtgagcaggaacataccgattggaacaaagaagatatagactggaacgccatagacagccagttgatttcacaacgcatcgtagtgactcgtcccgaactgaacgggaagaaacttggctcgctccatttgcgcaatcattatggcatcaatatcagcagagtatatcgcagcggtgtgcagttgctggccacggcggaactgacattacagttgggcgaccgtcttacggtggtgggagaagcggctgccatacataatgtggagaaggtattgggcaatgctgtcaagagcctgaaagagcctaatctggttgccgtgtttataggtattatcataggtctggcattgggtgcgattcccatttccataccgggcatcagtgcaccggttcgtttagggttggcaggtggccccattatcgtgggtatccttatcggcacgttcggccccagaatgcatatggtgacctacaccacccgcagtgccaatctgatgcttcgtgcgctgggtctgtctctttatctggcctgtctggggctggatgccggtgcccatttcttcgataccgtgttccgtccggaaggtttgctctgggttttggcaggatttatactcacggttgttcccgtgcttatcatgggcattgtttcctttaagtggatgaaagtagattacggcactacggcaggcatgctgtgcggaagcatggccaatccgatggctttgaactatgccaatgatacgattcccggcgacaatccttccgtggcttatgccaccgtttatccgctgtgcatgttcctgcgggtcatcattgcacaagtgttgctgatgttcctgcttggttgagcttgaagagtactactccggcttcaataatcacccccttgtcgtaacacttgtttcgggtgtagtggcgactgctgccgtagcctcccgtaagaaatacgccgagaccgtcgtgcaggcggtactccagattgacacgggcttgcagggcatagaggcgtgcaggtgtctcttcacttttgttcttgaacgtttcgatgtgttggtagccgaggtctccgctgacgaataactgcttgtggagcggaagctcaagtccggcccgatagaaaagagctgctgagaacttgttgccgaagtcaagatagtgagtgccaccccccagaacggtataaaacagcttgttcttgaatcgggctcctgcattcagtttggcggcgtttcccgcaaaaagcatcaactgcacttgggtctgcggattggcattgaccagtcctaattggaatccgtccaagctcttcttgtaatagttgaacaggccgatttggacacctttggcctctatggccatgttggcggcgcctacttgcactcctttggccgtgccgccaaccacattgccgatgccggaaaactgaatgccggtcatgttcccggcaatgatgttggccagggcggaaaactgcgctccatgcagatgttcgccgacaatgctcaacaaacccgcacccgcaaagcctttcagacttccccctgagacattggccagtccggcaagttgcataccggcggcatcatcaccgtttatattcaacagaccgcctgcgctgatgccgcggctgcggtttccattgatcattgccaatccggagagagtgaatccctttgcattgtttccggtgatacctaccagtcccgagacggatactccgctgaggctgttgttgatattggtgatacctgccacctgaatgcctttcatcttcttctccaccatggcgccgagtatattcacccccaaaccgttcaagcgattcatggaagagaatacgccaagattgagccaagtgcttcccactgtgtcggtgcgttgggtggatacatctttccatagggagatgttgatgcctctcgaaacctgataatatcccgttcgcggagcattctgtttgccggaatggctttgagcaagaattgttgcaatggccggcaatgccagcaagatgagtgaaagaatccgtttcatttttatccttataattcgtccggccaaggagcaggttgtccggtggcacgaagtagggggcgctgcgcatctaccgaccggaggtatttacttagttttcttgacaacttcttgacgagtgcaggcttctctccggccctgtcatgcttctcactgatgtcagcaggaatattgaagagttcgcattttccgctaccgaagtaatacaccagtttccagtcgcccgagcggatggaacaggtggccccgatgcccggccccgatggtccccagctattcggatagtgccaatagatatcacgtttcttcattttaccttttccggtgagcagaggcatgaaactgatgccgtcgcgttgttgcaccgttttatacttatctacgcccgccatttcaaggatggtagggaaaaagtcttctatcatcagataatggtcggattttgttttgggtgctattactcccggccagcgcacaatcatgggttcgcgtacaccgccctcataagcggaaccttttccgctgttaagcggatagttctgaatgtgcagttggccggcacgggtatgggcggccagaccgccgttgtcggacatgaagatgagtactgtatcatctgtcaagttgtttttgtccagatagtccataatatcccccaaacttttgtccataccttctatgagagtggcatacgctgcttctaccggaggaagccccttatctatatacttccggtagaaacgcatatcaggttgtatgggagtgtggatggcatagtgtgccatgtatagaaagaaaggcttatccatctgctgtgcattgtccaatgctttcaaagcctctatggtgagtgcctcacttaggaaaatgtctgttccgtgatattgctccaggccgggaacggcggcgggaggacttatgccgtcaaccttattgccgaaattcgctttgccatagtagctggcgggcgaaccggcggcatgtccggcaatatttacctcaaaacccattttaagagggtcggccccgggggtgtcttcggcgccgaaatgggctttcccgcagtgaatggtgtgataaccgttgtttttgagcagttcggccaaagaagtgacctgcgtggtacgttccacttccggttcctgacaaatgccgtttacgttccatgccggatatgccatgattgagtccggctgctcatgggtggtgtttttgtgtaacgtccaactggtgacgcggtgtcgtgccgcgttcattccggtaaatagactgacccttgtgggggagctgatgctgcaagcataggcttgtgtgaacattttgccttgttcggccattcgttccatgttgggcgtatggtatgtgtcgttgtatcgggtacgccggttccaaaaaggcaaggaggtgtcctgccatcccatatcatcgacaagaaacaagatgatattgggttgtcttttcggagtagatgcaacgttgccggtggctttctcatgaacttctgccttcatcccgcatatcggcagtatggcggcagataacagtaattcttttttcatttatatttctttatcctttggcttcttgatacaagaaacgtttgattgatttcttaggtgttttctcaaactcttcgggataaatcttcatcttggagatttggctgtatgccggtaattccgcattcaaggtcgtgcggttttcttccatgatgcgttccaaatcatcattgttgaggccgtgggcaaaggcgtcgtcaaaatcgggataaaccaggcctacaagcttctcgttctgttgcacgatgatgctttcggccacatacggcaggttgttcagtttgtcttctatctcttcgggatagatgttttggccgctcggtccgagaagcatattcttgctgcgccccttgatggttacgttgcccatggcgtccatcagggcaaggtcgccggtatgcagccagtcgtctttgtcgagcacctcttcggtggcctccggatttttatagtagcccagcatgacgttggggccacggcaaacaatttctcccggaatgttttccgggtcgggcgagaggattttcacttccatgcgcggtgcggccttgccgcaagaaccgggtttgaagcgagcccagtcttcgtagcagatgatgggagcacattccgtcatgccataacccactgtgtaggggaaatctatcatcctcaacaaatgttctacctcctgattgaaggcggcaccgcctatgatgacttcgacaaagttcccgccgaaggcctgcatcatttgttcgcgcactgttgcttttatcttgtcgttgatgatggggactttcagcaacagcttcatggcaggtgtttccaatttgggtagcacattcttcttgatgattttctcgataatcagcggaacggccacaatcagatttggctttacttctgcaaatgcctggaaaatgattttcggactgggcatgcgggtcaggaagaagatgtggcatcctgcggcaaactcgtagaggaactcgaatgccaatccgtacatgtgggccatgggcagcatggataccagtttgtctccggccttcagcgacagcacttcgaaagcaaaggcggtgttcgaccaaaggctgcggtagggcagcatcactccctttgagtaactggtggtgccggatgtgtagtttatcaccgccaattcttcgggttggtctttatggtagtcgatgtgttctttacggaaattcttgggatacttcttcccgaacatttcattcagatgttcgcgggcataattcaatttctcgctgcgcgagacgaggatagagaaatctgtcatcatcatgatgccctccagcaggggcatggcgctttcgttcagattctcccatacctgatcgccgacaaacaggagcttggcttcggagtggttcacgatgttgtgcacattgtcagccttgaactcatggaggatggggacgatgacggctccgtaagtcagtgtggcgaggaacgttacgccccaatgtgaactgttacgaccgcagaccgcaattttatcacctttctttatgccgcttgcctcaaagatgatatgcagcttttctattttgcgggccacgtctttatactgcaatgtggctcctttatagtcggtcagagcatccagatcccaattttcttttatactattctctatataggcaataaaactttgttccatgatataatctgcacatttgattgaaaattgcgcaaatataagggtttatatacagaatgcaaacttttgaaggaaaaaacgttttgtataagagagtacaggcgaaggtaacatttaccttttagaaagctatccccccttgttccggcttgttatgatgtccccggctggaaatatagatgtagcacgctcagcatatacttgctgaggtcttagaattcaggtaatttacattctcacaggccggttgtcttctattcgaacttgcgcattttttgcataggttgcttttcttcgagttcaccgctcttatagatgttccagatatgacggttaataacggttctatctgtttgaaagagttcactcatctgtgcttggctgagccacacggtttctccctttaacttgacatcaagttagattctaccatccttgctctggtagattacgattctgttgttcaggtttatttactccatgcacttttttaggctcttgttcgcaaaggtaaaaaatgtatatgaaaatattgccttattttattgttcgttatatatttcttaaagctgcaaaggttgcggtttattttatccacggtgtgagtaggtaaaacttacaaatgagggaaatgtcaaattctaaaacgaaatcatgcgaaactctaaaataccttttttttatcgtattcacaacaaggaagagatggtaactttcttagtaggctatcgttaaacttcctaaacgccacatgccgtttctatgatgattcccctctacataccaatatcttttggaaaggtatttactatgtgagataaaagtatataactaattgataagcaatgaaagtaaaatgtggcaatgtggatatatatattaggtattaatagttgcaggactacccccaattgtttagtatataataaaatagccccctcctaagagggggcataggacttatatccttcggcatatagccttattgtgataagatgtagaaatcttatgttacaaagatatgatatttttttgaacttccaaagaaaatgtttaagtttacacaaattttaatcatttacgcatgaagcaacgggttttgggtttggataccggcaccaacagcctcggatgggccgtggtggatagagatgagaacaactatgagctgatacgtcgaggtgatcttattttcaccgagggagtgaagattgagaaaggcaacgagtcgtcgaaagcggccgagtgcacggcttttcgggcgcagcgcagattttatttcagacgtagattacgcaaaattgaagtgttgaaagtgttggtagtcaacaacctttgcccttttgtttctgacgaggaactgcacctatggcacaccaaaaaacagtatcccaagcgcgacgaactgatgttgtggcagcggacgaacgataacgaacagaaaaatccctactattaccgtcacatctgtttgcaccgaactttagatttggagaatattgaagaccggtacatgctcggacgtgcactgtatcacctcactcaacggcgcggttttttaagtaaccgattggatacaagtagcgacagcaatgaggatggcaccgtaaaatcgggcatcggggatctaaacaaagagatggaggctgccgggtgtgagtttttgggcgattatttttatcggctttatcatgaagaaggtaaccgagtgaagattcgaaaccattatactgaccgagaagcacactatttgagggagtttaacgccatttgcgagaagcagcatttgaagtccgaagtggtggaggcgctgcgtagagcgatattctttcagcgaccgttgaaatcgcagcgtaagggcgtgggcaaatgtacgtttgagccaaaaaagcctcgctgtgccatgtctcatcctgattatgaggagtttcgccgtttgagttttgtcaacaacatacaaatcaaaacgccatatgacttggagcgccgtccattgaacaaggaagaacgtgcgcgtatactgccactattttaccgtaagggtaagtcaaacttcgatttcgaagacattgcaaaggctctttcgggaaagaataattattgttatgagaaagaggacctgcccaaggagttcaagtttaattatcgcatggcgcaaggcgtatcaaaatgtaaggttacagcgcaactgcgcgatatattcggtgatgattggaagcaaggtattgcggaaatatacttgctcacgcgcaagaaagaaggtgtcaagaccttggatgaaatggcggatgacgtgtggaatgtgctctattctttctcatcgaaagacaaactcaaagaatttgccatgcagaagttgcaacttgacgaggccacagccgagaagttttccaagattgagatgccacacgatttcgccgccttaagcctgaaagccatacgcaacattctgccgtttttacgtcaaggcatgatttactcgcatgcagtgctgttggctaacattcctgctatcgtgtcaaaagaggtgtgggcagacgaagagaagcagaggtttatcattgacaacctctatgacctcatcataaattacaatccaaaggatcgtgaagtgacaggaactatcgagtggtgtatcaaagatttcctgaagaataatttcgacttggcaccgggtattgctgacaagttataccatccatctatgattgaaacctatgaggatgctaagcgcaatagattcggtgtgttgcagttgggatcgcctatgacaaatgccgtacgtaatcccatggccatgcgctcactacacatggtgagaaaggtggttaatcagttgttgcgtgacaaaaccattgacgagcataccgaggttcacgtggaatatgcccgtgaactgaatgatgccaacagacgcaaggccattgcagactaccaaaaagaccaagagaagaagcgggtcaaatatcgcgccgatcttataggactatataaggaggaaacagggaaggatattacgccaactgatgatgaagtgttaaagtttcaactatgggaagaacaagactgccattgcctctatacgggtcagcagattgggattgcagactttatgggttccaatcctcagtttgatattgagcacaccattccgcgcagtgttggcggagatagtacgcaaatgaatcttacgctgtgtgagaatcggtttaacagggatgtgaaacgtgcacaaattcccacgcaattggccaatcatgaagacattatggtgcgcattgcaccgtggaaagaacatatagacgacctctcgaagcagattgatcgcatgcgtaccaatgccggaatacccaaggatgtgaaagatagaatcattcaaaagcggcatcgcttacagttggagcgcaactattggtatggtaagtacgaacggtttacgatgaccgaagtgcccgaaggtttcagtcgtagacagggcatgggcattgggttggtatccaaatatgccggactgttcctcaaatcgctctttcatgacccacaagaccgcaacaaatcgcatgtgtatgtggtgaaaggaacaaccacagcagagttccgaaagatgtggggattgcaaaacgaatatgataagaagtcgcgtgtgaaccattcccatcattgcattgacgctataacaattgcttgtataggcaagggcgagtacaatgaaatggcgcattattatcatgacgaggaggcttctaagcgcggtgcagggcagaaaccgcagttcaagaagccatggcctacatttaccgaggatgtactggctattgagcaagagttgcttgtggtacattcaacgccagataatatggctaagcatgccaaaaagtatgtgagaacagccaaaggcaaacacttggcaaagggagattgcgctcgcggtgtgctacatcaggacacttactatggtgctattgagcgtaatggtgaggtgaaatatgttgtacgcaggcttttatcttcttttgaaaagatagaagatttggataaaattgtggatgaaacagtaaaacagaccataaaagaggctgttgctggtaaggaatttaagaaggctatcaacgagcctatctatatgaacaaagagaaggaagtgcgcataaaaaaagtaagatgttttgctccaaacgtcacacgccctatggatattcgcaatcaccgagacatgtctcgcaaagactacaagcaaaaatttcatgtaatgaacgattctaattacatgatggctatttacgaagggattgtaaaaaacaaggttaaacgcgaatttgcaattataaagaatatggatgccgcacaattcttcaaatcgagccaagacagaataaaatattctacaatagttcctgaaaaaagtgtaaagtcgggacttccattaaaggagttactaaaaataggaatgcaggtgttgttgtatgagaatacacctgaagagattaatttcaataatcttaatgacttgaagaaacgtttgtataaagttgtaggattaagcagcatgctagtatcatccagtgaatttggtgttttaaaacttcgtcatcatgaagaagctcgtccgacaaaagacataaagttcaagaatggtaaatacatgaatgatgagcaatatcgttcgggaattaccctcttgcatacacagttctttgcacttgttgaaggtgtggatttcgatatgaatattttaggagaaataaaactaaaatcttagcctatgctgaaacgcagtttagtgtttaattcacctgccatgctatccttaaagaactcgcagttagtgattgcgttaaaggagatccccgacgaaaagtgtacgattcctatcgaagatatagggtttataatgattgacaatcccatggtgtcggttaccatgcccttactaaacgctctggcagacaacaatgtggccgtggttttctgcaatgagaagggcatgccgaacgcaatgctactcaatctgaactccaacaccacgcagggtgagactttgcgcttgcaaactgaagcaggcgaggttctcaaaaagaatttgtggaaacaagtgataactgccaaaatcaggaatcaatcagctttattaaataaaaaggggaagcaaggtgacatcttgaagccttattatatgaatgtaaaaagtggtgacagcaataatcgcgagggggcggctgcccatatttattgggtcgcactattcggtaaggaattcgtgcgcaatcgcgatttaccaggtattaatgctttgcttaattatggttacacggtgttgcgcgctgctgtagcccgtgctttaatggcgtcgggattgtttcctgcacttggtattttccaccgcaaccgcagcaatgcctttcctttggcagatgacataatggaaccatatcgtatttatgtagacgaagtggtttgcgagttgtgcgaagagggaaaaatagagctcaacaaagaaaccaaagcacgccttatcaatgtgttagtatgcgatacatcgtttccaaaagtcacacgcccgttaagcataggcctctcaataaccatggcctcactcgtaaaatgttatgcaaaagaaaatactcacctgaatttcccctgttttgaatgactgaattacgtcttaatgcctatcatatcatgtggttgttcgtcatgttcgatttgcctacggtcaccaaaaaagaccgtaaagagttcgctcgattccgcaaagatttagagaaagatggattttcaatgtatcagtttagtgtttatattcgctattgtgcttccttggaaagtgctaacgtacatatcaaacgtgtaaaaaaaatcactccagccaaaggtaaagtcagtatattaactattacagataaacaatatggggctataataaatatttggggagaaattaataagaaattaatacagacccctttgcagttagaatttttttagtatatttaccattgaatgcatctaacacgccacttcatgtgattagaaaacctctcaaaatatttataatgaggataatagacgatatatgttgtggtttgatgtagaaaaatgatataaaccaacgggtctccttcagcacacgtcccttcagagttgtggtttgatgtagaaaaatgatataaaccaacagttatggaaactttatatacgtgccggtcgttgtggtttgatgtagaaaaatgatataaaccaacacaacaataaaaagacattaaaaaagaaagttgtggtttgatgtagaaaaatgatataaaccaactttgggcaaaatttgcctacactgcttccgttgtggtttgatgtagaaaaatgatataaaccaacgaatctttgtttaaaatgctaataaatatagttgtggtttgatgtagaaaaatgatataaaccaactctaatcaggaaaacaataatcctcctaagttgtggtttgatgtagaaaaatgatataaaccaacaaaagacctttttaaaggtctttctgaaaagttgtggtttgatgtagaaaaatgatataaaccaactgcgtgtggcccattattccaatgacggtcgttgtggtttgatgtagaaaaatgatataaaccaacgatggtaaagaattatctcatactgagtggttgtggtttgatgtagaaaaatgatataaaccaacagactgcatcaagatatacgagaagctcaagttgtggtttgatgtagaaaaatgatataaaccaacgttcggatgcttctcctgccgggaggtagttgtggtttgatgtagaaaaatgatataaaccaacatgcggataatatccacggtaaagctttcagttgtggtttgatgtagaaaaatgatataaaccaactaaaacattaacggtcggtcagggatattagttgtggtttgatgtagaaaaatgatataaaccaacaagacctttttaaaaatttaaatgaaaaagttgtggtttgatgtagaaaaatgatataaaccaactcagagtggtacatcattaaccacgaaagagttgtggtttgatgtagaaaaatgatataaacgtaagcattcgaagcactacaggttttgaacctttctatacaacaatagcgactgtcactataaaccaaatagttgcagtcgctattgttttgttgaacctatattttgcagctgggggtcagttactggattctgttgcctgtttggtcaacacactctccggatgttgcaacttccattgatgcggaagcagctttatgagttcctcatgtgtggccttcttatgatagggcattcgggcaatgatgtcattcagataatccctcggattcacatcgtgtgctttgcaagtagccagcagggaacagattacagacatattgacggccgcctcgtggttgccgcagaagaggtaattctttcgtcccagtgtgatggggcggatgacattttccgccaggttgttgtcccatagcagacgtccgtcttccaggcaccgcatcatattgttccatcgggtataggtatatgtgatggctttgccggcctgtgacctggggctgtacttgataccttccgcttccatccatgccttcatggcttccaggatgggacgggccagttcctgacgcttgttcttgcgttcttcatacgacaagcctgcgtcattgcagccatgctctatctgatagactttctgtatctgcgtaagcccatattcggccatttccctattttcatcaagcgcctgttcaaaatgccggcggatatgtaccagacagttgaccaggtgcacaccggggttggtcttgaaggctgtttcataacccgcaaaaccgtcgcattggaggtaacccttgaagtggtgctgattagccagggattcgatgaccgctccggcccgcgatcccccgtcgtaatggaagatgaccagtttttctaggaccgacctgaccatccagaggtattccttgtcggccctgtgcttttccttgttgatgaccggaacggtggtttcatccgcctgcacatagtcacaggaaaagacttcctgctttagcgcttcgtacagcggtttcagcagttctaccgttttcttgaaccatccgtccagcgtgctttccgtcagtcctttcatgccaaggtggcgatactgctgtatctgacggtagaacggaacgtgatactcgtatttctggaggaggatttcggcaagcaggctggtgtcggcgatgcacttgtcaacgggcatcagcggcatgggagccatctccacacctttctgtcccccgggtggaagacgcgtgttgtccttgagcgcatatttgggacggatgatttcctttacatagagcattcccggtttgtgtttgacaacacgggttacctcttcgcctattctgcggtacagggaaaggtccacgccatccggctcaatcacttcggtttcgagtacaggcagatcttccatcatttttcggttctgccgcttctgtctcttctcctcggcggactccttttccatcttctccaccgcttcgtcacgcttttcttcggcctttcgctgcaggccggcaaattcatccgcaaagagatccggcatgttggggtcgtagacaggaagcttttctgctttacggccaaagagctggcggttcagccatgcgacctgagccgtcaactctttgatacgttcctgcagcttttcattctgctctgcctgttttttgttgatggcagacaatgaagcaacagaggtattcagcccttctatcgtcttgagtaatgtatctttttcatccattgtctgtctctttttatagatgtaaagatactaaatattagcggattgcacaataggaacactacttttgtttcagaaaaacaggttatacatggtactctttacgctcggccctaagtcgccggagcctctgctgcggattctcctgaatgccttcaaccatcattaccaggtcacgccattccatgggatagctgtttgattcgggatcgtattccggcagtttgaagcgacctgcctccagccgtttgacgtacatcaccatgccgccgtcttccgcatgaagcagtttcatgagattgaggctggacccgacaaagatgaacacgtcaccgttcctcacttcgctcttcatcttctcatgcaccagtccgcacagcgaactgatgcccttgcgcatatctgtcctgccgggacacagaaagtagcgcatcgtatcgttcaggctaaacatgggtatcttcgagactatgggttagcagttccatcaacagcttctcggatccgctcccgaagtgggcacggagaccgttggggaaaagcagggctacaccatgcggcacctgttcacccaaggtcagttctgcagtggggcgcttgaaactgatgggagccaactcctgtttcagactgtctgtttctgcggcacattttttacgccagtaatgataggttgaataacttacacctgcctgttgcaggtacaacttcaatggcagggcgctttgttgaacctgcaattccaattcttcaaatttggatctgttcataacaattagggtttgattgttttcgcgagtacaaaactacaatcaaaccctaaggggggtaatgtgtatttattcgaaagcttacgcttcggacgtggaaacatttttgctcaaccaagtaagggacaattctaaaaagtaggcgtatggatttgataacgaaagattccgaaatcacgctggtgctgttttcttcccttgatagggtactggaaaacgtggagtacgtggtaatgaactatcgcccggtattgaacggtgaacactacctgacgggcgatgaggtgtgcaggcggctttgcatcagcaaacggacgttgcaggattacagggacacggggctgctggggtacgtgcagcttccgggaaaaatcatctaccgggaaagtgagattttagacctgctagaaaggcattacagaaaatgaaatcttgaaaacatgaaatcttgttttattgatgtcttgctttcttgaaatatagctatcttgttttctatattgtttgattgattgaaagccagcaatcatgttttcttgaaaactgtgttgctggcttttctatttacttacttcttattttcaatcttttaaaaataataatcaaggctcctattaccattagtaaaactccaggagaagcatttattaattttgatgtaaaatctgttccttcaataatccaattgatgttcccagtaaaccctaaaatggtaagtataatacctccaataatgcagaagatgccactgcataaacttaaaatcattattatatattcgtattttatagctgtaagcccaaaggctgtattagctattttagggtcaatatccacagtgcaactgtgtaaacaaagaaaggttaaaatagagattatgagtatatatatagctctattcattttattttgactgtggagcaccatatcctttagaaatattcaaatccctaatttgagtatataaatcaaacattgttcctttgtttgaaatccattcagtgataatgttaacaagctcatttatatctgaaatataggacattcttccgtctgctcctcttataccttgtgcatcttttctgtgtccacgagttaaaaatgtgttcttttcttcataaatcaaatctctcgcatctttatatgtatcgccttttggaagatattttcttaataaacgattgacaacattataatataaattatatttagcttcagggtcatcgatttgttctaaaaccatatctgccaactcatttttgagttcgatttgaccgtttacatcaaaatcaaatgtttcttctttgatttcatcagctttcattaaaattgctacacgctctaaatcttgttcttgtttcctttggagttcttctaattcctcctgagatttttttttctttttttcttccataattaattgtataaaaattctttgatttgttgtactgattccattaacgtttctttttcaaatgggtgagtatttataagctctaaggcttcattcattttaggtatatatttattataaaaagcccattcgttggttttataacaatacattgcatatataatagaggtatgtactccccattctttagctagtttttcaatattataatgtgatgtaatataccctgatgcaaattttaatcgggattcatttaataaatattcacaagcaaaattatctgcttgttcttcattcattaaaaatatgtctccctcattattgctaatatgatacgtctgttttttgatttcatcaaaatcaaaaagtacatgatgtagttcatgtaaaagagtaaaccataatgtaggataattattttgtaaattagaaagtacaatacatggtttatcatttattatcatggtagctcctctaacttgtattttttctaagcttggttgatatataactgtgaccccaatacgaaatagtgctttcagcactctaattagaccattttttatatctcttgtgtatggtctgattttgggtattagttcaactagttcttttcttatgtatggattgggatttgcaatagatttaaattggataaacgcagattgtatccaaaaattacgcattaaatcattcgagtttcttttagagcgactaaaaacgggaagcaaagaattttctgagtaactgtaaatattatcaatgtcaaaaaaacgtttgattttatcactcatatctttagatgaagcattggaattaaaaaacttcatcttaacaaggatagatacatcaaaattttcaacgatatatcctgcttctcttgctcgttggatttctcctatttgtttaggagctaattctggtacgtaaacttttattaggtcattaacagacagacctaaaaaatgagccaattttactacatttatgaaattgatttgtttagcagttccatttaatataggatttatagttttagaatccattcctaaaattttctgaatctgcctatctgataagtttagtgaatttttcttttctttatacaaatcctttaaggatgcaacctgacctatatcgattgaagattgaacagctgcatcaattactttactaagttctatgtctatattgtccatatttgcagaaaattttctgcaaatataaagaaataggtcaatactccctaaaattatgaggaaaattttccttataattttagggagtattagttctataagtatgtattaagtaatcttttgttatacagatagttgtttttcaacggcttgcatatcccttagtatcgtttggtctaattctttcgcataatgctgcgtcattcgggtggatgaatgccccagcattttagtcacgttcggcaatgacacgttgttagccagcgcgataaccgaagcgaaactgtgccgggctgtgtgcgtggtcaggttctttttaataccgcacaggtcggcaatctctttcaggtagctgttcatcttctgattgcagggaacgggcaacaaagttcctttatctatgcagtaggggttatccttatacttttcaagtatctgtttgggaatgctcaaaagcgggatgttgcagatattgtttgttttttcacggggtttcactatccacaggttgccgttgctgtcctctgaaacgtgttcggggcgcaagttatacacgtctatgaatgccagcccggtatatacgcagaagataaaaacatcccgtaccagttccagccgttcaatcctgaactctttctgccatatccggtttatctcggcttggcttaggaactgtttgtttacctccacctcgtgaaacttgattccggcaaacgggttctttgtcagccactcgttggcaatggcaaggtttatcactttcttaaaacatttcatgtatcggataacggtattctgtgcgcaatgcttctccgtctttaggtataaatcgaatttgcgtaccagttccccgtttacctcacgcagcaacatatcatctaccttgtagtcccgtttaaccagttccatgaggtatttaaggcaattgtcgtaacgtcttacggtgatgtcggcatagtctgtcccgattagcttccggcagttgttattatgttccttgaatacattatacaatgtcttgaaagtctcgtcctttccctgatagcggttcactatggcacgtgcggagataatctttccctccagttccaagtcttggtaaatctgatagaatttcacacgcagggcgtcaatgtaatggttaagttcgactgaatttcggtctttgcctatcgatttctctttttcctgcgaccaaaatgggacttttacgctccgctttagttgaagttccacgtataggcggtcataagtgacacgcacacgcacgggtgcttctccgttttttaacagtttgctacgcttgatgaagaacaacacgctgaatctttttctttccatacggctcaatttttaatgatacaaagttaggaaatcgaaccgagaaccttgttatgaaaaacagtgcaacgtgctgtaaaagaatgaagtaaataccttgcagtggaacattccgggcttttaaaaacagtcccttgaataaggacgtatagtttgcttcaatccccctaattttgcctattcttggaaaagaaaaacccctgaacttctttgaaattcaggaatttacatcgttttgccttctttaaaagtggtgccaccagttctaatacaggttgcttccattttccagcattttttaactaaaataaattggttgctgattttcagtttcttgtgcgactacttgtgatttggaactttcattcttatttccattattcacagaaaacggggcgcaaatgttttaccaatgttttaccccgtggcttgcaagcaaaaaaacgaatgttgaaccgaattaaattaaagtagaaatgacagtagcaaaatttaaagtagtaatcagacgggagaaattatcgaaatccacaaatgaagctccagtatgtttgcgcatcaccaaagacagaaaagtaacgtacaagacactattgcatctcgaccccaaatattggaacgataaagagcaatgtgtgaaaaagcaacatcccaatgcagaagggttaaatgccgttatctctcaaagaagaggcgaattggaaaaagagacttgtttcctgtctttaaaagatgactccgtaagcatatggaaaagccactctactttgacccttttgggcaaacaggattgcccaccttggccataatatgattgcccctttaaagtcctggtgataggggtcaattttattttatccttttgattctctagtttttcttagaccttaacttgcgcatactttcaccgtacaactcaatggtatgggccgtatgaatgattcggtcaaggatggcgtcggctattgtcggatcaccaaccatgtcataccagttggacgatgggtactgcgaggttatgatagtggatttcctttcatgcctgtcctcaataatttcgagcaggatgggacgttccttggcatcaagaggtacaagaaacaggtcgtcaaggatgagtaactggcaacgctcaatcttcttgagctcagtttcaagtgtacctttgactttggcaaccttcagtgcaccaagcagtttg

SEQ ID NO: 1642 - DNA, 23672 bp, synthetic construct
  misc_feature 1..23672: note = Synthetic
  source 1..23672: mol_type = other DNA
ctatagtatcggcttgcgcgccagttactaacaacgtattaacattaaaagacaaagcgtatgaaacgttcgatatattttctgattacatcggcaatgctaagccttgtgtttggcagttgcaacgattggctcacagtgccagtagatggtaagtctacatcgaccgaactttacacgggttcggatggatataggtcgtcgctcaacggcatttacaagggattggcagtggatgaactgtatgggctgcaactgcaatacggcgttatcgactttttctctaaccaataccgcaacgacctgcgagaagacgagcagagcagcaccatattcattgctgctggtaagcgcgaatttaaaaatgtggccttgcaacctgtacttaacagcatgtggatgacggcctataacagaatagccgccgccaatgaccttatcgacaacgtgtcgaaagcaagcgattcgaagtttaagcaaggtgagatggaacgcaaaatgatatatggtgaggctttggccataagggcattgctgcactttgacatgctcaggctctttgctcccgcgcctgttaacgacgatggacaggcttacataccttacatcaccaccttccccgaggttctaggtgcgcatgttcccgtaaaggtgtctttggacatggtgatcaaagatttggaagacgcacgcgaactagtgagactttacgacttttcacccatgggcataagtgctaatgcttcggggaaagcccgcttttataataatcttgagtatggaatggaaggctatggaaagactgaaggccttgacgagtttttcttaggtcgtggctaccgcttctcctattgggccataacgggactattggcaagggcttaccagtataaagcagcctacaatgcctcgttctacgagaaggcaaagacacttgcacaagaagtacttgatgccaagtgcacagatgataaaggcgaaaccagttatagtcctttcaaaaatgaggactttaatgggtttgcctatgcacaagaccccgaacaaatgagagatgtccgcatggttggcaacctcttattgggaatttacagggacaacgaatccgaggcgaaactttcgggaatagaggctagtttccctcgtgagaagaagtcgccggcacaatatagtttctgtgcggtagatgtagatgggcaagacatctttaagacagcaggtggagttgatgagtcgaaagatgacatacgctgtttaaggttgctctacaaacccataaactcttacaacatctcgctttccaccaaatggtatgtcaagacaagagatgcggacgaacgcaaacgcacgctgaacatcttcccgatattgcgcacatctgagatgcgattcatcatagccgagactttggcaaggagcaatgagtttgacaaagcatacgaaatccttaatgagatgcgtagaaacagaggcttacgtaatggcgacttgcctacgcaggcatcgttggaaggcttcttgaaagacctggtgcgcgagggacaacgcgaatggattagcgaaggccaattgttctacttatacaaaagactcaacttcgcagtgaaacgggacgacggcacatttgctccctttaagaaagaagagtgtgtggtgccattgcccattgaggaattaaaataacccttaacgttttgtttatgaaaagattattttattttatccccttggccatgttggccttgttggtgggctgtaaggaggatgcgctactaacattcggggacgacagatacgtctatttcgagaagttctatcgagatgcggtggctcctggtacagagaaagccgactctactatggcgtcgttctttttctacaacgacgatgttaacagcatagacgccctattggaagtacatatcgctgggcgagacctaacgcacgatgaaacctttaagctgcgtgtggtgccaaaagaaaccacagccaagcccgaagaatatgaaattcaggacatctataccttccgtgcacgtgcggccgcacctaatgcgaccaatagaaacgacaccatcgccatcaagatgaaacgctcggctcgattgaaagatttcccacatggattaaggctgatggtagaattggttccgcaaggcgaactgcaattgggacaaagcgaaaggactaaggccttagtggtactcactcgcgatgccatcaaacccaaatggtggaaagacgaagtggaggcaaatcttttgggcacttattcgagcaagaagtacaaactctttgtgacacatatcgacaccaagttaatcttcaatgacgaattggtgaagagaaatcctgcaaaggcgatacgactagtgagagactttaaaaggtggttggccgagcatccgaaagaagctgttgaggaagacggcgtaacgccgataacagtaaacgtatagtgttgcacttaaaaaacaaacatgtgttatgaaaaggattaaatatttcatgatatggctgagcgttccccttttattgggggcttgtttcagcgacgagggaaactacgaatacgagtctctcaaacctccaacgtggacacgtgatttcatgagtagcccaatacagatttctgttagggaaggaagacccataagaatagacggaacgaagtgctttaattggggtaaactcgactcgttgcaacgcagtggggaagtgcgctacgaatggcgctactatggaaaagtcttctgtacagacttgaaagccgaaattccctacgaagagtttatgaaacggtgtgggttggaagaaatgcccatctctgattatgagcgcggcgacttcgccattatcgagaaatccacaggcgttagctttaaggtgaaaacaaccttttatttccatgcgcagatagacgaggccgacttccttatttattcggcgaaatcacccaacgaaccccatgtaggaaaggttaacgtaatgcgcctagactattcgcgcgaccctaagacgggcggatatgtttctgattttgtattgagcgaccgccatttctcacaagatttacctggtacgcccaaacaattggacctttctgcagcaaagaacgtgagccttgttgggtcggcaacggccataacagaagaaggcgatgcgtatgtgctcaatgcggccaatttgcaaaaggtttgggacatgagttcgcaattcgatgaaggaacccccgctgactttaaggttagttcgcgtaaggaccaagatggaggcggaacagactcgtacgccttttcatgggtagcaacaaaagacggacgtgtgtttactagacagtttggaaggaactacctaggaggtaaattcataacggaaccttactacctagactcgttgggatataagattacacagtttggacatacctgttgggggataacgaatatcccttgttacgatgagaagaacaagcgtgtgcttattgcaacaagtttacagaacggtgcatacggctcttaccggagttatatgaccaccctctataaggatggatggaaaggtgtacccgtaatgaagatgcccgacgacacaaaagtgtactatctaacgttaatgaacggcgaccaatattgggacaacaatgcaaatagctggttccaaatatactataatacgggtggtaagtcgatggttggcacatttgcagtagacaatcgtggacgacgactaaatgaacctaactcgtacttattcccatatgaggtgaagggccatttgtttaataaggaaacagttttcctcgttgcagcaggaacgcgccttactaattcaagctcgaaggcttatatcgaccttttctccgaaggaaacgaggtgtatggaattaagcgtagtggtttgggctggcctggtcaatttgattacgagataatcaaacttccacttaagggtataacatcgaagattacgagtatgacttacaaccgcgatgacctattaagtggctcgaattatcacgatttggtgattggttgtgagaatggcgacatcttggtttacgaggcagaagaattgttgaacccttcattcagaaagaaactaaacgtgggtggtaaggtggttgccatcaaacaacttggacttatccgcgccacagtagacatgtattaatacaacaacacggccaccccttacccaaggtggtgggggtggctgcaaaacaaaaacagataaaatgcagaacatgatggttttaaagagaagtgccggcgcactgatgatgctgttggctggcgcgtttgccgtgcaagcgcaaagtgtagataaggtaagtctaaacgttagcgtggccaacaagggtggagcaccaactgttacgctcaaaaagtcgcccgaatgtcaggcctattgcctagcactgttcacatcagacattgccggtatcatcaaagacgaggtagttgacggatatttcacgggtcagaagaaaccccgatacaccgacaacgccaaagataagaaactggtagactacgggttggtggttgttccggagaaagaatacaccctcatcgcccttggttatggcaaggacggcaagcccggcaaggtgtctcgcacgcagtttaccgctcctcgcagacaaggtttcgcctcggcgcaggtgctggcacaggtaataaacatcggacccgacagcgttacggtgaagtttacgcccaacaccgatgtggctggctacgccttatgtcagtttgagggtggaaccatcgaacaaacagtgaaagagcacggccccatgatgggtttctctaacgcttacgacatgattaagcagttcagcggcaaagactacaccaccgaaaagcaacacacttggcgcgagatggtgcccgatgccaattacgaaatctgcgtgttgccatgggataagaatggcgttttccaagagataaccaaggttcccgttaccacgaaaaagcttggcggacccggcgaagccacagtcgacattaagattggcgaatttggcggaagtaagaaaggcggctactatcaagatgtagtgtactcgcccaacgaccaagcatcgttgcaccgcgacatcatcatcaccgaagaggcctttaacaaacccgacatgggcaacatcggtgttatcaagatgctgcaaaccgaccatcccaaagacatttactggaaccaataccgcgtggacagggctagatggaacgccacaccgctcaccacctactacgcttgctcgatggccaagaacgtagacggcaagtggggcgagcttaaaaaggtgaagttcactacgcctgccgcaaaagaataacgcgaaagatataaaccgctcttgatgaaatcttgattttagctggcatactttgctcatcgctaggtggttcatggcaactgtgtacccctagccgtgagcaaatggtgcccgcctaggcaaggtatggaataaatgggcggcaacgaacaatcgcaagatggcatttcggggtagcttaaagccggttctaaaatgccaataaagtttatttcaggagccagcctttgtaaataacggcagccctattcgataacagagcatatccagaacatgccttaacccccaaactaaatagcaggtaggacgaaccgccctcggcgcatttctcctccatctcagcatctcgcgctatccaactatacataacctaggggcatttcctaacactttcgcccccataatcttgcgaatgccgaacgagatacagccgaggcgggcctgccgtgctacgcttatcgcgagcaaaccgatggctttgcaccgctaacaagtaaccgaattattgaaacaagaatgagtaacctaagaacaatcctgcggggctgggcactcttagccctgcttgtccccatcaacttgcgtggacaaggcgttaaccaggccccacccatccccgtggacactgccgtaaggataggcaaactgcccaacggactgacctattacatacgccataacaactggccggagcatcgtgccgacttctatatcgcacagaaggtgggctcgatacaagaagaagagagccaacgtggactggcccacttcctagaacacatgtgctttaacggaacaaagcatttcccaggcaacgaacttatccgttacttggaaacgcttggcgtgaagtttggcggcgacctcaatgcctacacctccatcgaccaaaccgtttacaacatatccaacgtgcctaccacgcgccagacggcactcgactcgtgcttgctgatactcagcgactgggcaaatgcgctcacactcgacccaactgagattgacaaagagcgcggagtgatacacgaagagtggcgcgaacgcaccggtgccacatcgcgtatgctagaacgcaacctgcctaaactctattctggaacgaagtacggcgcacgtttccccatcggactgatgagtgtggtggacaacttcaagcccaaagagctacgcgactactacgaaaagtggtatcatccatcaaatcagggcattattgtggtgggcgacatcgacgtagcccacaccgaggccatgattaaaaagcttttcggccccttgaagaaccccgacaaccaagcgaaagtggtggatgtgcccgtacccgacaacgaagaacccatcgtcgttgtggataaggatagggaacaggccaacagctcggtagaagtatcgttcaaacacgaggcctggcccgactcgctcaagcgcaacgtagactatctcttggccaactatgccaagaacatggccctaggcatgctcaacgaccgctatgccgaggccgcacaaaactctaccaactgtccttatttgggtgcatcggctgccgatggcaacttcatcttcgccaaaacaaagggagctttcaccatcagtgcaacgccgcgcgacatggctggtactgccgccgcactgcaagccgcactggttgaggcccttcgcgctgccaagtttggtttcacccaaagcgagtacgatcgcgccaaggccaacttgctcagtgcattggaaaaggcgtacaatggtcgcgacaagcgtggcaacgcctcgtttgccgacgattacaaaggtcatttcctctcgcaagagcccatccccgccttcgaagactattacgagataatgaaacagctggtgcccaacatcccgttaaccgacatcaacgccattctgccgcagctgttgcccgaaaccgatcgtaatatggttatcatcaacttcaacaacgagaaggaaggcaacgtatatcctacgcccgaatccttgttgcaagccgtgcacgccgcacgccaaaccaaggtagaaccctacgttgatacggtgaaagaagtgccattgatgaccaagttgcctcgtcctggcaagattgtcaaggagaaaaagaatgccgaactgggttacaccgagttgaaactggccaacggcgtgaccgttatattgaagaaaaccgactttaagaaagaccaagtgaactttgccgcaagcggacatggtggcaagtcgctttatggtccgaaagactacaccaacttggccgtattcaacgacatcgtgtccattagtggcttaggtggattccgcagtatggagctacccaaaatacttgctggcaagattgccagcgcaggtctttccattggcgataagtatatgggcatgtcgggtggttcgtctaagcgcgatgtcgaaacgatgttgcagctggcccacctgtatctgtcgggtggcatcaccaaagacgaacaagcgtttgccaccctgatggactcgtggcgcacggcacttaaaaaccgcgccctcaaccacgacattgccttcaacgactcgctcgtggccacggtctacggccataacccacgtcttcgccccgtgttggaagccgacctgcccgacatcaactacgaccgcatactgcaaatagcgcgcgaacgcacgaacaatgccgccgcatggacgttcagtttcatcggcgacttcgacgaaccccagctccgcaagcttatctgtcgttatctcggctcgctgcccactaagggaaaggtggttaagggtcatctcaccagttcgtttgtcaaaggaaagattgagaatgtgttccgccgtaagatggaaacacccaaagcaatggcttgcgttatgtggcacaccaccgacgtaccttattcagtggagaatgccgtacgtatgaacatgattggtcaaattctctctatggtttacatcaagacaatccgcgaagacgcatcggcagcctattcggtgtcggcagaaggtggagcaaccatcgagggcgactaccacgactactccgtattggttacttgtcctgtgaaaccagagaaacgcgacacggctatggccatcatctatcgcgaggcagagaacatgacgcgcacttgcgatgctgccatgctcgacaaggtgaaagagtatatgcttaaaaatgtggctagtgctgagaaaaccaacgcttattggagtggcgttatcaacatgtatcgccgccacggcatcaacatgcacacccgctatcgcgacatgattaagcaacaaacacccgaaaagctgtgtgcgctgatgaaacaaatcttgcaaagcggcaaccgcatcaccgtggaaatgctgccgcaagagtagaaagacgtttaaaggtgaaagggcatttaaaggtgaaagggtgaaaaggtgaaaagatggcttcgccattttaacagcttgcctagtaacctagtatacctagaatgcctagtgtatctagaaaacctagtgtatctagaaaacctagaataactagaaaacctagtacaactagatagcctagtataactagaaaatctagccccaccagcaagttaaaccagatacttgttagctcgccctttcattcccctttaaacgcggataaacgccaagaaatcatagagtgatgataaaatgtttgtgattttaatggtttgatgaattaatggagaaacaaactggttcgtagacgaataggtttatcagagaagttgcggagaaatagttggtcttcatgtccctttttgggcagaattctcttacgcttctttgctccattaattcttttttggcttttccttacagcatcttccatgcaacaaacacgggagagcagtcaacatctcgaccatacgccaagcacaaatgggcgttagcaatttatccctatgttgggtaaagggcgttgaaagcaacggttgtctatgttaagggttggcaatcgcccattcaatggccttcctggcatagggacttttatttgggttagctgtagttaacccccaatcggccattgtcgtcaaacagaattgaattaggaaagccatagatacaccgtaagcagaccaaagtgttcatttgcccctgcgtaagggtgtgctgatgccatgctatgcgcatcttgctcgttgctaacaacaattttccaaaagcaattctgtttggctataaaggttgtaaaagcaaagtgttacgataatcttcctttggtgctgcggatgcaagcggcgagctaacaatttgcgtatattcagtgtttccttttggggaaaatgagagcgaatatgttaatgccccatttgtgttaagcccaaactgttcattgtccagcacccttttaatcttccatctttcccatcttttcaccctttcactttttcaccctttcacctttcccatcttttcaccttttcaccctttccgtcacctcctaaaacaaataagcccctccgaagaggggcaatagggactaaacccttcggcatatagccttattgtgataagatgtagaatatatcttattgctgcaaaattaacaaaaacattttgccctaccaaataattaatgtaattttacacctaaatcctaatgggatagtaaatagcaagaaacaaacaacaccataactaacgattatgattacacgaatattaggtcttgatacaggtacaaacagccttgcttgggctgtggtagacagaaatgccaacggaagctacacgttggtgaaacgcggcgatgttatcttcagcgaaggcgtaaagatagaaaaaggcgtagaatcgtctaaagctgccgaaagaacaggacacaagtccttgcgcgtgcagtatgctaggcgacgtctgcgtaagattgatacgctgaaagcgcttgtaagtctcgacctatgcccttatctttccgacgagcaactgagccaatggaaagccaagaaaacatatccgctcaccgacgactttatgctttggcagcgttcgggcagtaccgaagagaacaatccttactattgtcgctatcgctgcctcacacaaaagctcgaccttaccgaccaaagccagcgctttcttcttggtagggcattctatcacttggcgcaacgtcgtggatttcttagcaacaggctcgacaccacggccgattccgccgagtcgggcaaggttaaatcgggcattgcccagctttctgtagaaatggaaaaggctggttgccattatctaggcgagtatttctatcagctctaccggcaacacggcaacaccgtcaggctaaggagccgctataccgatagggaagaacattatataaaggagttcttggccatctgcgaaagacaagaactggatgcgcaatgggttgaaaagctgcaaagggccttgtatttccaacgcccgttaaagtcgcaacgcaagggtgtaggcaaatgtacattcgaacctaagaaaccacgctgtgccgaatcgcaccccgattacgaagcgttcaggatgctctgcattctcaacaacattaagataaaaacgcctaaagatgtttcattacgaccgctaaatgcggaagaacgcgaaaaggtgtggccgctgtttttcagaaagtctaagcccaacttcgatttcgaggacattgcaaaggctttggcaggcaaaaacaactacacttggtataaggatgcaggcgaaaaaccatacaggtttaactaccgcatgcaccaaggtgtgtcgggatgtcctgtaacagcgcagctgatagacctcttcgggcctgattggaaggcaggcattgccgaaacatacatggcagttgaaaagaagaacggcacaaagaccatcaacgagatggccgatgatgtttggaatgtgctttattcattctcgtcgaaagacaagttaaaggctttcgccaccgagaagttgcaactcgatgaggctcgtgccacgaagtttgccaatgccaaacttccgcatggctttgccgcgttaagtcttaaagccattcgcaacatcctgcctttcttgcgccaaggcttcatctacgcccacgccgtactcttggccaagatacccgacatcgttacagcggctgtttgggatgatgccgacaaacgccagcagattctttcggggctgctggaggtaatcgagaactataaccccaatgaccgtggcattgaggggacgatagacttctgcattaaaagtcacctccaggatgtggtcgacctgcgcccaggtgcagccgatgcactttaccatccctcaatgatagaggcctatcccgatgcaaagcttagcaagatgggcgtgtttcagttgggcagtccccgcaccaacgccatccgcaaccccatggccatgcgctcgctgcacatattgcgcagtgtggttaaccagctgttgcgcgatcgcacaatagaccgcgacacggaggtgcatgtggaatatgcacgcgaactgaatgatgccaacaagcgcaaggccatagccgattatcaaaaggatatcgaacgcaagcgtgcggattatcgcaaacgcattatcgaactgtataaagaagaatgccacaaagagatagaacccactgacactgacattcttaaatttcagttgtgggaagaacaaaaccacaagtgcctatacacagagagcgagattggcatctgtgattttctaggtgacaatccaaagttcgacatcgagcatactatcccccgaagtgttggcggcgatagcacgcagatgaacttaacactctgcgatgcgatgtacaataggcaggtgaagggtgcacgcctacccagccaattgcctaaccaccatgaaatactaaaaagaattgccccttggaaaagcaagtgcgaagacctgcgaaaacaattagacaagatacgcacttatggcggtatggagaaaggaatgaaagacaggctgatacaaaaacgccatcgcttgaagatggagctatcttattggcagggcaaatacagccggtttacgatgaccgaggtgcccgaagggtttagtcgccgtcagggtgcgggcattggtttggtttcaaagtatgcgggattgtttttaaagtcgcttttccacagcgcagacaaccccaacaagagcaatgtgtatatggtgaagggcgtaaccactgccgagttcaggcgtatgtgggggctacaaggcgagtacgaaaagaaatcgcgacttaaccattgccaccattgcatcgatgccataaccattgcctgtattggtaaagccgaatacgaaaagatggctcaatactatcatgatgaagagcttttccaatggcgtggcactaccagcaagccccatttcaataagccttggcccacctttaccgaagacatattggccatagagcaatcgctcttggtgaaacacctcaccaaagacaacatgcctaagcaggccaaaaagcacgtgcgtacagctaagggtaaatatcttgcccaaggcgacacggccagagggtcactgcacaaagacacttattatggtgccatcgagcaagatggcgagattcgaaatgtattacgtaaacctttaaataggttcgagaatgaagcggagcttgaaagaatcgtagaccaagccgtaaaggaaaagataaaggaggctattgccggtaagaacttcaagacagccattgccgaacccatctttatgaataaggaaaagggcataaggataaataaggtgaggtgctatgtgaaaccttctgcgcgcataaaggttcgtcaacagcgcgacctctcgtcaaaggagtataaacagtatttctatgttgagaatgacattaattacatggttgccatctacgaaggagaactcaatgggaagaaggaacgagaattctgtgttgtcaataacctaacggcagcttcttattttaaaaagagcagccatgaggaggcaggctcgcttatacctgagcgaagcccaaagaatgacttacctctattatatgcgttgaaacgaggtgtacaggttctactttatgagaactcgcccaaggagatacgatttgatgaaccacaagatttggtgaaccgattgtatgaaattgtgggaattggattagatggcaatgcgctcatgattgatttaaggtttcatcaggaagcaagacgctcttctgacctagatagaaagaaaggtgcatataaggaaaacgaaacgcttcgcccctgcataagacttcgacatacacagtttaaagcacttgtcgagggtgtcgactttgagtttaatatccttggcgagattaaaaagaaagatcgtcatgcttaaaagaagtctcgtttttacttcgcccgcaactctgtcgttgaagaacgcacaactggtgataactttaaaggaacagcccgatgcttgtcggactgttcccattgaagaacttggagttgtgttggtggatagcccaatggtaagcctaaccatacctttgataaacgctttggccgacgagaatgttgcccttgtcttttgcgaccagaaaggtatgcctaacgcccttacgcttagcctacatgccaacgccagtcaaggcgaaagctatcgcgaacaaataactgcaagcgaaacgttgaagaaagcactatggaaacaacttattgaggcgaagattagaaatcaagcgcgtttgcttagcaaacaaggcaaacggggagaactgttaaagccactttatatgaacgtgaaaagtggcgatgcagataataaggaaggtgtggctgctaaactgtattggaccgaattgtttggtaaagacttccggcgcgaccgcaacctgcctggtctcaacatcctactaaactatggctatgccgttttgcgtgccgccactgcacgcgccttgatggcttcgggtttacatcccgcctttggtctgtttcaccgtaatcggggagatgctttccccttggccgacgatgtgatggaaccctaccgcccttttgttgatgaaatagtatataagctggctgcagaacaagcacttagcctcgataaaacaacgaaaggtagtttaatcagtgtgctgttttgtgatgtgtcgttctcaaaagtggttcggccgctcagcattggcctaaccatgactaccgcctctctggaaaaatgtttctcaaaagaaaccaataaaatgcaattaccgatactcgaatgacctacgcccgccttaatcgttatcatatcatgtggctttttctgatgttcgaccttcctacgaatactaaattggaacgcaaagaatccgctcgttttaggaaagaccttgaacgcgatggtttcacgatgtaccaatttagcgtatatgtacgctattgtggctcgtacgagagcatgaatgtacacatcaagcgagtaaaatcgcttgcccccaacaagggcatgattagcatcctcgctgtaaccgataagcaatactccaatattgttaatgtgtggggcgaagttgctgcaaaacaacagccaaagccaattcagttggagtttttttagtaactttgtaccatgataagcctcatcaagcaacttcatgttgcccaataaagtaatcaaatgattgattactaataatgtaagtggtacaggttgtggtttgatgtagagaaacgatataatacaacgttcaagtcaacagacaatacaggcaataagttgtggtttgatgtagagaaacgatataatacaaccttttaattgagtttgagttatcgcactttgttgtggtttgatgtagagaaacgatataatacaacgattatcgcgaaactatcgttattatacagttgtggtttgatgtagagaaacgatataatacaactttccaatctgtaagagccatgaaacgctagttgtggtttgatgtagagaaacgatataatacaacaacacacttattacagggagttagcatcaagttgtggtttgatgtagagaaacgatataatacaacatttcagaatgctgatacccgtgcttatggttgtggtttgatgtagagaaacgatataatacaacgttagatacgtcaataacgttcggattaggttgtggtttgatgtagagaaacgatataatacaactcattcaacacctcggtgcggtacttctccgttgtggtttgatgtagagaaacgatataatacaacctcaaatcatccttataaataggccgtgtggttgtggtttgatgtagagaaacgatataatacaaccatatcgctcgttatctattatacgctgcagttgtggtttgatgtagagaaacgatataatacaacaaattagcagaattagcagcaccaacagagttgtggtttgatgtagagaaacgatataatacaacaaaataaataatagccaaatctaaatcttgttgtggtttgatgtagagaaacgatataatacaactagctgcctaacgttaatatcaatgcccggttgtggtttgatgtagagaaacgatataatacaaccgcgtactattgggctgttaccctccgcagttgtggtttgatgtagagaaacgatataatacaacattcggggcataccatcctcggacatgtcgttgtggtttgatgtagagaaacgatataatacaacttattagaagggatcaacccattctattagttgtggtttgatgtagagaaacgatataatacaacgtggtcgagcgggttcgttctgttctcttggttgtggtttgatgtagagaaacgatataatacaacattacggatagaccgcaagaagatttgaccgttgtggtttgatgtagagaaacgatataatacaacatcaaactgaatttcacctgaaccactcggttgtggtttgatgtagagaaacgatataatacaacttgcaaaatctcattgtttaggatggtaagttgtggtttgatgtagagaaacgatataatacaacgcaattcattagatgcaaacaggcggataagttgtggtttgatgtagagaaacgatataatacaacagaatgttccagtggcttataaggattatagttgtggtttgatgtagagaaacgatataatacaactgaactttgtaaatcttaccccacacgctagttgtggtttgatgtagagaaacgatataatacaaccctcttgaggactgaaacctcccgcaccgcgttgtggtttgatgtagagaaacgatataatacaacttgtacaaacgcatcatatttgccttggtggttgtggtttgatgtagagaaacgatataatacaaccgttaaggcacgtattagggaaaactttggttgtggtttgatgtagagaaacgatataatacaacattatcgacaaatgggaatacttgaaagagttgtggtttgatgtagagaaacgatataatacaactctgatgtgagccgccctccaataattcgagttgtggtttgatgtagagaaacgatataatacaacttatcggcaaacactctgctagtgccttggttgtggtttgatgtagagaaacgatataatacaacgcaatgatgttttctacacatgcggtatgagttgtggtttgatgtagagaaacgatataatacaacatcacttaccaaagactatatcaaagtttggttgtggtttgatgtagagaaacgatataatacaacaccaaaagtgattattaaatggtatagtcgttgtggtttgatgtagagaaacgatataatacaactgtagatccagtaggtatagacattaagtcgttgtggtttgatgtagagaaacgatataatacaaccaataatgttcactatgtgtgcggcatgagttgtggtttgatgtagagaaacgatataatacaactatcaacaccttgagccataacacttccagttgtggtttgatgtagagaaacgatataatacaactcgtcggccacgcagataaataccacctcgggttgtggtttgatgtagagaaacgatataatacaacagacttcaacagcgttaacgagtgctgcaagttgtggtttgatgtagagaaacgatataatacaaccgactatctattcattaatgaggctaacggttgtggtttgatgtagagaaacgatataatacaacattaacatcgaaaaatgcgaaattgcctaggttgtggtttgatgtagagaaacgatataatacaactagaaggcaccaatgaatagatgcacataaggttgtggtttgatgtagagaaacgatataatacaacttttcataaatgaactacttctataatcaggttgtggtttgatgtagagaaacgatataatacaactcgctgtaagaatgccatacactcgtcccgttgtggtttgatgtagagaaacgatataatacaacatcaaattgaatttcgccactaccgctaggttgtggtttgatgtagagaaacgatataatacaaccctagcagcttagtaacaggattttcatagttgtggtttgatgtagagaaacgatataatacaacttgtaattggctctgtgtgatagcactttgttgtggtttgatgtagagaaacgatataatacaaccatcgaatgaagacaactcattttgatagggttgtggtttgatgtagagaaacgatataatacaacgctggaaaatgacgaggacaagcccgaaggttgtggtttgatgtagagaaacgatataatacaacaacaaccaccaaataactggtctgtaacttgttgtggtttgatgtagagaaacgatataatacaactattattggtatcgggtggaatgataacgcgttgtggtttgatgtagagaaacgatataatacaaccttgcggtaatcgggatgttgttttctcctgttgtggtttgatgtagagaaacgatataatacaactagccaagcaaatcaagcaatcgtaaagcagttgtggtttgatgtagagaaacgatataatacaactaaacggatgtgataacaacgcctaccttggttgtggtttgatgtagagaaacgatataatacaacttgcaattgagattgggtaatagaactttgttgtggtttgatgtagagaaacgatataatacaacgatagcaacttcgttacagggttctcagggttgtggtttgatgtagagaaacgatataatacaacgcacagagcctgtgcatgagctgattataagttgtggtttgatgtagagaaacgatataatacaacgtaaatttcggccgtttgctttacaagtttgttgtggtttgatgtagagaaacgatataatacaacatacaaagaggtcgatatggcatactattagttgtggtttgatgtagagaaacgatataatacaacttagctttcttttcttgaccgagagatccgttgtggtttgatgtagagaaacgatataatacaactgcgtgacgagtggaataagtatagcctaagttgtggtttgatgtagagaaacgatataatacaaccgcatcgcggaacagccagtagggaggtagttgtggtttgatgtagagaaacgatataatacagtcctgggagttatattcgcgctgcatgatacgttgttgtttcatgtagaaaccgtcttgactttaatatttctataaattgagaggggcttgttgttgtgttgccaacacaagacagacactcctcttatatacgacgtgcagaacaaatctactcccttgcttataaactcacgaaataccaacaactcacgaatgcactaattcacaatctcatcaacttaccaactcaccaactcatcaactcaaaagcttaaatcgttatttttattttacaacatatctctaattttcgctccgttctagcgaaaatacaggtcaaaaagtaggtaaaaagcctctattactagcttttcacaccttggggtttgtctatttttaagcctagaacctgcattttgcaccattttgcctttctagtttggttgtttgctcgtattttttcaactccaaatacctgcttttagcccctaaaaccccactttttatgtctattttccccttttcagccatgtgcttcatgcttcggaatggttttatttataccattgcagtgtattcttatgcctttttgccttccatttagcagcattttgcacggcatttagcaccaaaacgcactgcatttagcggcaaaacgcactgcattttgcagcatattacccttcatttcgtagtaaatagccccgaaaagggtgcaaatggcggcgttttcaaataaatatccatttttccgcattcacattctaacccctttttgcatcaaaacaaaccctcgcgagaatcgattttttgcggcaaggtgagtggttgatggacaaaaatggcactcatagtgttaaatttcttgctgaaaaacagacaaaaggagagtggtagacgagttgacaagctgacgggttgaaaagttaaggaacgaataagttgataggcgaggtatctttcttatcatcttccatactcatcaattcatcagctcatcaactagagttgataggcgaggcatcctctcatcacgttctaagacatacccctatgggtggctatatcgcttaccaattattctggttgttcccactgccccctgtttgtctttcgtttgcttgtcggcatcttgcctgccttgttttttgcctatcacgcctcgccttcaagcataagacaagtaataagctccacaatattacaagggctgagcaggctctaacggccgattgggataaggcaattggggcttcacaataacgaaaaggggatggcagaaaccaatctgccatccccttttgggatttctgccactaggcaagtgtgtgaggtttatttcaccattaccttggcaaccttattgtttacggtaacaacgtatgcgcctttgggtagagagaagttttggcttgtgccgttcatcttagccttctgtaccaaaccgccatttataccatacacgttaacggtgcttcctgttgcggcttctaccacgataccgccttcaacaaccttgataaaggtgtcggtgttgtcggcatttacaccctcgatgcccgttgcatcgggtatgaaacggatgtgcttggtgtgtagcagcagcttggggaacttggcattggtcattacgcaaaccaagtcttcgtagcgtttggttagtttcagcgtggtaacgccgttggttacggtgtattcggcatcaacatcaaactcctcgccttgtaggtttccgttcttatctacgttcacattacccgtaaaccagcggtacacggtaggtgttccgtcgatgacggcctctgaactgaggtctaccttgttgccgttagcgttaacgtcaatggggttttgcctttgataggcatacgatgtgcggtaagtgcccgttgtgggaggcaatgaagagaaacggaggttgttgccaacaaggttcaacgcacgcaagtaggcgttgttcttcacgttgatagacgtgagcttgttgttgctgacgaagagctgacccaagttgagcagcggcttacagtcgagcgtcgtcatcgagttggccgttaggtcgaggctctccaatgctgtaagtccgcggaagttaacctctgtcaggttgtttcggctaaggcttaccactatcaggtctttgttcttagtaaggtcgagcttggtgagcttgttgtcggacatggacaggtattcgagcttgggatacttcgagaggtctatgtcagagatgttgttgcggctaaggtctagctgtttaagtgctgtgctaggcgcgaagtcgaacttggagaggccaacgttgtctaatgtaatagagcgggtgtctgccaacttgctgatatctaccgaagacatcttggcgttggtaacgctgaacacggtaagtttctcttcgggtttcgacaccaatacgcgcactttcacgcctttgttggtaagggcggtaaagcgtgtgtaggtatcggccttcaaaacgtattggctcatggcaccgtcgccgcgccaatcgaagtaaacagacatgccctcgatgttgccacgcagtgacagctgaacgctgtctctgttgtttgtggtggtaaacgatgccagttcgtttgttggtacggggatgggttgcaccaaggtggtctttaagatgttcttacccgtgaatgcgggataggcagggtgtgatatttcgcaatacactttgcctttggttaggttcttaaacctggtagaacccttgtcgtccaggtagtcggttcccagcacgtagggttgtccgccttcggttttccaaacgaagttggtggttttgttgttgatggttacgtattgctcggtgaggtcgataccaggcgatgtggtggcaatcaccacttcgcgttgcggagcgtacgtaaagtgggcctcgtctagaccaaacctgttgggcatattggccagcgtgaagtggttgttgctgatgtcgagtttagcaactggtgctagggggataatgcccagcaaggtaagctcgttgttagaaacgtttagttctttgagctgttcgctgtggtcgagaataagacttgtaagcttgttgtacgacaggtttcctcttaccagtgcatcggcacgtcgcaggtcgaggttggccaagttgttgtggcttaggtcgaagtcggtaatggtgaagtaatcgtctaccgtgattgtttcaagctggttatggctgaggttcacgttggtgagcagactcttgtattgcgacttagacttgcctttcagcgagatggttttgagttggttgtgcgacaagtcgagcctttcgagctggttgttacgtcccaagtcgatggtggtaagccccgtattaacgagcgacagcacgcgcaggtctgttagttcggtaacatctatgcttgtgatgttcaagtctttcacttcaagagccgtcacatagttgtcttgcggtacggtcaccacgatgtttccgttacctgctcgctgaccggtgatgttcgcggcagtgggcttttcggcggtgatgtttacttctttcagttgtccgttgccaaagtctaccttaacttttacgggtttctgtggcgttgcgcccttcattcccacggttaggttgatggtttgtccagccgttgcggtggtggcaaagtctattgcccttacgtccttaccaaattcgctatcgtctttaacggtgaatggttcggtaaatagggggtattcgttgaaaatggtgttggtgaagataagcaccaccttgccgtctacgggcctaagcagcgttacctttccgttatcgtagtagtaatagctggcatctagctcggtacgttgagccagtgtgtctttatccagcttgtagagtttgcccaatgtggttgttccttcgcgcaaaacttgtttagagaagtcgagcacggtgcccaccttgtaggtatcgtccagcaccaagtcgcgttggtcgtagtaatactcgcgccaagtgttctgtggtttgggcagcgaggcgaaggtcatcaggtttttgcgtatgttgaagatgtacaagtcgggacatttgctcacgtctatagaggtaagcttgttgtggtttgctcccaacgtaaccagcttaggcactttgctcaggttgagcgaacgcaggttgttgcccgcacaatataagtggcgtaggtcaggacagtgggtgaggtcgatgtcgtcgaacttcacatcggtgttaatcgtacccgaagcatgctctatgtagagttcgttcagcttggagtttttgctgatgtccagcttgtttactcgcgtgtcgctaacattcagtacattcaggttggcgttgtgcgaaacgtcgatggtgctgatgtcggtcatgtcgaggctcaaacggcgcagcgtggtgcagcctttggtgtctacctcagtgatggtgcggcagtggtaggcatcgaacgacaccagcttggggaagttctttaactcgaacttagactgtacgtatgcgcattgtgcaatttccagttccagaagttcgggcatgttgcccagcctaagcggcgtttgtgccgagaaggggttgtcgcgcaggtagaggaactgcaacgatttgaggttggaaaggtctatctgcttaatggagttgtaggccaatcgcaggtaagacagtttcaaatccttatgaaaggtaatttggtctatcttacaacccgtagcgttgaagaagtctattttgcttgggtcgccgtagatctttacga

SEQ ID NO: 1643 - DNA, 23666 bp, synthetic construct
  misc_feature 1..23666: note = Synthetic
  source 1..23666: mol_type = other DNA
atctatagcctcagtccctatacgagcgaggaaatcatcagccgtcgcttcatcttggaaagtaatccgagtggcatcatcaacatcgtcgatgcctcaaacatcgaacgcaacctctacctcaccatgcagttgatggagctgggcattcctatggtgctggctctcaacatgatggacgaggttaggagcaacggcgggaccatccgcatcaaccgcatggagaggatgctcggcattcccgtcattcccattagcgccatgaagaacgagggcgtggacgaggtcgtgagccatgccatacacgtggcccgttacaatgaagggccagcgcgtcaggacttctgcagtcctacggaacacggcggcgctgtgcatcgttgcctgcacgccatcatgcatttcattgaagaccatgcccagacagcgcacatcccagtccgcttcgccgcaagcaaactgatagaaggcgacaaactcgtagattctgtactcaacctgacacaaaacgaacaggaaaccatcgagcatatcatctgccaaatggaggaggaacgcggtctggaccgctgtgccgctctcgcagacatgcggttccatttcatcctgcaggtaagcgaatgctgtgttgtacgacccgaagagagtcaggaacacaagcgaagcatccgcattgacaaggtcttgaccggtcgctacactgccattcctgccttcctactcattatggctgcggtcttctacctgaccttcaatacgataggagcctggctgcaggaccttttccaagagggaatcgaccgctttacggagttctccgatgccacgctgacgcagtgggacatcgctcctcccattcattcgctcatcatcgacggcatctattccggcgtcggaaccgtgctcgtcttcctgccactcatcgttatcctgttctttttcctcagcatgcttgaggacacaggctatatggcgcgcatcgctttcgtgatggaccgactgctcagaggcttgggactgtccggacgaagcattgtgcctttgttgattggcttcggttgctcggttcccggaattatggcaagtcgcacacttcccagcgaacgtgaccgcaggctcactatcttgctgacgcctttcatgtcctgcaccgccaagattcccatatatgctttcttcgcggcggctttcttcccacgtcatgcggcgtgggtgatgatgtcgctctacgtgattggcatcctcgtgggaatccttgtggcactcgtcttgaaacggactttgttccgaggcgaagcggtgcctttcgtcatggagctgcccaactatcgcatgccagtagccatgaatgtctggcatctgctgtgggacaaggcgaaggacttcctcagccgagccttcacggttatcttccttgccagcatcgtcatttggctcttgcagacattcgacttccacctccaaatggtgcctgccgaagaggcctcgcggagtatgctggcacagatatcaagcctcgttgcccccatcttcgagccactcggatgtggtgattggcgcgtggtgacatcgctcgtgagcggtcttttggcgaaggaagtggtagtgagcacgctcagcacactctttgccggagtggcgattacgagtgtctttacgcctggcgtggcattcactttgctcgtcttctgcctgctctatacgccttgcatggcaaccatggcaaccatccgacgtgagctcggcaccaaatggatgctgttcatcatggtcgggcagtgttgcatcgcttggtttgcagcattcattacgtatcaaataatcttacttctataaccatgaacattcagagcattatccttttagccgtggtgattgcggtcgcaggctacgttttgtatcgttatttgcacagcgacaataagtgcagttgctgcgatggttgcagcaaagactgttgcgcaaagcttcttgtcctatttctattcttgcctgtttatgcagttgcggctgctcttcctaatgtcgatggcaacacaggagccacggagcaatacgtcacagagcgcagcaagtatcagattttggcatacagcaacgacagtactcgcgatgtgtatcgcatcccggctattgccaagaacaaaaagggagagttggttgccatctatgactaccgcgtctgtggcaccgacatcggtttcggtgaggtcgatcaggtgatgcgcatctccaaaaacaacggaaagaagtggtcagcggaggcaaaaatagccgatggaatgggcggaaatgacaatgttttcggtgtgggcttcggcgatcctgcactctgtcttgaccgcgaaagtggcaggggagtgctcattactgtcagcggaaagtgtatctattcctatggcacagccacccatcgacccttcatcgcaaggcagattaccacggacggcggacacacttggagtgctccagaagacattactcagcagttctggggaaaggcaggttcaatgttccaacaaaaggaaactgacgatggaacgggtgtgtttgcgtgggcaggcttctttggcagcggtaaaatcctgcagagccgtgtcacgaaagtcggcgaatactatcgcctctatgctgccttgctgttgcgaggcacaggactgaagggtgcgtatgtcgtttacagcgatgacatgggcatgaactggcagcttctgggaggtgacgcttcgttccaatgtactcctgatagcgatgagccaaaggttgaggaactgcctaacggacaaattgtgctgagcggcaggaagtggtacggccgcacgttcaacatctggacctttgctgaaggaagcactacagaaggctcttgggacaaacccgtcaacagtcacgatgtgccgacgggcatcaaagtcggtgccaacagctgcaacggtgagattctcatcgtgaaaggtaaactcacatcgaacggcaagccttgttacgtcgctctccaaagtcttccgaaagctgacacacgtgccgacgtgagcatttattataaggtactcgaggaaggcaagaagtacacgaccatcgagtttgccgagggctggaaacttggcatgcaagtaactcaaaaacgttctgcttattccaccatgtgccttcagaaggacggtcgcatcgctttcttctacgaagaggaaccttatatatataatatggtatatgtgcctctttccctcaaacaggccacgaatggcgaggtaaaataggaagtttgttttagctcaacggcagttggtgcgagttcttgacttcgcccagcacgaagaacgagttgagcgagccgatgcagtcaaggtcgccgagtattctgagcacaaattcctggtaagccttcatgtctgagacatagattttaagcatgaagtcgtagtcgccgctgatgttgtagcactcgactatctcgggaatttgctgcacggcctccatgatgcggtgtgcgttctcgtgggaatgttgcttcatcctgaggttgcagaatgcgatgaagcctcggttaatcttctccgcatccagtacagccatgtattttttgatgtaaccctcgcgttcaagacgctttacacgctcgaaagtgggtgtgggagagaggtgaatcttcgctgctaactccttgttagtcagcctggaatcgtcctgcagaaggcttagaatccgcaggtctgtttcgtcaagaatgttcgtcatttgagttaaagaatcttttacctgcagaaggggcatttcttatcctttgtcaggtgcttttatctgttatgcgatgcaaagatagtaaatatttctaaataattcattcttcttggagaatatttcatgttgtcgtaactttgcaccgtcgaaaggacaaatagaacgacaattccatacattattaaataattaaatagtaaataaatcgtaaattgtaaatcgttaaatagtaaatatcgttatgagtacgcagaaacaacacctcgagaccattgccctgcatgcaggacaggtggcagatcccacgacagattcatgtgcagttcctatttatcaaactgcaagctatgtgtttcacaatgcccaacacgctgctgaccgctttggccttcgtgatgctggaaatatttatggacgcctgacgaactccactcaaggcgtgctggaggacaggattgctgccttggaaggtggcgtggcagccctcgcagtcgcttctggtgctgctgccatcacttattccttacagaatattcttcaggcaggcgaccatatcgtggcagccgacaacctgtacggaggctcttacaacctcatcacacacaccctcgctgcttcaaaaatagcccattccatcgtaaaaatcaatgatcttgaagctttggaagccgccattcaacccaacacgaaagtcatctacgctgagactttgggcaatccgaacagcgacgtacttaacatagaaggtgtggctgaggtggcacacaggcatggaatcgtctttatcgtcgataacacgtttgctccgctgttgattcgtcccctcgaacatggggcagacatcgtcgtacattcagccacgaagtttatcggaggacacggaacaacccttggtggcgtgatagttgatggcggaaagttcgactggaaagccaatgccgaccgctattcttcgatagcaaagcctgatgccagctatcatggtgcagtctttgccgatgttgcaggaccagctgctttcgttactcgcattcgtgccgtcatccttcgcgacacaggcgcagccatttcgcccttcaatgcctggattcttctgcaaggtgtcgagtcgttgccattgcgcatcgagcgtcacacagagaatgccttgaaggtggtcgattacctttcgaagcatcctttggtagcgaaagtgaaccatccgtcacttgcttctcatccagataatgcgctctataagagatacttccccaagggcggagccagcatctttactttcgagataaaaggcgggcaggaagctgcgtggaagttcatcgatgcgttgcagatcttcaccttgcttgcaaatgttgctgacgtgaagagtctcgtcatccatccagcaacgacaacccactcgcagctctccgacgaggaacttgccgaacagcacatcacgcccagcaccattcgactgagcatcggtgttgagcatatcgacgacatcattgcggacctcgaacaggcttttaatgcaataaaataaggtatagaatcgttatttataggacccccttgccccctttagggggaaaaacagtaaacagtaaaacattaaatagtaaatattatggcaatctacaactcaattactgaacttatcggcaagacgccgttggttcaactcagcacttttgcaaagaatcgcgacctgaaagctaacgtcatagctaaggtggagttcttcaacccaggtggcagtgtcaaggaccgtatcgctctcagcatgatactcgatgccgaggagaaaggcatcctcaagcaaggtggcaccatcatcgaaccaaccagcggtaacacgggtgtcggactctcgctcgtgggtgcagttcgtggctacaaagtcatcctgacgatgcccgagacgatgagcatcgaacgtcgcaaacttgcacaggcttatggtacagaaatcgtcctcactcctggcagcgagggcatgaagggtgctatccgcaaggcagaagaacttcgcgacagcacacccggtgcagttatcctgcagcagttcgaaaacccggcaaacccagctatccatgccaagacgacgggcgaagagatttggaaagacacagaaggcaaggtcgatgtttttgttgctggtgttggtactggtggaacggtttcaggcacagccaaggctcttaaggctcacaatcccaatgtctatgttgttgctgttgagccagcctcgagtgcagtcctctccggtcaaccttctggtccccacaagattcagggcataggtgcaggcttcgagccaaagaatttcgaccgtcctctcatcgacgagattctgcccgtcagcaacgaagatgcctttgcaacagctcgtgcagttgccaaggaagaaggcatttttgtaggcatttcctctggtgcagcagcttatgccgccagcgtaatagcccagcgtcctgagtttgcaggcaagaacatcgtcgttcttttgcccgacacaggcgaacgctatctatctacagctttgctggaggaatagttagtgtcgtgtaaacaacgctatctatctacagctttgctggaggaatagttagtgtcgtgtaaacaacgctatctatctacagctttgctggaagaataaagaaaagcagtcaatctcttttctgtatgcagataattttgtacttttgtctctcgaaggataatataatcgagggaaacgtatgaaattatctgcatcttttttcctattcttctttgctctgactgtttcggctcaagagttccgcgactttggggcgcgcctcggtgctaaagcatccgagaagacaacattccagactgcaggaccctggaaaccagtcacagacattcgctccgacctcgtgatggtctatggagccaacgacaatcgccgcatgaccttccacgagagagtggagtcgtggaggcaaagaggctacaccacccacttcatgacgggcattgcctggggcaactatcaggactatttcacgggcaaatgggacggcaagtggcacctcgatgaagggcaaaagacgatgcagggcgacaccatctggcacggccgcctcattccttatatcattcccaccaagaactatctcgcttacttcaaggagcgccacatcaagcctgtgatagacgccggcatagatgccattttcctcgaggagccggagttctgggcgagggcaggttacagcgaggccttccagcgcgagtggcaggactactacggcttcccgtggcggcctcagcacgagagtgcggagaatacctacctctccaacaaactcaagtaccacctctactatcgtgctctcgatgaggctttcgcgtatgccaagcagtatgggcgcgagaaggggatgaacgtacgctgttatgtgccgacgcattccctgctcaactattcccaatggcagattgtgtcgcccgaagcctcgctcgcctcgatggagaactgcgacggctacatcgcgcaggtctggacgggaacctcccgcgagccgaactacttcaacggcaaagcaaaggagcgcgtcttcgagacggctttcctggagtacggttgcatggagtccatgacgcgaccgaccggccgaaagatgttcttcctgaccgaccccatcgaggacagggcaaaggattgggaggactacaaacgcaactatcaggccaccttcacggcgcagttgctttatcctcagattgccgattacgaggtgatgccttggcccgaccgcatctatgagggactctacaaggtgagcgcaaatagcgatgaaaaggcacacattccgcgtttctactccacacagatgcaggtgatgctcaacaccctcaacttcatgccgctctccgagaatcgggtcagcgggtcgcaaggcatctccgtgctgatggcgaactccctgatgttccagcgctcgccaagaccggtagagggttacgatgacccgcagctctccaacttctacggcgaggcgcttcccctcttgaaacgaggcgtgcccgtcagcatcacacacatagagaacgtgggttatgctgagacgtggaacgatgtgcgggtgcttttgatgtcctacagcaacatgaaacctctctcgcccgaagcccacatacatttggctgaatgggtaaaaaagggcggtttcatcgtatattctgggcgtgacgatgacccttatcagggtgtgcaagagtggtggaatcagggcgagatgcactatgccgctccctccgaacacctcttctccctgatgggcattcccgagaaagcagccgagggcgaatataaatatggtaagggcaaagtctatgtgctgaggcacgaccccaaggagtatgtcctcaaggagggtggcgacaaaaagttcgtggaggtcgtcgagaaggcatacggcaagctggagcagaagaactctttctacctggagcgcgggccatatacccttgtcgctgtgctcgacgagaatgtcgtgagtgacgctccatttacaaaaaaaggccatttcatcgaccttttctcgcctgagcttacctatttttcagagataagtatcctgcccggacaacaaggtttcttcttcgacttaaccaaaatcgacaagaaacgtccgcaggtaattgcagctgcttcgcgtcagtatgacgagcagacgaccgacgaaggcttccgcttcatctgcaagtcgcctctgaacaccaccaacatcgtttgtctctatctgcccaaagactacaagtcaggccatttcaccctgaccgatgcggaaggcaacacggtcaaccacgaaatgaaggtcataacggctcccgccaacaccttggccggccgactcttctggctctcgttcgagaactctccagacggcataaaggttcaaataaagaaaaactaacaaccatgaaacgaatagtattttcatttcaatccttcggacttcaaactttcacaagaaaacaatgaaaaacagtttagagttgagggttgagaggttagagtttaggctgaaagccttaaatatatcagcccagggcacacgccctgggctgactgctttctgccctttcagggcttcccttccccctctccacggaagagagtcgggggttcttcctccccctcacgggggagttagagggggtctttactcgaggccctgaatagtgtcctcgttcctgatcacctcgatggcgtcggcctgtgccttgcgcgaaggcacgagctggaaggtcgcctcgctgcggaggctttcgaagctcttgccaggcgtccagcgcacattcacatcctcgatgtagttgatgttgaagtcgtcggtagtcttcgcacccttagtggcaagttctacgtggaagtcaccgaggtcgccaatcttcaccttgttgccagccaagagctgctcgcgaaggcaagccaccgcgtcggtcaagacgcccttgatggtgcccttcgagaaaggcgaatgatggtcagcaatgtgcttgcagaaagtgtcgaaagagagaacctcgtcaacttgtgctgcgccataggcttttgtctcggtgatgtcggcttttttagtaccaggatttgcactcttgatggaaatgctgtaattaatcataatagtaaattttaaatggttaatagttaataagttaattagttcgcatgtgtaggctgaaaagatgacacgagatgtttccaaaagggacacgtccctattggcaatgcgacacgtccctatggccaacgggacacgtccctattgacaacgcgactaaaggatattgaaaacgtcacatgtgaagctggccaatttgactgcagtcgataaaaaacttcacatgattttcggtctgacttttcagaaccttcacgcttttatatacagggcaccccctcttttttcaaccccaaggcccaaaaaagatacaaaaaagtgtggttttgcaatctccggttgtcaaaaaatagtatatttgcagaaaaataatggaaaagagcatatggaaacaatcataacctgggctaaggagaactaccaactcattgtcctagccgtaagcgttgcaggcgtcctcctcgccattctaagcctcatcctcgaggttaggaagaggaaagaaaaagcccctccagaggagaggcagtaggaattcatccttcggcatatagccttattgtgataagatgatgaatgaattatccgatgcaaaggtatgagtttttggtgaaatgacaaaacaaattgataagaaaatgaataaaaaacgtattttaggacttgacactggcacaaacagtcttggatgggccgtagtagaccgcgaagagagcggccactacacacttgttgacaagggagttatcatttttcaggaaggtgtgaaaatagagaagggagtagagtcaagtaaagcttccgagcgaacacaacacagagcgcttcgtaaacaatatttccgcagacgtttgcgcaagattgaagttttgaaggtcttgatgaaatacaacctttgcccagccctaaccgaagaagacctgaagttgtggaagcaacgcaaaatttacccgaagaaggacgatttcatgctttggcagcgtacaaacgacaacgaagatataaacccttatcattgtcgtcatatctgtctcaacaaggagcttaacttcgaccttgagcaggacagatacaccctaggccgtgctttctatcatatggcccagcgtagaggtttcctcagtaaccggttggatgaaagcgaggaggaagagaacggtacagttaagagctgcattgccgaccttagcaaagaaatggagttgaatggctgccagtatcttggcgagtacttctataaattatataaggaacgcgcgaataacatccgtattcgtacgcgctataccgaccgcgagcagcactacaagaaggagttttttgctatctgcgaaaagcagcatctgacagaaactatggttgaagacctgaaacgcgccctttatttccagcgccctttgaagagccagcgtcagaatgtaggaaaatgcaccttcgagaagggcaaaccgcgcgtcagcgattcgcatcccgcattcgaggagttccgcatgctctcgttcctaaacaatgtgaaggtgcaaggcccgaacgatgccgaactgcgtccgctcaacgaagaggaattggcgaaaatcgattcgctcttttacaggaagactaaacccaacttcgacttcgaagacatcgccaagaagattgcaggtaagggcaaatacgggtggaaaggtgacaaccagacagctctgccctacaaattcaattatcgcatgagccagggcgtgcccggatgccccaccatcgcacaactgaaggaaatcttcggcgaggactggaaggacggcattgtcgagacctatctgcagaacaccaagaaggatggcacgcacaagagtgtcgacgaaatggtaaatgatatttggaatgtgctcttcttcttcgacagcaaagacaaggtaaaggaattcggcatcaagcatctgcaattggatgaagaaaaagctgagaagttctctaagatacgtctcagtcgaggctatgcatctctatccttgaaggctgtgcgctgcatcctgcctttcttggaaatgggaatgatatacacagatgccgtcttctttgcgaaggtgccagacatcgtgggccgtagtatttggcaagagcgacagaatgaaataaaagaagacctctcttatgccatacagatggcaatgaaggagaagcgtcgcatcgacgaagcagtgaaggactatctgcaggataacttcgacttgaagcctggagcagcagaaatgctctaccatccctcgatgatagagacctatcccgatgccaagccgaacaaagatggcgtcgtcttgcttggcagcccacgcacgaatgccgtgaagaatcctatggcaatgcgttcgctccacgaagtacgcaaagttgtcaacaccctcatcagggaaggtaaaataggccctgataccgaggtgcacatcgaatatgcgcgcggcttgaacaatgccaacatgcgtgctgccataaacgattggcagcgcgaacaggacaagaagcacaagcagtatgccgacgaaatccgccacctctacaaagaagcgacaggcaaagacatcgaacccacggaaaccgacattctgaagttccaactatgggaagagcaagaccacacgtgtctctacacaggtgacaagattggcattgccgactttataggtgcaggcccgaagttcgacatcgagcacaccatcccgcaaagcgtgggtggcgacagcacgcagatgaacctgacgctctgcaacaaccagttcaaccgctttgtcaagaaagcaaaaattccgacggaactcgccgagcacgaggaaatcatgacgcgaatagagccttggaaggagcgcattgacgacctgacgaagcagatagaccgtatcagcacgcgcggcatttgggataaggccacgaaggataaacaaatccgaaagaagaacaagttgaagatagagcgcgactattggcaaggcaaatacaagcggttcacgatgactgaagttcccgaaggcttcgctctccgccaaggcgctggcatcggtctgatttccaagtatgccgccctttatttgaagagttatttccacgacacactgcatcccgaacgtcgccaggtctacagcatcaagggaaccgtcaccgccgagttccgaaagatgtggggcatacaggaagagtacgagaagaagtcgcgcgacagccatacccaccattgcatcgacgccatcgtcatcgcttgcatcggcaagaacgagttcaatatgatgggcaagtaccatcgcgatatgtttgattttagtgaaggtaatggaccgaagccccaattcgaaaagccttggcccaccttcacacaagacctcaagcaaatctctgaggaacttctggtcgtgcacgacacgcccgacaatatgccgaagaaggcttcgcgaatgatagaggtgaacggcaggaaggtcgtggctcgtggcgattgcgctcgtggcagtctgcatcaggatacctattacggcgcaatcgagagggacggcgacatcaagtatgtggtgcgcaaatcgctaagcagcatgaaggaaagcgatgtggaaaacatcgtggacgatgtcgtaaaggcaaaagtgaagcaggcgatagcagaaaaaggcttcaaggatgccatggccggagacatctatatgaacgaggcgaagggcatcctcatcaagaaagtgcgttgctatacgccatccgttacccagcccctcgacatccgtcgccatcgcgatgcgagcaggaaagactacaagcagccatatcatgtgatgaatgatgaaaactacatgatggcaatctatcaaggcattgtgaaaggtaagcgcaaaacatcgtttgttttggtaaacgcactcgatgccgtcaaattcttcaaagagagcacagacaggaatgactatccttccatcgttccagaagaaaaaagtgggttgaagttgaaatgctttgttaagaaaggtacgcatctgcttatgcttgaagagggtgaggaaagtataagcttggcaaatgctaatgaactgagcagtaggttgtttaccataacgaaaatggataagaatgggcttcttacttgtaagaatagcaaagaagcaagagcggcaggagaattaaaaagtttcctgaattcaagccttttccgtttgctggaaggataccgtcctattcttcgcatgagtcctgcaaatttcaattttcttgtcgaaggctatgattttacgataacacctttaggagaaataaaactgaaacattagaatgcttaagcagacattagtatttaccaatccatatcggctgtccatgaagaatgcacaattggtggttgcttcaaaggatatgcctgatgagtcgcgaaccatccccatagaagatataggtgtagtgattatagaagatcagcagatttctattaccatacctctattgaacgaattggtcgacgctggtgttgcggtcattctttgtgacaagaaagggatgcctcacgctatgcttcagaatatggacggaaacaaccttcaaggcgaattccttcgcaaccaaatagaagtcggcgaggtccttcgcaaacaattgtggaagcaaattgtagaggcaaaaataaagaatcagtccgctttgttgggaaaacttcatggcaaaggcaatatcctaaaaccgttctatatgaacgtaaaaagcggagacagcgataatagggaagggattgcagctcggctatattggggaacattgtttggagaagatttcattcgaaacagagaagaaggtggtatcaatgcactcctgaattatggctatgctgtgcttcgtgctgcaacggcaagagcattggtttcagcaggattaacaccttcgcttgggattttccatcataacagaagtaatgcattccctcttgcagacgacctgatggaaccctatcgtccgttcgtcgatgaagtagtatatcatctgtgtgaagaaggaaaactggagataaacaaagaaactaaggcaaaacttcttggaatactgacatgtgacactttcttccctaaagtgacaagacccttgcaaataggcttgtcaataacaatggcatcattggcaaagtgctatgcaggaaaacaaaagaacctttcactaccatcattaaaatgagtgaagtacgtctaaatgcatataaaataatgtggcttatagctatgttcgatttaccaacaaagacaaagagggaacgacacgactatgccgtctttcgcaaaagcctggaaaaggacggctttgtcatgcatcagtatagtgtgtattgtcgtttctgcgcatcattagaggcgagggatgtgcatgtaagaagagtgaaatcctatatgccgagcaaaggtagattaagtataataacaatcacagataaacaatactcaggaataataaacatttggggtgtaattgaacaaaaagtacagaaaagaccagttcaattagaatttttttaataactttgcagtcgataagatactcatcattccacttcttataggtaaaaaagtgttctattgttctaatatcaaatagaatacatcatataggttgtggtttgatgatgaaatgagataagaaacaacgataaaaggcatataacatccgaaatcgggttgtggtttgatgatgaaatgagataagaaacaactttagttatattttgaccaaccatatactagttgtggtttgatgatgaaatgagataagaaacaaccggaggtggtgtttatctccccggtataagttgtggtttgatgatgaaatgagataagaaacaacatatacacgtatgaggaaaaattcagctgggttgtggtttgatgatgaaatgagataagaaacaacccaactcaagacacgcatccaggacacgaagttgtggtttgatgatgaaatgagataagaaacaacataagacatacagaactcttcaacacttcagttgtggtttgatgatgaaatgagataagaaacaacttgttatcaagaatgtcacactgataaatagttgtggtttgatgatgaaatgagataagaaacaacattgttactagtatgtggcttaagggcactgttgtggtttgatgatgaaatgagataagaaacaacgaggtaaacccttattatctcgttcagtaagttgtggtttgatgatgaaatgagataagaaacaactcattcaggaagcccactggttctttaccgttgtggtttgatgatgaaatgagataagaaacaacgcaacgtcaaattcaaagtgcagccagcaagttgtggtttgatgatgaaatgagataagaaacaacgagtacggaacaaatgccatgcatctgtctgttgtggtttgatgatgaaatgagataagaaacaactaattcaagagaatcaagtctagatttaagttgtggtttgatgatgaaatgagataagaaacaacatcaccataaacaccacgagtccaagggaagttgtggtttgatgatgaaatgagataagaaacaactagcagctctcaaagcttcaacggtaaacgttgtggtttgatgatgaaatgagataagaaacaactccgaccaatgtgggtagagaatacggtaggttgtggtttgatgatgaaatgagataagaaacaactgaagatatcctcgaaaggattgataagggttgtggtttgatgatgaaatgagataagaaacaacacatgagtttaagctcataataacgtggtagttgtggtttgatgatgaaatgagataagaaacaacggatggcaagtgactcaccgaggtgcttcagttgtggtttgatgatgaaatgagataagaaacaaccgctcgacgcaaactctgcaccattcgccggttgtggtttgatgatgaaatgagataagaaacaacagttcacaattcacaattagataaagattagttgtggtttgatgatgaaatgagataagaaacaactcaatcggtgttctatgttaatgccgtgaagttgtggtttgatgatgaaatgagataagaaacaacatagtcttgatgattagtgctcaccctgcacgttgtggtttgatgatgaaatgagataagaaacaacccgcaattcttttcacgatgttctctaatagttgtggtttgatgatgaaatgagataagaaacaacgtgacgacattgacgcatacctgaccgagcgttgtggtttgatgatgaaatgagataagaaacaacgtctatcctctccggctcctgccagtgagggttgtggtttgatgatgaaatgagataagaaacaacgttcttctttgcgagaaccctaccagccatgttgtggtttgatgatgaaatgagataagaaacaacatcttgatttgatgctgtactgaggaaggtgttgtggtttgatgatgaaatgagataagaaacaacaatagtgccaagaaagttgttagtcaaatagttgtggtttgatgatgaaatgagataagaaacaactgataaacgaagcggacgatatcgctcgtgttgtggtttgatgatgaaatgagataagaaacaacctggaagctgaaagcaggaagcccaagccagttgtggtttgatgatgaaatgagataagaaacaacctgaactatttatgccattgctagaatttagttgtggtttgatgatgaaatgagataagaaacaacaccaaaatcagcagaaccagtccaattacagttgtggtttgatgatgaaatgagataagaaacaacataacagaagattttgcaccaccgatataagttgtggtttgatgatgaaatgagataagaaacaacaaaaaaaaatagattccctgcaaattatcagttgtggtttgatgatgaaatgagataagaaacaaccagacgaatggacaaccaacatcagtgtcagttgtggtttgatgatgaaatgagataagaaacaacgatcagttggatcaagattaccaagcatacgttgtggtttgatgatgaaatgagataagaaacaactaaacaagtcatttgtcacgagatatttcagttgtggtttgatgatgaaatgagataagaaacacttgaaacgcaaaaggtaacagaaaacacaacccttttcacatcaaacaaatccacgttacaggtctttctgcagcggggatttcttgttctttcgaatcatcaatcagtgcagcaaagacaagaattttatttgaaaatggttgtagtgttacaaccttttctagaagcacaacagaaaaagtaaagaggatgaaccgtttggctcatcctcttctcttgctcgtgcccggaacgggaatcgaacccgtacggccatcactggccaagggattttaagtccctcgtgaaaaagtttaaagtttaaagtttaaagtttaaagtttttttctcttttgggcaaaattgtgtccaattctatgtcaatatgaagtaaatgacggaggcggggatggtgagcagggcgctgtcgaagcggtcgagcataccaccatgacctggcaggacgtgcccgctgtccttgatgccgagctgacgcttgatgaggctctccacgaggtcgccccaagtgccgaagactacaactgtgagggcaaagccaagccagcgcagcagagacattgaggattgaccattgaccattgaccattgaccattgtccaagcgccagatgatgacggctgccagcagggtgaagagtccgccgccgatgcttcctatccacgacttcttgggcgagatgcgggggaagagtttgtaggggatgtacttctgaagcgtgcagccgcagaggtaggcgaatgtgtcgttcacccataggaagatgaacagggcaagcggataaatccagttgtatgtcatgctgcctgtcgtctcgtcatagacgatgctgagcaggggcagcagggcaaagggtagggcgatgtagagctgcgaagcaaagcagagtgcccagtcctgcaagggattcatgctgtgcctgtagagtccgctgatgatgatgtagagtatcagcaggccatagagtgcgaacatctgtgccgtctgcggactggcgatggcgctgagccacacggcagccacaagcacgacgcctgccattgcattgatggggcgaggcattcgagcctcaagatgtgtgttcatcaatgtgccgaactcccacagcgtggctgccgctacgacagcaaagaagaagaaggcactgacgggactatagactgtgcagcccacaagcagcaggacataaatggcaccagtcagggtgcggatgatgagattgcgcatggctatttcgttattatgttataacgttatgtcgttattacgaggcattgttgttatcggtgttgtctgtcagtagttcttctgtgcggcttgcccagggacggggaccgaagatgcgctccacgtcttcagcgaagatgacttcgcgctcgacgagcaactgtgcgagggcagcgtgaccctcggcattcttgctgaggatgtccttcgcacgggcgtattgctcggcaatcatggcctttgtctcttcgtcgatgagctgtgccgtcgcctcggaataggggcgttggaagccatactcctgattgtcgtagtaacagaggttgggcagtttgtcgctcatgcccatgtaggttatcatgctgtaagcctgcttcgtgacgcgctccaggtcgttcatggcgccgctactgatgtgaccgcagaagagttcctcagcagcgcggcctccaagggtggcgcacatctcgtcgagcatctgctcgcgagtggtaatctgacgctcctcagggagataccaagcagcaccgagggcacggcctcgcggcacgatggtgaccttgacgagcgggttggcgtattgcaagagccagctgatagtggcgtgacctgcttcgtggagggcgatggtgcgcttctcctcggcagtcattaccttggtcttcttctccaagccgccaatgatacggtccacggcagccagaaagtcatccttatcgacagccttcttgccgtttcgagccgcaatgagagccgcctcgttgcagacgttggcgatgtcagcaccgctgaagccaggtgtttggcgtgcaaggaagtcgatgtcgagggactggtctgtcttgataggtttcaggtgaacctggaagatttccttgcgctcgttcacatcaggcagctcgacatgaatctgacgatcgaagcgtcctgcacgcaagagagccttgtccaggatgtcggcacggttggttgcagccatgatgatgacgccgctattggttccgaagccgtccatctcggtgaggagctggttgagcgtgctctcgcgttcatcgttggcacccatctgaacaccacggcttcgagcacgacctacagcatcaatctcgtcgatgaagatgatgcagggcgctttctctttagcctgacggaagaggtcgcgaacgcggcttgcaccaacgcccacaaacatctcgacgaaatcgctgcccgacatgctgaagaacggcacatcggcttcacctgcaacggcttttgcaagcaaggtcttacccgttccgggagggccaacaagcagcgcacctttgggaatcttgccgcccagttccgtgtagcgttgtgggttcttgaggaactccacaatctcctgcacctcgagttttgcgccttcctgaccagccacgtcggcaaaggtcaccttattctcgtcgttcttctcgaagagtttagcgcggctcttgcccacgttgaagatgcccatcggtccgccgccatcgcttcctccgctcattcttcgcatcaggaaaatccagaagaagacgatgaggatgagcggtccgaagctccagaagaaatgcatgaagtcgtcttctccctgtcggtactctatctcgcccttaaagttctcgagggcttgctgttcgctgatgaagtcctcgagcttgtcggcagatggtacttgcactacgacataaggccgagtaccttggttaaccttttgctccttgaagacatcgcggatgtgggcaggctcgacatacatctgcagagccccctccttcttgttaacgacgattcgcgaggcatagccttgctccacataacttttgaactggctgtatgttgcattacgcgaggagctgcccgaaagcagagaactgtcgccactcatgaacagatagcccaaagtgatggctatgatgagataaatccacgtgaggcttatctgcgagccaggcttcttgtccttcttattcttatttgttttcttgttgtcgctcataatcagtcgaggttaggaatgctttgaaggtcggcatcagcccaaaggtgttcgatgtcgtagaacgagcgaagttcaggcacgaagatatgcacgatgacgtcggcaaagtccatagccacccaaacagcattgtgaagtccgctgacggcaatgggtttggcagcaactttctcccgacaagtatctccgacagaatgtgcaagagcggcaacctgcaatggcgaaccacccgagcagatgacgaagtattggcaaacagcatcgggtattcctgtgaggtcggccaccacgatgtcccttcctttcttctcctgtaatccttctactatagcttctaccaactcgttcttctttttcttcattcgcaatatattataatatgtataagaatcaatcgcgtgcaaagatacaaaaaattagttcatgaatcacataataaggttcataattcaattttattaagtttttttttgcaaattatttggtcagtttgcaaaaaagccatacctttgcagcgcaattgggctatggtgtaatggtaacactgcagattctggtcctgcctttcctggttcgagtccgggtagcccaacgttgaaaggtagaggctgtgctgaggaagtgcggcctttttcaaacataaaagagaaacaaagcattttataatcacaatggacgactatcacgcggataattacagttcttagtgctctggagtctgcatcgctttgcacgctccaaaaggagccaaggatttatgtgcaagtaccccaaaaaagcagaggaggaacaagacgatgcgaacatactggaacacttcgaatggtctgcgtaccattggagaatggcagcctggctgctgggtgcaggtgacctgcccaacagaggaagatgtgaacttcctagagcaaacgctcaagattcccgattactacattagcgatattgccgatacggacgaacgtgcccgttacgacattgacgatggctgggtgctcatcatccttcgtattccttatgtcaaggaaacgaagagcagaacgccttatactacgattcctctgggtatcatcatgaagggcgatgttctcatcacggtctgcaacttcgagacaaacatgatgatagacttcgtttcctatcagcagaagcgtggcttgggcttcgtcgatagcgtggatatgatattccgtctgttcctctgttgtgccgtgtggtatctgaaacgcctgaagcaaatcagcactcgcatagataaagccaagcagaacctcgaccgcaagataagcaatgcagaccttatcgctttgagtcgcttgcaggacagtctgacctacttcgtcacatccattcgtggcaacgagaatctgctttcgaagcttaagttcaaactccccatcgacgaacttgatgcagacatgatagaggacgtcggcattgagatgagtcaggctcgcgagacgacaaacatctatgcgaacatccttgattccacgatggacacctacgccaaccttatcaacaacaacatgaactcggtcatgaagatgctcacaagcatcagcattatcctgatgttcccgacgctcattgcaagcctgttcggcatgaaccttgtcaatggtatggagaccgcttcttggggcttcccgcttgcacttgttctctcgattggcgtgactgttgcattcatgtggtatttcaagcgcaaaacgtggatttgagtcatagttcatagttcatagttcataattaagagttgaaatttcaataaacgtgataaaaatcgtgccctttccttgcaggttagggcattttttgtttattttgcgaccactatacctatttttaaatggtaaatcgaatatagttaaatagtaaatgacatgatggactctttagagactaacgagactactgcccttgagcagtcttctgagattacaaacgaacaacaggttgagcaaacggctgaagcagttgaacaggctgagcccgtagtagaaacaccagaaccggtagctgaggaaaccaagcccgaagtagaggaaacagcagagccagaggctgatgagacaactcccgaagtggaggtgaccgaagccgagcagcacatcgctgagcagaccttcaagacaaaggacgaggtggttgcccgcgttcaggaaattgcccagagtggcgaagccggcgaccgtgcggaactcaatctcctgaaacagctcttctacaagttccacaatgctgaagtgcaggaagccttcaaggcttttgtcgaggctggtggcgaggaggataagtttatgccggagatagatacggccgagccagtcttccgtgaagctatgcaagccatccgcgaacgccgtgccgctatccaggaaacgctggagaagcagaagcaggacaacctgaagcgcaaactcgagatactggaacgcatccagcaactggcctctacgcctgaggaagccaacaagaacttcgacgagttcaaggctctgcagacggagtggaaagagattaaggctgtgccggccgagcgtgctacggaactgtggaagaactatcagctttacgtagagcagtactacgatttgttgaagctcggtcatgagttgcgcgactacgacttcaagaagaacctcgagaccaagatgcgtctcatccagcaggcagaagccctcgccgagaatcccgatgtgctgcaggctttcaaccagctgcagacactccatcaggagtggaaggagacgggtcccgttgcaaaggaaatccgcgaagacgtttgggcgaagttcaaggaagcctctaccatcatcaataagaaacaccaggcctacttcgatgccattaaggctcgcgaggaagagaacctgacgaagaagactgctctgtgcgagcagctcgaagcct

SEQ ID NO: 1644 - DNA, 23660 bp, synthetic construct
  misc_feature 1..23660: note = Synthetic
  source 1..23660: mol_type = other DNA
ggtgttcctcccggcaggggaaggatggggcggcgtccgccctttagtcctccatcagcttgcgatagcgggtcttcctgatgtcctcgttgccgaggcggcgcgccttgttgatctcgtattccgaatagtcgccctcgaaatagaccacttcgccttcgccctcaaaggcaaggatgtgggtgcagatgcggtcgaggaaccatcggtcgtggctgatgacgacggcgcagcccgcgaaactctccagtccttcttccagcgcgcggagcgtgttgacatcaatgtcgttggtaggctcgtcgagcagcagcacattgccttcctgcttcagggccagagccagctgcaggcggttgcgttcgccgccggagagcacgccgcagagcttgttctggtcggttccgctgaagttgaagcgtgcgaggtaggcccgggagttcacatcgcggcctcccatgcggaaagtctcattaccctgcgataccacctcatagacgctcttcgcggggtctatatccttgtgctgctggtctacataggccagtttcaccgtctcgcccacctcgaaggtgccgccatcgggctgctccagtcccatgatgagccggaagagggtggtcttcccggctccattggggcctatcacacccacgattccgttgggcggcaggttgaaattgaggtcgccgaagagcgttttttcgccaaaggccttgttcacatgctgcgcctcgatgaccttgttgcccagccggggaccgttgggtatgaagatttcgagtttctcgtcgcgctctttctgctcctcgttgagcatctgctcataggagttcaggcgggccttgcccttagcctgccgtgccttgggagccatgcgcacccattccagctctcgttcgagggtcttgcggcgcttcgacaccgtcttctcctcctgctccatgcgactggtcttctgctcgagccacgaggagtagttacccttccatgggatgccttcgccccggtcgagttcgagaatccattcgctcacatcgtcgaggaagtagcggtcgtgggtaacggcgatcaccgtgccctcatactgctgcagatgctgttccagccagtcgatgctttcggcgtcgaggtggttggtaggctcgtcgaggagcagcacgtcgggcttctggaggagcagtttgcagagtgccacgcgcctccgctcacctcccgagaggttcttcaccggggcgtctccctgtgggcagcgcagggcggccatggctctctcgagcttggaatccatgttccatgcgtccgtagcgtcgatgatgtcttgcacttcggcctgtcgcttcatgagcatatccatcttgtcggggtcgccgtagtactcttccatgccgaactttgcgttgatttcgtcgtattccttcagcgcgtcgtatacctttcgcacgccttcctgcacattctccttcaccgtcttgtcgtcgtcgagcggcggatcctggggcaaataccccacggagtatcccgggctccataccacctcgcccagcgtgggctgttccaggccggctataatcttcatcagcgtagacttgcccgcgccgttgaggccgatgatgcctattttcgctccgtagaagaacgagagataaatgttcttcagaatctgtttctggttttgtgaaattgtcttcgacacgcccaccatggagaagatgatcttcttatcgtctactgttgccatatctgttaataatgatttctttttcggatgtttgtgcaaatatagctaaaaaagttcaataggccaacaaaagagtgcgatttctcccgctcagggcgacggggaggacttcggtaggcgatggggtggggtcagaaggaaagggacttacttcgggtgcagcttctatatgcgggtaaaaaagaatgcttgcttgctacttgtcgtcgtaatggccataggccgtaagcaccattaccatgacttctgcatcatgaatcttgtacaccaagcggtgtttctgggtgatacggcggctccaccagccagtcgaagcacctcgcagcagttcgggatgccccgtgccgttggtaggatggtcgtagagttcggctatcagccttagtgctttcttataggcagccggctcgctgcgttgcaataactttaagtcttcgagtgcttgctgcttgaatctgacctcaaatctcatagagagctcacataattgttaagctcgttcacatcggcaaacgacctgctttcaccctgcgaggccttttcgatgcgtgcaaaaaactcctcgcgactcatccgaggcgtttcgagagtctcttttccggcgatgcgtttcagcgccttgacagcctttcgcataagtccttcatccttggcgatgatggcaagttggtggaaaagctcttcattgagttgcatggtggtcatattcattcatcctttcattggtttccttttgcaaacgtactgattttttctcgtaaatgcaaatgcttgacttattttaacagtgcataccgatggagcttcgggtgatgtcggcacgcttgcttctcccgctcagggcggcggggaggacttcggtaggcgacggggtggggtcagaagaggcgtggctccttatcgaggaagctctcttgtcgcagggggaggataaggtcggtgggtttgagggctcccgtcatcaggggcgactcggggtcgtgcgcgggctttctacttgttttcttcaaacctctgccggtcttcaatgatgtctttatagttctcgagcgaccagtctacgagcgtgccgacgagcggtatgagcgtgagggcccgccccgtgagggtgtattccacgcgtggcggcacctcgggataggccttgcggctcaccagtccgtcggcttcgagcgcgcgcagggtggcagtgagcatgcgttgcgagatgtcggggatggccttggccagctggctgaatcgcatgccgtgctccttgccgttgagggtgaggaggacgaggagggcccatttctcggctatgcgtgcgaggatgttgcgcacggggcactccggaaagatggggtcgatgatggaatttgatgcggtagttgtcatgtggtcgttgtctttatggcttgtggatgtatgcgttcacgccttctgcaaaggtaatgataattctcggaaacggcaaggggagtgtcttggaaaaccagggacgaccgccgattttttcggaagccgtcccttatgagtcttttagccgtcgggagattgacgatttcggcgatttcgtgcgacaatttcgccgatttcgtcccacgatttcgccgattttgtcgggctgtcagccgctttcaggtcatctgcctaccacttcacctcttcctgtaggatgtcggcgtcggcagcatcctctgtcgtgaaggcgttgccacgatactgcacgcagagcatcacgagtggttccgttccgttgttgcgcacggcgcgcttgccggcgggcgataccctgattactgttccttgactaacggggatgttccggccgtctacctgatactcgcccgtgccgctgaggaagaagtagagctcttcgtggcgcttgtgggtgtggtagaagccgccctcctggcctggctcgaatacctggaacgagaactccgagccgttcgcgccgacggcctgaccgccgaatgccttgcctttcagctccacgccgggccccagcggcaacgcgaagtcgcccagtccgctaaactttccgaaatctaccgccttgaattccttgccctccgcgagggtcttgatctctttcatattcctaatgtttttggttgttgatgtttacggacgcaaagataggcagaaaaaacggcttgtgcaagaggatacttttgcgtaagctacttacacgaatgtaggaattgggcggaaaggcggactgctgcctacgggattaacacagattaacctgtgctgtcttcaggggtcctgtgggcgggagagggggctgatgagtcttcgtcgaggaacctgcgggtgatgccgccgtagctgtctatgcggcggtcgcgcaggaaaggccaccatcggcgcacctgctcgccatggtcgaggtcgacctccacgacggggctctcctcttcgctctccgaggcgcgatggtaccattcgccctgtggaccggctacgaagctgcttccccagaaccggatgcccggctccttgggcgaatagggtttgtcttcgccgctcacggtctcgaatcccacgcggttcacggccactacgggcagtccgttggccacggcatggccgcgcatcacggtagtccatgcttcccgttgtcgctgttgctcttccggggtgtcgtggctgtcgtatccgatggcggtgggatagatgagcagctgtgctccctgcatggccatcaggcgtgctgcctcggggtaccactgatcccagcagacgagcacgccgaggcgtcctacggatgtatcgatggggtggaagccgagatctccgggcgtgaagtagaatttttcgtaataggcaggatcgtcggggatgtgcatcttgcggtattttccggcaatgctaccgtctttttctatcactacggctgtgttgtgatagagtcctggggctcgtttctcgaagagcgaggtaacgatgaccactccgagcgacttcgctaactcaccgtagaattgggtggagggcccgggaatgggttctgcctggtcgaaatagtctaccctttcctcctggcagaagtagagcccgttgtgcagttcctgcagtatgatgagttccgccccacgccgggcgaggtcggagatgccttccgcgatccggcgcatgttgtcggtccgcgaggcagtgttgtgctgttgtaacagtcctatgcgcaatatgttcatgtcgttttcggttttatcggggatattgcatggtgatgcagtggatgctcccatgttgtcggatgataatgcgggcatcgatgccgatgattttacggtcgggaaaagcctcccggatggtcttgcaggcagctttgtcgttatcgggctggtcgtaggtgggcacgatgacggccccgttgatcaccagaaagttggcataagtggcaggtagctgttcgccgtcgaaggttatgggatccggcatgggcagcggcagcaggcgatagggcttgccttccagggtgcgcagggccgtcagctggtcttcgagcgccttgaaatcggcatattgggggttgtccttgtcatgacaccttatatataataaggtgtcgtggggggccgtacgcacgatggtgtcgatgtgcccgtcggtgtcgtcgccggtcaggtttccgtgatcgagccacacgatgcgtttggcacggaggctgtccttgagtcggctctctatgtctgcctgtgtgagcggctggttgcggcgcggtgccatgaggcattgcgaggtggtgaagacagtgcccttgccgtcgctctctatcgacccgccctcgagcacgaagtcgccatggtcttcatagtctcctttcaccatgcccgccgcatggagtttgcggttgatagcgttgtctttctcccatgcgaacttctctccccatccgttgaacttgaagtcgagcaggatgcgctcgtcgctgtctttcagcgtgaggaaggcatggtcgcgcgcccaggtgtcgtcggtgtcgcactcgaagtagctgatgtttctctgcatctctgcatccaggcttctgcggagcaaggtttccaccttcccagggtgtggggcgacgacgagcaagggctcgcgggcggcgatggcagcggccagctcgacataggtgtgcgtgatttcgtcgagatatggcatccagtcgctcccggcgtgaggccatgtcaattgcactccgctttgccgcgcccactctgcgggcaggtaaggacactctgttttcatctgcgggaatattttaggcaaagataatgaataaaacttataactttaaatatttatttgtatttttgcaaaaagaagtggaaacagcacgatgcttgaactgaaagatgtatatttggagcatgggggacaggtgattctcgaccatgtgagcctcgcgctgaccgccggcgagaacctctgcgtgctcggagcagcggggagcggcaagaccagcgtgctccttgcgctgcagggactgctgccagtgggaagaggattcctcaccctcgacggcgagcgtttcagtcgcctctcggccccttacttccgtcgctggatggcctttgtgcccgacgccccgcaactgccctacgagacggtgagcgatctgctggaggatgttttcagtctgagtgtaaatcgcggcgtggaagtaagcagggaggctatggtgaaagagttttcctttcttgggttagcgccggaagtctacagcatgcagctccgaaaccttgacgccgagagccttcagggcgtgatgcttgccgctgagggcattctgaaacggcgcatcttgctcattgacaacctgcggaacatccgatggatggactatatcaccacgctcaacaagcatcatgtatcggccgtgataacgacctgcgacgaacgggtggccacgaactttgaaaaaatcatcagactatgaccatattcggaacccttttgggactggcacttattgttctcccgctttacatactctatgccttccaggtgaaaaccctgaggaaagtgcttgcgggcgcaggcaagatggcggcttatttagtattgacggggctttgtctctactttgtcatggagtggaacagcctgttcgtaaacctcctttggctccttctcatggttttcgtaacttcgggaatgacagtgcgccggtcgcggttggcggactggcactatatagtgccggtctccgtgggcgtcatcgtgagcgtgagcattatcggtctctatttcctcttctttgtgatggggctgcagaatccctttgacgcccgttatttcgtgcccgtcctgggaatgatgacgggaggaatgatagagacgaacgcaaaggcactgtcggcttattacaccggtctcgagtatcacaatcagctctactattacctcgtgggtaacggagctactcacgacgaggccgtgaagcatttcttccgccgtgcccttgagcgagcgacgctgccttggattcatcagatgggctatatggtggtgggcgtttcgccggtcatcctctgggtgatggtcttgacgggaatcggcgtccttgaggccctggcctatcagatgctcatcgtgatcctgatgtttgccacctcgctgagttctctgctcatcaccctttatgccgcacgcaggtattcgttcgatgaatatgataaattgaagctcgggaaatgaagctcgggcattcgctcaccctgctcctgacgccgcatttccgcgcgagttgcaccggcgggaggccgcataagccgctgattggcgacatcgacttcttcccggttctcgtcgataacacggagaaaagagtggaggcagaggcccatatgaagagctggagccccgattattccgaacgccggcactaaagctcgccgttggcatgctgccaagaagaatttgaaggaaattcggggaataactcttaattttccttgaaatcttttcctgttccgaataaaatgcgtatctttgcatattaattcatgttagcgtgaaaataaaagaagtggttagcgcccttgaacgattcgcgcctctgcccttgcaggaagactttgataatgccggcctgcaaatcggattgacagatgcggatgtctcaggggctttattgtgtcttgatgttaccgaggccgttgtcgacgaggctgtcgggaagggttgtaatctcatcgtttcccatcatccactcatcttccacaagctccgccgcatcacgggtgaggattatgtgcagcgtgcggtgatgaaggcgataaagaacaatgtggtcattgtctccatgcataccaacatggacagtgcccagggaggcgtaaaccataagatagccgagaagatgaaccttcaggaactggcgttcttcggcaccgagaaggtcgccgacggcgtgcagggaggcgagggcgtcatcggcatgctgccccatccgatggctgccgacgactttatcctgatgatcaagcgtaccttcggcgtggagtgcgtgcaggccaacgagctgctgcgccgtcccatcaggaaagtggccctttgcggcggtgccggctcattcctccttccggaggccatagggcaaggagcggatgctttcgttacgggcgaaatgcactaccacgactacttcggccacgagcaggagatacagatagccatcatcgggcactttcagagcgagcaatatacaggcgaaatattccaatcaatcatagaggaacggtgcccgggagtgagatgttgtctcactgagatatgcaccaatccgataatttatttctaaattatggcaaaaaagaatcctacagacttgacagtagaagagaagctgaaggctctctatcagttgcagacctatctcagcgccattgacgagaagcgcgccttgcgcggcgagctccccttggaggtgcaggaccttgaggacgagcttgctggtttgaacactcgtcttgagaaaatcaacggcgaaatagaagatttccgtgtggcggtagtccagaaaaagggcgagatagcaacggccgaggccagcatcgcccggtacaaagcccagctcgaggaggtaaagaataatcgtgaatacgacacgctgagcaaggaaatcgagtttcagagcctcgaagtggagctctgcaacaagaaaatcaaggaggccggcgtgagggtggaggaaaagcagaaggagctggaagaggctcaggcactcatcgccgaccgtgaggctgccctcaaggagaagcgcacagagctcgacgacatcatgcaggagacccgcgacgaggaagaaaagctcaagaacagggcacgcgacctggaagagaaaatcgaggcaggactgctccgcagcttcaagcgcatccgcaagggtgcccgcaatggcctcgggcttaccgtggtgcagcgtggctcatgcggcggatgcttcaacaagattccgccccagcgtcagcttgatgtcaagatgcataagaaaatcctcgtctgcgagtattgtggccgcatcctcatcgatccggaactggcaggcgtcaagcctgtggagactgccgaggagaaaccgaagcgcaagcgcgccgtgcgcaagaccgccaagaaagctgagtccgacgaggatgcgggcgaggcataaggacgacctttttaaccaatcgttataaatcctcttgcgaggaaaaacaagaagccggaaccttagttccggcttcttcgtgtcttgtgggctcctgtcattcccgctcttttccgtgggcaggggctgcggcaacggccggtcatgccgctatcggccgttgtctgcaatcttacaagctgcttgtaacagcattacaagctgcttgtaacacgattacacaccgtttgtaacacgattacacacggcttgtaatcccacgggcgagagtggctgaggattccggcagcagcttcttgcgctgcctgcggttcccgttagccggtcgtctcgcaatctgggaatcggcctcttccgactgctgtctgcgcagagggcatcctctcgccaaagacaagatttccggcatacaatggaaaaaccgcatgaatattttgtaaatataaataaaaatctgtatatttgcgacaatagaaaacccctccgaggaagggtcataggttttacaaccttcggcatatagccttattgcgataagatgtagaaaatcttatggtgcaaatataggcataatatttgaaacgacaaacttttttcttgtaaatctttaaataatattcaatatgaagaagcggattcttggattggatacgggtacgaacagccttggatgggctgtcgtggaccgtgatgaggagagtggcgagtatgcgctcgttgatcatggagtaattatctttcaggaaggcgtgaagatagagaagggcatcgagtcgtcgagggctgccgagcgcaccgcccatcgggccttgcgccggcaatatttccgccgccgtctgcgcaagatagaggtgctgcgggtgctcgtggcccacaatctctgtccccacctctccgacgaggagctgcacgagtggcatgtgcacaagaggtatccgagaaacgacgacttcatgctctggcagcgcacgagcgacaatgaggacaagaatccctattattatcgccacctctgcctccacaggcagctcgacttgcatgatatcggagatcggtatatccttggtcgggcactctatcatctggcacagcgacgcggattcttgagtaatcgccttgagcagaccgatgagaaggagaccggcaaggtgaaagatgccatcacggggctttccgacgagatgagggcggctgggtgcgaatatctgggcgactacttcttcaggctctatagtgagcagggtaaccgtgtcaggctgcgcagccggtataccgaccgtgaggagcattacaagagagagttccatgccatctgccggaaacaaggtcttgacgagcagttgacgaaggaactggagcgtgccctctatttccagcggccgctgaagtcgcagcggcaaggcgtggggaaatgcaccttcgagcctcgctgtccccgctgtgccgactcccatcctgactttgaggagttcaggaggctctgcttcctcaattcggtgagggtgcaggggccttacgacttctctccacgccctctggatgccgacgagattcggtatatcggccatttcttctatcgcaagagcaagtcgaacttcgatttcgaagacatagccaaggccattgcgggcaagaataattatcagcatatgcgggataaggggaacaagccctataagtttaacttccgtatgacgcagggtgtcgcggactgtccgaccacggcgcaactgaaaaaggtattcggcgacgactggcgccagggcattgccgagacctatacgctcaatacgaggaaggacgggacactgaagaccgcccgggaaatggccgatgatatatggaatgtgctctattcgtttgccgacaaggagcatctcgtggctttcgcgaaagacaagctgcagctcgacgacgaaaaggccgagaagttctcgaagatccggctcacgcacaatttcgcctccttgagcctgaaggccatccgcaagatactgcctttcctgcgtgagggaatgatttactcccatgccgtggcgatggcgaacattccctccatcgtcggtgagtatgcgtgggaggagaagaaggacttcatccttgagaatgtgaagacctatcttgaggataaagaccttgccacaaaggacttttgcatcaagggattcctgcaggacaacttcagtctggatcccggagcggcggagaggctctaccatccctcgatgatcgagacctatcaggacgcccgaagaaatgaggcgggcgtctatcagctgggctcgccgcgcacctcttccgtgcggaaccccatggccatgcgctcgctccatgagctaaggaaggtggtgaacgcattgctcaaggccgggacaatcgatgaaaacaccgaagtgcatatcgagtatgcccgtgaactgaacgactccaacaagcgccagtccatcatgcgctataacaaagaactggagaaccggcacaagcagtatgaggaagaaataaagaagctttataaagaagagacgggcaaggatatcgtgcccaccgaggcggaggtgcagaagttccagttctgggaggagcaggagcatatatgcctctatacgggaaagcggataggcatagccgacttcataggggcgaaccccaagtttgacattgagcacaccgtgccgcgaagcgtgggtggagaaagtacgatggagaacctcaccctttgcgagagtcgcttcaaccgtgaggagaagaaggcgcagctgccgtctgcattggccaatcacgatgaaatcctcgttcgcctggaaccttggaaggagaagtatgaggagctctctgcgcaaatcgatcggctgcataccaacggtggcatggacaaggcgcagaaagaccgcattctccagaaaaagcatttgctgcgtctgaagcgtgattactggcggggaaaatatgagcgtttcaccatgacggaagagccggaaggcttttcccgcaggcagggtgcgggcatcggactcgtgtcgaagtatgccggactctatctgaaatcgctctttcataagaaaggcgaccgcaacaagagcaatgtctatgtggtgaaaggttcgtctaccgccgagttccggcagatgtggggacttcagagccagtatgagaagaagagccgcgacaaccatatccatcattgcatcgatgccatcaccattgcttgtattggtaaggcggagtatgataagtgcgcacgctattacagggaagaggaggcctatgatgcgggtagggcaaagcggccgcagtttccgaagccgtggcctaccttcacggaagatgtgcttggcatagagcaaagcttgctcgtggctcacgatactccggataacatgaagaaacatgcgcggaagacggtgcgcacacctcgcggcaagtttcttgccacgggcgacagtgctcgcggcagtctgcatctcgatacctattatggggccatagagcgagagggcaaggttcgctatgtggtgcgcaagccgttgagcagctttaccagtgagaaagaccttgatcagattgtcgacgagaccgttaagcaagtcgtgaaggatgccgttgcgggcaaaaagtttgccgaagccatcaaagaacccatctatatgaataaggagaagggcatccgcattaacaaggtgagggtgtttgtgccttcggtaaccaatccgttgcatatccgcaagcagagagatgtttcccggaaggactacaagcagcagttccttgtagcgaacgacttaaactatatgttggcaatctatgagggcgaggtgaagggaaaaccgaagcgcgaatttgagatcgtgaataatctggaagctgccgattattataaacagagtatggacaggggagactggccagacatcgttcctgaaagaagtacgaaaaacggtttcccgctttattgcaagttaaagactggtacccatgtcctgctttatgagaagacggctgccgaaatagactttgcgaactataaggatttggacaagcggctctataaggtttccggcatgtcgtcgatgactatatctggtagcaaatatgccgtgataaacttgcgataccatcaagaagcaagagcctcaaaagatgttaaggcaaaaaatggtgcatataagaacggggaagagcatcgagcggcaatcataatgcttcatactcaattgaaagcccttgtcgagggcaaggacttccgtatatcagagcttgggaaaatcacacctattaatatatagcctatgttgaagcgaagcgttgtattccagaatcccgccatgctgtccctgaaggacaggcagttggttgtcaggctgaaggactttcccgatgagaagcggacgattcccatagaggatttgggctttgtgatgatagataatgccttggtatccatcacgataccgttgctgaacgccctgtcggataataatatagcggtagtgttctgcaatgaaaagggtatgcctgcctccatgttgcagaatttagacaccaacaatacccaaggagaggttcttcaaaaccaaatgaacgccacggaacctctcaagaaaaacctgtggaagcaagttgtagaggccaagatacggaatcaaagcaacctgctaatcaagtatggtaagaacggagagcagttgaaaccctattacaagaatgtggcttccggcgattcgaataataatgagggtatcgcggcgcggatttatttccaggaattgttcgggaagagctttgtccgcaatcgcgatctgccgggagtcaacgccttgctcaattatgggtatacggtgttgcgggctgctacggcaagggctgtcatgagctcgggactctttcccgcattgggactctttcaccataaccggagcaatgctttccctctggccgatgatatgatggagccctatcggccttttgttgacgagatcgtcttccaacttcttgagaatggtaaagaaaacctggataaggagaccaagggacggcttatccgtgtgctgtatagcgatacttgttttcctaagacgacgagaccccttgacatcggcctgtcgatgacaatggcatcactggccaaatgcttagcaaaagaacaaaagagtttaagcctacctgtgttgaaatgagtgagaaccggttgaatagttatcatattatgtggttgtttgtcatgttcgatttaccgacagtaactaaaaaggacaagcatatatcggctaagttccgtacggaattggaaaaagatggctttgtcatgcatcaatttagtgtttatatacgctattgcggttctttggagagtgcacatgtgcatataaaaagagtgaaatcgcttacgccttcgcgcggtatggtgagcattctgacaataacggataagcaatattcgaatattataaatatatggggtgaaataaaggttaaaaaagagccgcagcctatgcagctcgaatttttttaataaatttgtagaaagaaacatcagaatagccgcttcatattgaaagaatactgcctaattgattgatatgcagaagaatagaagatatatgttgcggtttgatgtagaaagaagatatatagcaacaatttcatcaaaaaccttaaaaaccgaaagttgcggtttgatgtagaaagaagatatatagcaactgcgcttgcgcgcataatccagtcgtgcatgttgcggtttgatgtagaaagaagatatatagcaacttatttaatccgtatgtagcaaagcaccagttgcggtttgatgtagaaagaagatatatagcaacctaccacctaacaccactaaggcggttatagttgcggtttgatgtagaaagaagatatatagcaacttgtattcactcgtaattaagattgcggggttgcggtttgatgtagaaagaagatatatagcaactgcctctctcaagcgaatgcctgccgttggttgcggtttgatgtagaaagaagatatatagcaacaaaacatccattttggaacgaggaagaggggttgcggtttgatgtagaaagaagatatatagcaacatactcttcatacggattagcagcagaattgttgcggtttgatgtagaaagaagatatatagcaacagcacgaccggaaatatgagccatcttatcgttgcggtttgatgtagaaagaagatatatagcaactcagaggcggtcacacgaccctttcgggcggttgcggtttgatgtagaaagaagatatatagcaacaaccgaagaattagtaacaacagtttgcgagttgcggtttgatgtagaaagaagatatatagcaaccaagatggcaaaggcagtagaatttcaaatgttgcggtttgatgtagaaagaggatatatagcaacctcatcgttataaatatctccatgaagtaagttgcggtttgatgtagaaagaggatatatagcaactagacttgttgcagaagcattcattcctaagttgcggtttgatgtagaaagaggatatatagcaacatgattgaaataaatagttattatatcaagttgcggtttgatgtagaaagaagatatatagcagcatcggcagtagtgtaaattgaattgtaatagtcgagacttattctgatatttgctttactattgattagtaaaacggaattggttaagacttgatctttgctgttggcaaccatacattcctaatagattgtggataaaaagacctttgcgatttttatcgtcagtcgcttccggtcgtgtcatttcttctttcctgtgagacggaaggagtctgtgatgagccgcttaaggagtgccatctccgcccgtgtggcatcggtgcctatccagtatttgaggttaccgtagtaaggaagctccaggcagtcgtactcctccagtgatgcggacatatcttccttgcggtatttcacggtaacatggcgcagttcgttgatgtcggaatagcagaagatgtgtccgccagtgtagaaagcaagcgcattccgcgcagtcttgaactgctggaaggggaatttctccacgacattcccggacagagacaggaagaaacttctcaaatcttctatgttcatgatcgtagggggaaagtctgcgggtgtctatttgtgattcctgaaagaggagtatgcgaaggaaaccatgacgcaggcaagggcgaggaagatgtcggctggtcgacgatgtttccagtaatagtctatcgtggtggtgaacgaaatctctgggatggcctcggccttgcttagttgctccaaggtctcatagagagtggtcttgtcggtcgtggtatcgtagacgaagaagtttattccttttgctccgctttcagtatatttggggatggagccgattacatagttgccgattatctgcagggagtctatctcgtccaccatcgtctcgtcaatttccgtgtcgacgatgcatccgtatttcacatcgaatgcttccaactgatggtggttgggaagaggaacttcataataggtgccgatgatgtctttaggaaagacaaacctatcgaggcacagggaaccggccaggtacagcagtagaaatataaggatgaatctcatgaacttcttcatatgtcaatgatgctttttcgttgttggtttcgtctccgctttggaggggaccgattacctgccccagtacatgcgcagtttgagtttccacaggtcggacagggccctctgtgtctcggtggttgtgatgttgaggtagaggggcaacatggtgatgatcttgatgattctcatgacaatcctattttatcaggtcggtatacaggcagaagtacttccatagcggtgcgaccatcatagcctgaaggagttcgccggctttcagcatgcggagcacttcctctttctctaagaagtggactttgatgtcctcggtgtggtcgaggtgttggtctgaaatccgtctcaccccgcgggcaagataggaatagcagagattgtccatggctcccgagttgggagcggtcttcatcagaagctcccattcccctccgccgaagcctgtctcctcttgcagctcccgtttggccgccgcaagtggttcctcccctttttcagcgaccccagcgcagatttcggtcgacatgatgccgagtccatgccggtattggcgttcgaggatgagcctgccgtcatcggtttcggcaatgacattaacccaggtgggatagtggagcacatagtattcggagtggacacggccgtcgggcagctccaccttgtcgcggcgcacggtaagccagggtcgccggaaaagttcctctttcgagagaaccctccatttcatgtcttcgtcgtcgaatttcatatctggacaaagatagggaaaaaagcggagagaaccgcagagtagaggctgaaaaatcgtgaaggtaagagaaaggagtctaattcaccctttttcgtggtcgtttctccacaaagacgaagatggcatttacaagcatggatgccagaatcgaagcccccaatgtggccgcaaagatgagtataggatagttaaaaccgtagaagaagtcgtggaacagatagtagcaaaaccatgtgtgtatcatccagatgttcatggagtgagctcctaagaacgccagtcccgttcttgtccatgtttgatatttaatggcggagagcaacagcaatagtgtcagtgagaatattcctccccacgaggagtgggggattaggatgcgaacgaggatgaggacgcaaaggatggaaagcaggcttttgttgccgatgccacttcgccggagccagccattgaaccgctctatgacagcgtactttttggcgagggctccacagcagaagcagaacaggaattcgacgagcgccaccggtagaaacaatagtggatttggcgagatcgtggcgtgatagaaatgcagcagggccatcatgaggaacgagccaatgaatgttgcgccgaccacaagccatggccggcatctaccgatgactctgaatattatcggataggaaagagataggatggaatagggaagcaagaaccagcattcgccgttccatgtagttctcaatccggttatgttgtatataatagtctgtaaatcagatagatatgttatacccccccctatggatcccacggcaatgaaagtggctgtaatcagccaatagtgtccatacagcttgatgatgcgcgagacatggtgctcgtctttttccttgaggtaaacacagtataagccatatcctccgagtgcgatgaagatgcctacagggttgcaggctcccgcaagcaaccatgcgagaggtctcgtgccaatggtgagatcggcgtaatattgcgctgcggagatgttgttgaacaggtggagccacaccatcatcatgatggctatgcctttcattatctgcgtgtattctttcgacatgtaagatggttcttggtttgaggagtccgtgttggagcgatccttgatgtatattctcggcaaaggtagccttttttcctcatatcaggcaatgttttggtgaggaattgcccttgcgatgtgtccggaagtcgtttttaacagttgtacaggcaattttcgggccttctggaatccctctgtttgcgcatggagggcgatttgcaagcatgccttcgccgccctccgccgtgttgcgatacgacaagtttttcctcgagcttcctccagaggagagggaggagaaatctctcttctcaaccccctttataggcgagggagatggctggccgttaaaagaaaagtaaaaggccgttaaaaggaaggcttctaacggttaaaagaaaggcaaaaagccgttagaagcaacgcttttaacggctttttactgccccctctgcagaaggggtaaaagagactgtccctttctccccttttgggagggattgggaagaggttggggagagggatgtaagggctttcgccttactttcccatctgcttcttgagcagttccggaatctcgctggtttccttggccacaggcacgcccacggcttcgaaggcagccaccttgtcctcagcggagcccgatgtgcttgagatgatggctccggcatggcccatctgcttgcccggaggtgcctgacggccggagatgaacacggcgacgggcttcgttacatgctctttgatgaagcgggccgcacgctcctcggcatcgccgcctatctcaccgatgagggcgatactgtcggtctcggggtcgtcctggaacatctggagcaggtcttcgaagtaaaggcccaccacgggatcgcctcccacgccgatggcggtagactgtccgagccccgcttgcgtgaggttgtagaccacctcataggtcagtgtcccgctgcggctgatgactccggtgcctccgcgcttgaagatgttcgtgggcatgatacccacgaggcattcctcaggggtgatgagcccgggacagtttggcccgatgaggttggctcccttgtcgtggatgtaccggtgagcatagacggcgtcctctacgggcacgccttcggtgatgcagacgatgagtttgatgcctccatcggcagcctcgagcatggcatccttggcaaaggctgccggcacgaagatgatggaggtgtcggctcccgtggctgccacggcgtccttgacggtgttgaagacggggattccgtctacttcctgtccggcttttcccggcgaggtgccgcccacgatgtgggtgccgtaggccttcatcttcgatgcatggaagccgccgtcgcgccccgtgataccctgtacgataactcttgtattcttatggactaaaatactcatttcttctggattttaaacggttcttgatatattcttccttaaagctttgcggctatctccacagccttgtggccggcgtcggccatggtggtgccaacggtgaacttggtgccctgcagcaatgcgcggccctcggattcgttggtgcccgtgaggcggatgacgatgggcatgctggtgtcgagttctttgaaggcttctatcagtccttttgccacatcgtcgcaacgggtaatgcccccgaagatgttgatgagcaccactttcacatgccggtcgctcaggagcagcttcatggcttctacgatcttttggggattagagcttccgccgatatcgaggaagttggcaggatcgccgccgtagagcttgatcatgtccatagtagccatggccagtcctgcgccattgaccatgcacccgatgttgccgccaaggttcacatagctgaatcctttctccttggcatagagctcctttttctcttcttcggtgggctcgttgagctcggccacatccggatggcggaagagggcattgttgtcgaaggtcatcttggcgtcgatggctttcaagtcgccgctcttgtccacgatgagcgggttgatctccgccagcgaggcatccttctccacaaagaggcggtatagattttggaacagcgggatggcctgtttcacctgcgccatgtcgtcgaacagggcgaaggcggcttctcgggccttatagacaggcagtcccacgagggggtcgatggcaatcttgatgatcttctcgggggtctctttggccaccttctctatttccatgccgccctcgcggctgagcatgaggatgggagatttcgtgcgacggtctacgaggatgctcacatagtattccgacgcgatgtccacggcttcgccgatgaggatgcggtcgacggtgaagcctttgatattcatcccgaggatgttgccggcgtgccggcgaacctcgtcctccgaggctgcgagcttcacgcctccggcctttccgcggccacccgtgtgaacctgtgctttgacgactaccttttcgagaccgagcttgcggtaagcctccacggcctcgtcgacggaatggcagagaatgctcctgtcaaccggtaacccatactgggcaaagaaaccttttgcctgatattcatgaactttcatagtaacttaattaattagtagaattccatgcaaatataacacatttctttgaaacaagaaagaattccggagaaaagtaagtttaaataatataaataggtatatggggcttggtcagctgaaaatgacggtgcccaatgcggaggctatccttatcagggcatacagcatgatgaagatggcgagtacgaaggctatgaccatggcgaggctttgcagggcctttcggttgattttgtggatgatagcctgatcgtcgttgaggaatccgtcgataagtgccatgtttctggagttggcgcgatggaagaagtcgagcacatcgcccacataaaagggaatgagcccgagcaagacatcgcggagcgtgttgttcaggatggcgagggtgaggggcacggagcggagccggaacaaggcgaaatagacatggatgagcgaaaacaacgcagtcgccgcgtcgccgatgccaccgggcactaatcctgtgatggcatcgaggtagtagcggtcgaggtaggtggaaatcttctgcatgcacagatacaggcgactctcggtcaagcgtttcttccgttctgcgtttgtcatggcctgttaggatacctcagaagtgataaggccggggacaagcgcccctgccttatcgttatcagtcgaaaatcttgaattcataaccctgttccttgagccacttcagggcctggggcaacgcatagtgcagtttgtcgatgctcttcagtgagtcgtggaaggtgatgatggagccgttgcgggcatacttcttcacattgtcgagcacatcgtcggcagtcatccacttggaataatcgcgcgttacgaggtcccacatgatgatgcggtagtgacggttcatccaccagtagaccgttcgcttcatccatccgtggggcgggcggaacagatgggcgtggatgagttcgttggccttgtggacattggccgcataagtgatgggcatatgcttcagcgagccgaggtgattaaaggtgtggttgcccacttgatggccttccgccacgatctgattatagaggtcgtggtagcggagcacattctcgccgaccatgaagaaagtgcccttagccttgaactccctcagcgtctggaggatgaagggtgtagactccggtatcggtccgtcgtcgaaagtgagatagaccgaatggtcgttcttgtccatccgccatgtggctgccggatagagccagcgcagccagaacgagggttgttctatgaacatcggctatggtttcttattcttcaaattgcgtatgctcgccggtctcgacctgaggatctatacctcctttcgtgcgataggcggcatagtaatggctcatttcatcaagctgccgtttggcaagattcttatccgtcatattcgtgatctcgttcagctgctgcatgatatacatctgggtcatgcagtcttgctgggagagactgaagttgttgcccgacagactcaggtagaagcgcatgtactgggcggcgtcgttccacatgatctgtatggtcttcttggccttttccttctcgcccacgagggcataggcacgggcaaggtcggctccgcctccgatatacttcatcggaacgaggcttggaggcaacactttctctgccttttccagtacctttcgggccttttcgggttgcttctctcggatgaggttcatagcaaggtcggccatcagctgacggtgggtatagcacatgcggcgcacggtctcgtcgaggtagatgttcttacctgcgtccagtcctccccacttatagcgattcatcacattattgtagacttttgttgtgtcaaagcgcttggctcctgccgtgttggtacggaacggggtgatgcgattggccagaccctcctgtacgaagttatcgccaaggttcataaagttctcgttccccacggtgatggccacatacagcgggcgagtccagttgcagttggcaatcatctcgagcatcatcaggtcgcctttatacagcgcgcgctttcctgccagcgagatcaccatcttgtcggggatggtgtcagaggccatgagcatgccacttttcctgacggcatccttatcaatggttacatagagcgtgtcgctggggatgcagtgcatgtcgctcttcttcgacagcacccagtatttcatcacattcttcagttcgaacggatcgtcgccgaac

SEQ ID NO: 1645 - DNA, 23657 bp, synthetic construct
  source 1..23657: mol_type = other DNA
  misc_feature 1..23657: note = Synthetic
ttgatgccggtagatttgttttattcgcagaacacttgcgttcattgtcttgttgagtggattcgtttaattggttaaattcgttgttcaacaacaatcatgttttttgttttaacaacaaattaaacgaaaaaaacaaatttaattgctggtatcaatgaacgccagcgttcaccaaattaaacgaatttagcacagatatgcgacatgttgctgtcgtcagatttgtttcattcgtagaacgcttgcgttcattgtcttgcttagttgatttgtttcatttgttaaatttgttgttaacaatatttcctttcaatgaaaaaaccgtgttaatccgttgctctaataattttgttaataacacaatatgagagaagaggctgcgcttcgtgcgtggattactgccttgccacctcaaaagcctgacgtattcgatgcgccataccgatgccgtctctgatatttcctgccaaaatcaagcccggatattgctgctgtatttgttcaatggcagcgtagcgttcgccactcgatgccacgtactgcggaatggcacgctcgtgcctgaagatacgaatggcatctggctgcacagacgcaggcaacttcaacatacggtgcaaggcatcttctactatggctgtcagttcttcgtctgtcttcgataagaaatctggatgtcgcacccctcccaagaagaacgagagagtagcaccgccgagaggagcacgattttcgaaacaactggaggggaacagtatgcccaacacttgttgcttctcgcacgacggtaccaacccaccaaaggcgtttagcgataccccttgcgtgtctttgatgcctacccccacttgtacgatgggcgcataaaacaaattcgatatcttggacatcaacgattgttggatgaaaggcagcagagcgggcagcgcatacgccccacaagtagtaaccacttcatgacagtaaacagtatgcgcttgtcccaaaccagtggtgtacttcaccacatacccaccgtccgtaggattgatttccaccccgtcagcaccagtaatgagatgcgctgcaccaatagcatcgcccaaggcgttgaccaaatgactcaaaccgccacgtgcagaaaacactttcttcgttgcccgtcggtctctttctgttttcggcgctttggctttggcaatggctccacgaataaaactaccgtgttcttgttctaataggtataattttggtaacgcaaatcgggtaaccaatgtcatcggattaccagcatacacgcccgatacaaagggatctaccgcataatcgagatacgacttccccaatctgcgcgctgccaatgcgccaacggtctcatcaggattggttcctttggcacgaaaaggctctcccaagatgcggaatttgtcgtaccacgtaaacaatggtgtgcgcaaccctcctatcggtcctgctggtaaatcgtgaaaacgccctcctttccatatccaacgccttttcgacgattcgcatgcggtctccatgctacactcttggtttaatgcctcaaatagctctgccacctctggaaaagataccgaacccgtgttaggaccgctctccatgataaagtcgcccacctgttgggtgtgtatctgtccgcctattcggagttgtttctctatcactaccacttctttgcctttccgcttcaacagaaaagcggtggtgagtcctgttaaccctgcacctatcacacacacatcgacgtgtcgtgtggcttcttgggcaggctgatgctcataagtgggtttgctctctacggagaccttgtctttattttctgccattctttttatcattatagggcggttctataaattaccgccgtaaagttttagtatatcagtcagtttacgtttttgtcatcttgcagtctctttttggttcaatttgcttgttcgttcagtcgtatagcccgctatactccttcacttacaaacaaattgaccacaaaaacagcctcgcaatctgacaaagctaatttatagaaccgccctaaattgcgctgctgcgctcatttacagttatttttcttgtgggtcagcgatcctaaaattcaaatctcaccaatccatctttatataggtttggaaaactttttatcggtgtgcgccatgagtgggtcgagggtggcaaccacattgcgtacaaagggcgaccctgtctgagtcatactgatgctgtcctcgctgagctgtatcaagccgtccgcctccatctctttcaatttctgctcatcatagttggtggctgccttcacctctgctggtgtacacccaaggcgcgccgcaatttccgaccaagagaaatggtagttacacatcatttgctctatcacctcacgcaccatttgctcttgtgttgtaagctcgtagccacgataggtgtaaggctttcctgcttctatgcagcggatatacgcttcaatgtcacgcccattttgtgcgtatgccgtttgtagctgactgatagctgtcacgccaaacgcatacacctgccctgtggtgcggcgtgtacaatagccttgaaaattacgatgcagctgttttgtttccaatgccacactcagttcgtcggtaggtaacacaaagtggtccatgccaatgctacgataacctgccgtatgtaacacttctgctgcccgtcgatacatctcttgtttgtcatcgtcttgtggcaatcccaatttttcgagtatcagctggcgtttgtgcacccatggcacgtggccataactgaaggtcactatcctgtctgggtgtagatgagctgcctgttcagcggctcgagcaaacgagtctggtgtttgataaggcaagccaaacagcaaatccatattcaccgttgcaccctgctgccgcagtaggtgcataatctcttccacagcaaggagtgacggacggcggttgactgccttcaacacctgctcgtcaaaatcttgaatacccaagctatatctgttaaagccacattgtgccaatgcctcccaatctccttctgccaagtaaccgggatgacactctatggcgatttctggatgtgctatggtgggcatcaacgagcgtaagtgttcgttgagcgactttaagtctgcaatgggcaatgccgtaggacttccaccgccataatgtatctgcgagatttggcggttttgggtgtctaaatgactggcaatgaggtctatttcttggtgcaatgcttcaacatatcttctcatcatgtcttggttcgccatggggtaggagttacaaccgcagtaatggcataaatgtctacaaaacggaatatgcagataaaaggacaccaacggctggtgcgcatggtggttggaggcttctatggcagagagatactggtctgtggtcagttcgtgaaaatagtttgcggggggataactggtgtaccgaggcaccgggacgttatatttatcgagcaatcgctgattcatctttttaattatcttgttttctttgcggtgtgagtgctgctctccccatgctccacaataatggctcggaagcgtaagggcgttgtgtccaacacgttgtctcgctcatagcaacagggtgtttcccaacaacaacggacaggagtactcaacgtaatcgtttgtataatgtttggttgcaaatttacaataatgtcattacatgtaaaatcctatattatgaggatatttccccatcgccttgccacgaatatccgtgcacatccgtgcctctccgctgcgctttgatttttacagataactgattgttaaaagtgttaattgcgttttgaaaaaataggacaacagcacttccaaaatttgaatatttgcgagcaaggagagcatcggttgaaaatacgcgagttttgagcaagtttgcaattcgttgaaagccaacactttgccaaaaataagatttcgtaacggtgaaaatcgcctcgtaacccactcttataagcgcaaaataacgcccttactccatgtgatcaaggggcttgaaagcatgctttagtcgtgcaaagtcattgagatagtcgccttaaagacatggaacaaccaaattgtgactttctaacacgcaaattcacccatgttcacgagctattttacccacttctgaagtgttaaattccggcaatttattttgacaaaactgtagaaaatcgtttgcttcattcgctgttcaacaacaatcattttcttttattttaacaacgaattgaaccaataaaacaaatccgattgctgaaatcaatgaacgccggcgttcaccaaatgaaacgaatttagtacagatatgcgataagttgatgtcgtcagatttgttccattcgcagaacgcttgcgttcattgtcttgctgagttgatttgtgtaatttgttaaattcgttgttctacaacttcttttgttccattcgcagaacgcttgcgttcattgtcttgctgagttgattcgtgtaatttgttaaattcgttgttaacacccctcagtgaaagaaccgtgttattccgtgtgaatccgttgccactatgacattttctttaaatgtatggaaaaagttcgcattgtacttgttacaaccaataattttatatatctttgcaacaaaatgtggagttttattaaaagcaggtattaaaacatcccacacgagtattcatctaacaagataaaataacaattaaatatcattttgaatcatgaaacaaaattacaaaaacaagacaaagcaccgcagcgcatggtttgcgcttgtgctgctaatgctaacggctctgcctatcaccgcgcagaccgtaggcgaaaggttcaaatcgggtgacttatggtatgaggtggtagatgccacgaaccatttcgtgaaagtgacatacgcaaacgaaaaagcggcactgccgaaagcaaggcagcaggtatttaaggccgactatttaaataatggtgataatggtgctgatacaaatgctgataatacttataaaggctacagcggaacactgaatggtacaataaccatacctgagacagtcaaggatgacgctggtacgcagtggaaggtggtagccatcggtacctgtgcattcatcaatgaaagaggtttttatgataataattctgaaaagaaagttcaattagattttgttcttcctccaaccattaagcacattgaagaggctgcgttctatcaagcttacgcatgtgctatcaatttcccagaaggactggaaaccatcggaaggcaagctttttataagagcattgtgggttattattttatttattctaaacctaccctaagaagaggaggtggtcctagggcaaaatctaccggaacaattactatacccggtcaaacagccataggcccccaagcctttgaggaatgttcgaccaaaggtgcgaagttgtcatgtccaaacatcaagtacttgggttatcaggcattcaaaaaatctgggttgacaatagaggatcctgtatcggcaaagcttgggaaacaacccacagaccctgaaattatagcgatgtatgccaacctgccaggtgtggacatggagtcgggagcagaagctttttctcaatataataagggcgttgtaactttgaaagaaggtataacaactatcccgaaagggatgtttgagaatgcttttaaagacttagctcaatttgttattccttctacagtgacttccatagaggaaagagctttcgcaaatgctggcatcaaaagttttaacgaattgtctacagtaacaaaaataggtgcaagggcttttgagaatggagctttgtcaggcgactttgttattcgtgtcaatgtcgaggaaattggcgacggtgcgtttaagggaaatgttaatttgaccggttttacattgataggcagtgccaactgcaaggtaggtgcaggtattctcgaaggatgtcccttagaataccttgacctgaggaacgtgaatagcccgggtgttaagaaccatctgacgaatttgtcgcgcgacgctaattcaggcacaggatcagcgaagacattagtagcaggtttgccagcgaacgtcatcgtttacctgcccgatgtaccaaacattagcattgcggatggtcaggatgtaaactttgttaagagcaatggtgaatgcaccaaacttctcttggtggatggggtggaatatgagttcccctatgagatcaaagcaagtgaagtggtttacgaccgtgatatttcttcctttgctgatggcaagcactgtttcaccatcttcctgccgtacgccgtgacattgaagccaggcatacgcgcatacaatctgaaatcagtgggaacaaagaaagtttggaatgattttggtcaaaaatatttagaccaggagttatatatgttcaagtcaatccccgacggcagcacgcttgaggcgaacagagcctatttgctgcgcatcaccgatggtcaggtccacagctctcaagaagagttcaaagcaaccggcaatcctgtgacaatcgctgcgtcaggcaacgacaaagataattttattggtaggatcaggccaatgcgctatgttgaaggtgaacctgacaaaagctttgtgttcactggcagcaccgaatgtttgtcacgttggataacagatattgataaggtaaacaacccttggacgctgggtcgtgatagaacaactggggaagatcagtggaaaagagcgctgactaataaggggagaaaacgagaaaattttataccacctttccgtggggttattttgccaaagacggttgtaacttctgtatatgatgccaagcagtttgtgttacttgatgaagacaatcaaacaacgggcatcagcaatgtggcaaatgatgccgaggcacagcaaggtgcacagcgcatatacaccatggacgggcgctatgtaggcaccaacttcgacagtctgccagcgggcatgtatatcatgaagggtaagaaaacattaaagacgaaataaagatgaacactaaagataaaaatataagcaacgctgctggcgacaggcacacctacctgtcgccatgcgtccaaatcatcaaaatggaaacaactaaccccttagcggaaagtttaggaattccaaggacggatgaagatacaaaggaagcctatggaaagcagtggcagggcgacgacttggactcgtgggacgaagaggacggcaactatgaaaagaactggggaagcgggtggtaaccctcggcatgcgtgccgagagtagccctgcaactactcatgacatgaaataaagtgggagggaaccaatggtttccctcccacttcgtgtctgatacctgctcgcctgttaccgccttagcgctgtagtgaacgaataaggagcatcggcgccttggatgccacgatgcttgttaggcacgttgtccatgtcataaacaatagtaccgccttgcatcagctcttggtgagtgaagtagtttcgggtagaaggcacgccattgatgcgcaacgactggatatacttattcgcggtgctgcactgattggcttggagcgtcaacgtctttccgttctctaagtgcaaggtcatctttcgaaagtagggcgtacctatcacatattggttgctaccagggcaaacaggatagaaacccatggcggagaatacataccatgccgaagtctgtccgttgtcctcatcaccacaatagccatcgggattggcattgtagagtttgtccatcacctctctgatccaatactgtgttttccaaggttgccctgaatagccgtacagataaatcatgtgctgtatgggttggttgccatgagcgtagttacccatattcataatttgcatttcacgtatttcgtggataacacttccgtaataactatcgtcgaagagaggtggaacattgaacacagaatcgagcatgtgattaaaggtttgtttccctcccatgaggttgatgagtccttgcgggtcgtgaaataccgaccaagtgtaatgccaagcgttgccttcggtaaaggcgtcaccccatttcagcggactgaatggcgactggaacttgccgtccttgttgcgaccacgcatgagattggtttcacgatcaaagacattcttatagttcatggcatgcttgagatagggagccaactcctttttagacttacccaaggctttaccaaactgatagatgcaccagtcgtcataagcatactccaacgtgcgagccacattttcgtcgatatccacatcgtagggcacatatcccattttgttatactcatcaaaacccaatcgacctgtagagctaacggtaggatgaacggcattcgctccgtgcgtaacagccttccatagcgtttccgcatcgtagccacgtaagcccttgaggtaagcatctgctaccacagaggcagaattgttgcccaccatacagtctcgatgtcccggacttgcccactcgggaaggaagccactttcgagataggcgttcaccaaaccttcttgcatctttacattcatggaaggatacatcaggttgagcaaggggaacaagcaacggaacgtgtcccagaagcctgtgtcggtgaacatatagcctggcaacacctgcccattatacggactgtaatgtacaatttttcccgtagcatctttctcaaagaaacttcttgggaacaacactgagcgatacaaacaggaatagaacgtgcgaagatggtcgatgttgttatcttctacttcgatacgtcccaacaccttgttccatatctctcgaccttgctgcttgatttcctcaaaacttcgtgcgcctaactcctgcaaatttagttcggcttgctgcggactgataaacgaggaagcaatgcgcgcatgcactttctcgccacgctgtgtcttaaaaccaatgatagcccctgcatgatttaccgttgcagcggtcttgcttttatcaattttgccgtctaccactgttgcacgatacgtaaaaggcttgtcgaattggatgacaaagtaattcttaaagttgtcaggaacgccaccgctgttgcgtgtagtgtagccaataatcttgttttcagtagggataatttgtatcgatgagcctttatccaacgcatctaccacgacatacgaatgactgttttcgggaaatgtgaacctaaacatcacggctcgctcggtaggagtgaactcggtaacgatgtcatgatcggctaagtagacacgatagtaataaggttttgccacctctgccttatgagagaaccaactggcacgctcgtcttcgttaaaaacaggcttgcccgtgatgggcataatggcaaactgtccatagtcgttaatccaaggactgggctgatgtgtttgcttgaagccacgcaatttgtcctcagtatagacgtaagcccagccatctcccatttttcctgtttgtggcatccagaaattcattccccatggaagcgcaatagcaggataagtatttcctgtggataaggcatgtttggacaatgttcctaccaaagggctcacatagtcaacgggttctaatttgtcggctgcgctaacattccatgccaaagtgaatgctaagacagatagacaggttttcagcatcttcatatcatttaatggtttatttggttagtcttgcaaatttacaataaaaaagggtagtacgaaagcgtaatcattgatttagaagcaatagatgtgtcttatactgaaattatttgattggttattttatctttttacgagttagataaaatgtcaaacgattgctgtataagaccataaaacaataagcccctccgaagaggggctgtaggacttgcatccttcggcatatagccttattgtgataagatgtagaatatcttatgtggcaaatgtaaacaaaatatttgttactgacaaatattttttctaattttacagaaataaatttatttattatgaacaaacgcatattaggattggatactggcaccaacagtttagggtgggcagtagttgattgggacgagcatgcccagaattacgagcttattaaatatggtgatgttatctttcaagaaggtgtaaaaattgaaaaggggatagaatcttctaaggctgccgagcgttcggggtataaggctatacggaaacaatattttcgacgtcgcttacgaaaaatacaagtgttgaaggtgctggtgaaatatcatctttgtccttatttgagtgatgatgatttacgacagtggcacttacagaagcaatatcctaagagcgatgagttgatgttgtggcagcgcacaagcgatgaagaagggaaaaatccttattatgatagacatagatgtctgcacgaaaaattagatttaacagttgaggctgatagatataccttaggtcgtgctttatatcatttaacgcaacggcgtggctttttgagtagtcgactggataccagtgcagataataaagaaaacggagtggtgaaatcgggaatttcgcagctgtcgacagaaatggaagaagcgggatgcgaatatcttggagattatttttataaactctatgatgaacaaggtaacaaggtacgcatcagacaaaggtacacagaccgtaataaacattaccagcatgagtttgatgctatttgtgaaaagcaagaactaagcagtgagttaatagaagatttgcaacgagccatcttctttcaactaccgcttaaatcgcaaaggcatggtgtaggcaggtgtacctttgaaagaggtaaaccgcgttgtgccgactcgcatcctgattatgaagaatttagaatgctttgttttgtcaacaacattcaagtaaaaggacctcacgatttagaactacgtcccttaacttacgaggagcgagagaaaattgagcctttgtttttccgtaaatcaaaacctaatttcgactttgaagacatagccaaggcattggcaggcaagaaaaactacgcttggatacatgacaaagaagaaagagcttacaagtttaattatagaatgacacagggcgtgccaggatgtccgactatagcacagttgaaaagcatatttggtgacgattggaagacgggtatagccgaaacatatacacttattcaaaagaagaatgggagtaagagtttgcaagaaatggtggacgatgtttggaatgtgttgtattctttttcatcggttgaaaagctaaaagagtttgctcatcacaagttgcagttggatgaggagagtgcagagaagtttgcaaaaataaaactaagtcacagttttgcagcgttaagcctaaaagctatacgcaaattcttaccgttcttgcgcaagggaatgtattatacgcatgcttcgttctttgcaaacattcctaccattgtaggtaaagagatatggaacaacgagcagaacagaaagtatatcatggagaatgttggtgaactggttttcaattatcaacctaaacatcgcgaagtacaaggaactattgaaatgttgatcaaagattttcttgcaaacaacttcgagttaccagcaggagcaacagacaaactatatcatccttctatgatagaaacctaccctaatgcgcaacgcaacgaatttggcatactgcaattgggctcgccacgaaccaatgccataagaaatcctatggctatgcgctctctacatatcttgagacgggtggtaaatcagttattgaaagaaagtattattgacgaaaatacggaagtacatgttgagtacgcccgagaattgaatgatgccaataagcgaagagcaattgcagattggcaaaaagagcaagacaaacaacacaaaaaatatggtgatgaaataaggaagttatacaaagaagaaacgggaaaagagattgaaccaactcaaacagatgtgttaaagtttcaactttgggaggaacaaaaccgccattgcttatatacaggtgaacaaataggtatcaccgactttatagggagtaatccgaaatttgatatagagcacactattccacagagtgttggtggagacagcacacagatgaaccttacattgtgtgacaatcggtttaacagagagataaagaaagccaaactacctacagaattggcgaatcacgaggagatattggcaagaattgaaccatggaaaaacaaatatgaacagctggtaaaagaacgtgataagcaacgtacatttgctggaatggataaagcggtgaaagatataaggatacaaaaacgccataagctacaaatggagatagattattggcgaggaaagtatgaacgatttactatgaccgaagtgcccgaagggttcagcaggagacagggaactggcatcggacttgtttctcgttatgcggggttgtatctcaagtcgttattccatcaagcagacagtcgcaataagtcgaatgtctatgtggtaaaaggtgtggcaacagcagagtttcgtaaaatgtgggggctgcaaagtgagtatgaaaagaaatgtagagataatcattctcatcattgtatggatgctatcaccattgcatgtatcggaaagagagagtacgatctcacggctgaatattatcgcatggaagaaacatttaagcaaggcagaggttccaaacctaaattctcaaaaccttgggctacatttacagaggatgttctcaacatatataaaaacttattggtagtacacgatactcctaacaacatgccgaagcatacaaaaaagtatgtgcagacatctaaaggaaaggtgttggctcaaggtgacacggcaagaggtagcttacatcttgatacatattatggcgcaattgagcgagatggagaaataagatatgttgttcggcgaccactcagttcgtttacaaaaccagaagagcttgaaaatattgtcgatgaaaccgtgaagcgaaccattaaagaagcaatagcggacaaaaaattcaagcaggctatagcggaaccaatctatatgaatgaggataaaggcatacttataaaaaaggtaagatgttttgctaaatcggtgaagcaacccatcaatatcagacaacatcgagatttgtccaaaaaagaatataaacagcaatatcatgtagtgaatgaaaataattacatgttggctatttatgagggtttggtgaaaaataaagtggttagagaatttgaaatagtaagctatatcgaggcagctaaatattataaacgaagtcaagaccgaaatatattctcgtctatagtgcctactcacagcgccaaatatggattgccacttaagacaaaacttttaatggggcagctggtgttaatgtttgaagaaaatcctgacgaaatacaagtggataataccaaagatttagttaaaagactctacaaggtggttggcattgaaaaagatggacgtataaaatttaaatatcatcaagaagctcgtaaagaagggttgactatttttagcactccttataaaaataatgatgattatgctcctattttcagacagagtataaacaatatcaacatattagtagatggtatagattttactatcgacattcttggtaaagtaacgcttaaagagtaagccgatatgttgaaacgaagcgttgtcttttctcatccagcaagtctttcattgaggtataaccaactggttattaccatgaaagacttgcctgatgagcgacgaaccattcctatagaagatataggtttcttaatggttgacaatcctatggtctcaataagtgtaccacttctaaatgcattgacagaaaataacgtgtcggtagtattttgcaatcaaaaaggcatgccaacatccatgttgtttaatttagataataacaacacacaaggtgaaactttaagaaatcaactttctgcaagtcagtctttcaataaacagctttggaaacaaataatagaatgtaagataaaaaatcaagcacaacttcttgaaaaattaggtaaagaaggaaaatgtttgttcccatattataataatgtaaagagtggggatagtaccaaccgagaaggggctgccgctaaactatattggacacaactatttggaaaagatttcataagagatagaactcagtctggcacaaatgcgctgctcaactatggttataccattttacgtgcggcagtaacgcgcgcaatcatgtcagcaggactatttcccgcattgggcatctttcatcataaccgcagtaacgcttttcctttagcagatgatatgatggagccttaccgcccattcgttgatgaaatagtgtatcatcttacccaaaatggacaaacgacacttaccactgaagtgaaaggaatattgataaaattactttattgtgatacatattttataaacgtaactcgtcctttaagcgtgggactaaccatgacaatggcttctcttgtgaaatattatgccaaagaagtaaagaaaatcagtttgcctcttttgaaatgagtgagaaccgactaaatgcttatcatgttatgtggttgtttgtaatgttcgatttacccactgttacaaagaaagataagaaggaggctgcacgttttcgcaaagaattagagaaagatggatttacgatgtatcaatatagcatctatattagatattgcggttcgcaggaaagcgcaaacgttcatatcaaaagggttaaatcaatcttaacaccaagtggtaaagttagtattttaacagtaacagacaaacagtattcaaagattatcaatatgtggggagaaattaaacaaaaagctccagaagtacctattcagttagaatttttttagtatatttgcaataatgctgaaatattcaagccacttcttgtatgaaaatatttgtataatatgcttatattcaatattttaaatagtacaggttgtggtttgatgtagaatcaaaatatgaagcaacgtcttcatcttctactatatcaaagtcatagttgtggtttgatgtagaatcaaaatatgaagcaaccccaaagatattaaggtacatgaatttcggttgtggtttgatgtagaatcaaaatatgaagcaacgcgagaactatcaacagttttcagctgacagttgtggtttgatgtagaatcaaaatatgaagcaacacaccgtggtaatgcggacggagtgttgtggtttgatgtagaatcaaaatatgaagcaactagagaaacttagaactatacagtctaatagttgtggtttgatgtagaatcaaaatatgaagcaacaaaaatccgttactatatcgcttcggaatagttgtggtttgatgtagaatcaaaatatgaagcaactgaaacaaagccgttccaccttcaaagtaagttgtggtttgatgtagaatcaaaatatgaagcgtgttgaattaaaattaaaagaaacaacggcacctgtcgcatggtgggtgccattaaaaaagtaatgatgacaaatacagaagaaaacgttattgaactttaccgtaagaaaacacccattacccgaattgtcgctacaacaggcgtttccatcaacagggtgtacggtattttgtctgagcacaacatacctcttcacagtgggcaaaagatgattagacgaacaataatgtttgatgcagaaacagaaaagctgttacaacaggcgaaccccgcgaatatctctgcatgggtttgcgagcaaatcaaagagaataacaggtaacgactgttgattttgcttgttggtatttattgaaagaaaatctcattttttgcgtttcttccatccgtcttgtttcatactttttgctttgctcatctgcatcttgtatgcgttattgtatggagttgtggattgatgtagaatcaatgtatgaagcaacatggcagtcgtgagcgctgttactggtttctatttcaatgaattaccttatggaaagttatgttaaaaatgcgtatactttgacagtattccgtatttgttctcatcggtaagcatctccccgctattccataaatgttgtctgtatatcttccttttttagacggctcattcattttagaatgatattgtaacaaccaaaaacaccaacaaaacagcaaatgtaaaattgatggtacgctacataggaggataataaatgctgaattttctttacaaagtgcctctcataattcgcgtgaaaacaaccaacgacaaagttggtcgcaaatacgccaattttgagcgatgttcataaccttttgttattgagattgttatgtttaatccttctcttttcattcgtagtttttccatttttttcgattgaagcattgagataagcttactatttgcatgctttaatgctgctattgcatgtaaatagaggcactaatacatgttttcaagaccgttaagtcaatgttcgggcttgaaaagacatcttttttggtaaaatcagcccatttttgtatatcgtttgcctattatttttttctattttgaagattttcaatggtcgatttttggtaaaatgataggacaaatactacaaattgtttcacctaaaaagataagataaaagacgcagttctctaattgaagcgttcgtgttgctacaacaaatgaaacaacagaaagcaaatgaatgtaaacgaaaagcacaatacaatgaacgcaagcgttctggcggatgaatcaaatcaacagattcactttgaaggaacgtagagacctgacccgcagctgcgatgatacggaagtgagatgtgtcgtcattgcaatggaatcacaaggaacgataaagacaagccgtgaaactttgtgaaattccattgtgacaggagtttcagccaatgtatgaggcaaggaatgcgattagatttaatttgatagatttgttgttgaagtaagagcacaaaaatggttgttcagcataaccaacccttcttgaaacaaagagccgtttactttttcaaagaaaaatcagttataatattgatttttcagaaaatatttttatctttgcttatatatcatgaaagaagtgcaagacggatgaaatgtgtttgcttgtcatggtatgttggagcagcgttggcatcgttataactatgtgtaacaattctccaaaagtgagacaatcaatcatataactaaaaattgtaaagaaaagcatatgaacatcgttgaaagatttattaattacacgaaatttgatacacagtcggctgaagattcgcaaactgtgccgagtacctcaaagcagttgatatttgccaaatatctgaaagaagagttggaacatgaggggcttgaagacgtagaaatggatgagaagggttatatttatgcaactctcaaggctaacgtgaagaaggagattcctaccattggcttcatttcgcattatgataccagtcctgatgcaagcggagctaatatcaaggctcgaatagtaaagaattatgatggtaaggatatcgtactttccgaaggaatcatctcttctccgtctaagtttcctgaactgaaggcacacattggagaggatttaatagtgacagacggtcatactcttttgggagcagacgacaaggctggtattgctgaaatagttcaagccatgtgttatttgcgcgaccatgatgagattaagcatggcgatattcgcattgcattcaatcctgatgaggaaattggtatgggtgctcatcactttgatgtcgaaaaattcggttgtgaatgggcttataccatggatgggggcgatttaggagacttggaatatgaaaattttaacgccgcaagtgctaaaattcacatcaagggtgtgagtgtacatacaggttatgcaaaaggcaagatgttgaatgcaagcagattggcgtgtgaatttaatgccatgattcctgatacagaactgcccgaaacaacagaaggctaccaaggattttatcatcttttgggcatggagacacgcacagaagaggcaaagatgagttatctgattcgtgatcacgaccgtgaaatctttgaaaagcgcaaggattttatggaagcttgtgcaacaaagatgaacgaaaaatatggtgaggacacggtgaagattaccattaaggatcaatattacaatatgaaagagaaaattgatccaaacatgcacgtgatagatattgttctacaggcgatgcaagagacgggtgtgcctccaaaggtagagccaattcgtggcggaacggatggtgcacagctgagtttcaaaggacttccttgtccaaacatcttcgcaggaggagtcaacttccatggaccttatgaatttgtctccattcaagtcatggaaaaggcggtagatgtgattgtaaaaatatgtgagataaccgctggatacaatgattgatttcccctgtatatcagttttttgaattataagagagcgatgtccatcaaaacaatgacatcatccatcaaacgccctcaatacaaatggttgtattgagggcgtttagcatcgacagtcttcagtctaattttgtcaaagattggatgcttatttgttaatttcagtaaggtaacgctctgcttcaagtgcggctttgcagccagaaccagcggcaaccactgcttgacggtacacagggtcggctacatctcctgccgcataaacaccaggaatattggtctttggagtgccagcaattgtctttatatagccaattttgtctgtttctaaaaattctttgaatatatcagagttaggcttgtgtccaattcccaagaagaaaccatcaatggggaggtcgtatcgttcttcatcagactgtcccaagcgttttaccaaatgaactccctcaacgccgtctttaccatacaagcccactgcgttgtgctcgtagagtatttcaatcttttcgttttcttctacacgttgcttcattacctcagaggcacgtaagtaatctttgcgtacaatcatgtacaccttactgcaaagtcctgctaagtaagtggcttcttcacaggcggtatcaccacctccaaccactgcaacaacctttttgcggtagaagaatccgtcgcaggtagcgcaggcactaacacctttgcctttatatttctcctcatcatcgagtccgagatatttggcagaggctccagttgcgataatcacggtttctgcctcaatctgctgccccttttcggtggttagcaaatagggcgctttgctaagatctgctttgacaatctcgccgtctctcacctctgtaccataacgttctgcctgctcacgtaggtcaaccatcatttgattgccatcaataccagtagggtagccagggaagttttcaacttcggtcgtttgcgtaagctgcccacccgtctgtagaccgcagtacaaaatgggattcatgtcggcacgtgctgcgtagatagccgcagtgtaaccagcaggtccgctacctatgataagacaacgggtatattcttttgattccatattgaattgatgtaaaataaaaaaagtgtaagatgaattgtgaaaccagtccgcaaacaaagtgaaagaagtgaagaaaagccctaagtctaacagatgttctgtgaactgttgccttttctattctactttgcttttacggcaggtatttacaattcatatcacactttacaatggagttagtattctataaatttataatagctcttcaatttttttagctacgttgtcaagattctctgttggttcaaagcgtgctacaacttgtccctgtttgttgataaggaatttggtgaagttccatttgatgtctggattcttgtcgtagttttcgtcttcctttgataatatgtcaaccaagactggtgcaataggatgactcatgtcaaagccagcaaaccctttttgctctttcagatatttgtaaagaggttcagcatcttcaccgtttacttttatcttcttgaagcgagggaattctgtaccatagttaagtttgcaaaattcatggatgctctcatcggttcctggggcttgttgcccaaactgattgcaaggaaaatcaagaatctcgaagcctttggcatgatattttttatatattttctccagttcttcgtactgaggcgtaaatccgcatttggtagctgtatttacaatgaggagtacttcgttagcgtattcttttaaacatacgtcattaccttttctgtctttgactgtaaaatcgtaaattgttttcattttatttaagatatataatgtgatttataaatgaacgttttagtttggctcaatcaagatgattttcctttaattttaggaatcattgttgaacctaacggatacgtcctatactaattacaaagatatggattttatttgaatatataagatgtgtacgtgccaataaatattaatttaggtttttcctccttaacagtaggagaatccctacctaagaatagtgaaattatgcgtaccaagtttcagagaatgcgtatatttgcagtgttacatagaatgaataacaaaaatataaagacatgaaaaagattacgcaactattaccgatagccttgatggctctattctccttcgggtttgtatcatgtactgtcgacgacgattactattatgatgatgactatgattctgagtatgtagatttaactctcatggcacaaaccttgcgaggacattggacaggaaagacagctgcaagattttacaacgcacaacagcagcttgtggaagaagtgtacgatacagatattgagtttgaccaatatgattcgaacagtctttcaggtcgtggacgacagttggattatattagaggtgaattggtttacgatagagtcttttcgtggcgtatcgatcgcagtactggagatatcattatgatatacaatggtgagaatggacagaatttccaaatggtgattgattacgatgacttaaatctaaccgaccgctctttctctggtgttcagaggggaaatggtgagactgatgagtttgcctacaatcgttatacttatgcaaagaaagtatcattcagcatggactgataggttctcaagccaaacaaaggagttttgtccgattgcgatagcttgatatctcatcattaaagtacaaaatgtcctttcgtgggcatctatgtgcagtgaacgttgaaacgtattcagcgttcactttgatgttctaagaggttgggcatatacccatgatgaacgtttatcgtagtccccatgctaattttatcttttctttaggtaacgattccacgcgtctttcgatgttatcaggcaagttgcagaagaaatcaatacctgttttccgttccaagtcttgtatagaaacaacgtatttacctaagtcggtgtcgtcatttgcttcgtgttctatccaaaagccaagcgctttatagcctgatttgtttttacaaagaatcgccatataaaagtatttcggtacaatcaagcctttggatgttattgtgagtatttgattttgtttgtcaatggtgccacctttgcaaacgtataaggtgtctctgaaatcatctctatcccagatgcgtaattgtttttccatatttgcccaaacgtaagcgttgaatccgtttacttgtggttgcatattggtcaggaaaaacgtttggtagttagcttctgccgaacccaatcggtcggctgaagggcagatatgtccgtggtcatagcccgttcgccaatatggatctgatgcaaactgaaaagcttctggcaggtttgaatcttgtggatattggttttttttggagcgatagcgcttggtatgcgcttcggcaatgcttctgtacatctgataacaactccatctttgggactttttctgcgtgtcccattctaccgagtaattcactccgtactcatgggttcgtgcgttgagctcggctttgtgcacaataatcatgctgttaccgccttttatttttggaaattccaagcgacaaatctcgggtggcatggttgggttaccaatggtagatacgcccactaaccgatttgcgttagtattcgattccgtctctccgttggttgaattgttatcagaatcacatccgaagagaaatagggagcagcatgcaacgaaaaataatgaatggagttgtttcatgagattcgcttcaatgaaaaaaagtgcgaccgaccgtatatgcaactacgcccgaacgcactttctttataagaaaaatagggttgtatgttatttttgaatcttaccgtaacggttcatgaaacggtctacgcgacctgctgtgtcgacaagtttgctcttacccgtatagaatggatgtgaactacttgaaatttctacttttaccactgggtaagtttcgccttcaaactctactgtctcattactcttgcaggtagattttgtaaggaacatatcgccgttggacatatctttgaatacgacggggcgatagttttctggatgaataccttttttcatttttataatctattgaatgttatttattttctttgctgtatgggctgcaaaagtacaaataattttgcaaacagccaaacgtatcactgcttttttgtcattttacgactaagttcttcagttcccatgtgccagccgactgtgatgagcttttgtactgaaaggcgattcttacgtcttttttgcctgcgtaggcgctgaggtcaatagttgagttaacggagatccagtccttgttcgacggccatttactgggcgtaagaacctcccaagtggctgtcgagggcttgccgctcttgtagttcgtagatatcttgatgaagatctcatctttcagggagttgaagcggtttgcagtttgctcaacagacagcgtgatggttgtcttgccgctcaggtcgagggcaggtgagatgagccaactttccgtctcgaatttcttgttttggaaaaaggcgctggctttcacctgttggtgtttcttgtccacaaaccatacgtatttaagaccttgtggcatgtctttctcgttggcaatggtgaaggagcctatgctctcggcgaacgtttcgttcaagatgtcggttgaaggcgttactggctgaccaggttttgtcccgaaactctttgtgccgaccaaggcatacgacacgtttttcagtcccgtgataccaaagtacttctctatgtttccatagagcgttatctctttcttgtatacgtccttgtttttcttcaggttcagtccagctctaatgttgccaaagggtagttgtatgggcatgcagttggcaatgtttgtctcgtcagctttatcggcaacaaggaggttggtctctgtttcgcaactctcggctgtgaactttgcctcgtttttgtcctttccaggaatgaatcccacgatgtatcccttgacgaaaactttggcaaccttttcctttttcatggctgctgctacgttgaagggtgatgcttctgtgccctcaccagttggattcacgttggttccaggctcctgtggttgcgagttgtcgctcgtcttgccattgacagagtagagatagctcttgttggtaacggtttctggtgttttcccca

SEQ ID NO: 1646 - DNA, 23654 bp, synthetic construct
  variation 15015..16934: note = n is a, c, g, or t
  misc_feature 1..23654: note = Synthetic
  source 1..23654: mol_type = other DNA
tggactttcccgcgccgttgaggccgatgatgcctatcttcgctccgtagaaaaacgagagatagatgttcttcagaatctgtttctggttctgtgggatggtcttcgacacgcccaccatggagaagatgatcttcttgtcttctgttgttgccatattgttgattgtggattttcctttcggaagtttgtgcaaatatagctaaaaaagttcaataggccaacaaaagaccgtgatttctcccgcacggagcagaaggagagacctcggcggactgtggggcgtggtcagaagaggcggggctccttgtcgaggaagctctcctgacgcagggggcgtatgaggtcggtgggcttgatgtgccctgtcatgaggggcgactcggggtcgtggagcgcatagttggccatggcgagtcgcgggtcggagttggcatagcagtatcggcagccgttgatacaggtgttgtagtcgcccagtccccgactctccatgcatcggcagcccggtcggttgcccttttggggcatgttcctgaacctcagatccagggcgtgctcgaatatctcgcgggtcatacagccgctctttaggatgccgtatggcgtatagtcagctatggttccacaggtctggatggtgagatggttcttccgggcgatttcgccgaatgcccgtgcgaggcgtatcttgtccgattcgctgatcgggagcaagtcgggcatgttggcagcgagcttcttataccataccacgaacgagaagagcaccctgtcgacatagggcgccagttgcccggccattctcgcgaagatctctatatgtcgctccacggtgtagtggcgggtgaggagtacggggtcgtatctccacacgatccgctctcttcccacctgtcgggcgagctccttcagcgtctcgatgctctcgtcgatagtcggtacgcgcggctccacatccttcccgtaggctgtgatggtgtagtggaagtggcagttgaacctgtcggtaatctcgtgcagccgcggcaggatgggacggtagtttttcgaacagaactccactacatcgatggtggccgggtcgagcctgatggagctcaccacatcggggttgaaggggttgcgggaatagacgaatccctcgcggaacctgcgcagcagccattccgagaagtagttcaccgtgtcggtccttccgcctgtattcagtatcatggggcgtcgttcggggattttctacttattcttgtcaaatctccggcggtcttccatgatgtctttatagttctcgagcgaccagtccaccagtgagtccacgagcgggatgagcgtgtgggcgcgttccgtgagggtgtattccacgcgtgggggcacctccggataagccttgcgacttaccagcccgtcggcttcaagcgagcgcagggtcgtggagagcatgcgctgcgagatgtcgggaatggccttggcaagctcgctgaagcgcatgccatccgccttcttgtcgagggttatcagaatcaggagtgcccatttcccggctatccgtgcgaggatgttgcgcacgggacactccggaaagatggggtcggtgatgaaatttgatgcagtatctgtcatatgttctttgtctttatggttcgtgaatcagtgtgttcacaccttctgcaaaggtaatgataattcttggaaacggcaaatgaggtgttttgaaaaacaagagacgactgccgattttctcggaagccgtctcctgtgattcttttagccgttaagagattgacaaaatcgccgattttgtatgacattctcgccgattttgttctacaatctcgccgattttatcggcctgtttgccgttggcgtgccgtccgactaccacttcacctcttcctgaaggatgtcgccgtcggaggcatcctcggccgtgaagctgttgccgcgatactgcacgcagagcatcacgaggggttcggtgccgttgttgcgtactgcgcgcttgccttcaggcgagacgcgtatcaccgttccctcctttacgggaatgttccggccgtctacctgatactcgcccgtaccgctcaggaagaagtagagttcctcgtggtgcttgtgggtgtggtagaagccgccctcttgaccgggctcgaagatctgaaacgagaactccgcgccggtcgcgccgacggcctggccgccgaacgccttgccctttagctctacgccgggccccagcggtagcacaaagccgccaagttcactcaactttccgaaatctactgccttgaattccttgccttccgcaagggtcttgatctctttcatcattctaatgtttttggttgtcaatgtttacggatgcaaaggtaggcagaaaaaacggcttgtgcaagagggtacttttgcgtaagctacttacatggatgtaggaattgcgcgttcacgctccttgccgcagaaaggcttaacacagattaacctgcgttgtcttcagggtctccgtggtcgaagtgggaaactgattggtctccgtcaatgaacctgcgggtgatgtcgccgtagctatctatgcggcggtcgcgcaggaacggccaccatcggcgcacctgttcgccgtgatcgaggtcgatctccacgacgaggctctcttcttcggtctcggaggcacgatagtgcagctcgccctgcgggccggccacgaaactgcttccccagaaccggatgcccggttcctcgggtgaataaggtttttcctcaccgctcacggtctcgaagcccacgcggtttacggccatcacgggcagtccgttggccacggcatggccgcgcattacggtggtccatgcctcccgctgccgctgctgctcctccggggtgtcgtggctgtcgtagccgatggcggtggggtagatgagcagctgggctccctgcatcgccatcaggcgcgctgcctcggggtaccattggtcccagcagacgagcacgccgagccgtcccaccgatgtgtcgatggggtggaagccgaggtcgccgggcgtgaagtagaacttctcgtaataggctgggtcgtcggggatgtgcatcttgcggtatttgccggcgatagagccgtctcgttccatcacgacggcggtgttatgatacagccccggggcgcgtttctcgaaaagcgaggtaacgatgaccaccccgagcgactttgccagctcgccgtagaaatgggtggagggacccggaatgggctctgcctggtcgaaatactctactcgttcctcctggcagaagtagagtccgttgtgcagttcctgcaatacgatgagctgtgccccgcgccgtgcgaggtcggtgatgccctcggcgaggcggcgcatgttgtcctcctgtgaggcggtgttgtgctgctgtagcagtccgatgcgtagtatgttcatgttgttttcggttttatcggggatattgcatggtgatgcagtgtatgcttccatgctgtcggatgatgacgcgggcgtcgatgccgatgatttcacggtcgggaaaggcctgtcggatggtctcgcaggcagtctcgtcgttgtcgggctggtcgtaggtaggcacgatgacggctccgttaagtatcaggaagttggcataagtggcaggcagtcgctcgccgttgaagacgatgggctccggcatgggcagcggcagcaggcgatagggcttgccatccggggtgcgcagggtcgtgagttgctcttcgagagccttgaagtcggcatactgcgggtcgccctcgtcaaggcatctcacatataataaggtgtcgtggggagccgtgcgcacgatggtgtcgatatgcccgtcggtgtcgtcgccgatgagggtgccgtggtcgagccacacgatgcggtcggcacggaggctctccttgaggcggctctctatctgcgcttgtgtgagcggctgattgcggtgcgatgccaggaggcattgcgaggtggtgaagacggtacccctgccgtcgctctctatcgatccgccctcgagcacgaagtcgccgtggtcttcatagttcccctgcacgatgcctgtggcatgtagccgacggttgatggcgttgtccttttcccatgcgaacttctctccccagccgttgaaccggaagtcgagcaggatgcgctcgtcgccgtccttcagcgtgaggaaggcatggtcgcgtgcccaagtgtcgttggtgtcgcactcgaagtagcggatgttccttagtgaggcggcatccagagtcgttcggagcaaggtttcaacctccccggggtgcggggcgacgatgagcaggggctcgcgggcagcgatggcggcagccagaaggacataggtgtgcgtgatttcattgagatacggcagccagtcggtgccggcatgaggccatgtcagctgcactccgtgttgcggagcccactccgcgggcaggtaaggacgctcttttttcatcagcgggaatattttaggcaaagataatgaataatatctataactttaaataattatttgtatttttgcagaaagaagcgtaaacagtacgatgcttgaactgaaagatgtatatttggagcacggcggaagagtgattctcgaccatgtgaaccttgcgctggccgacggcgagaatctctgcgtcgtcggggcggcggggagcggcaagaccagcgtgctccttgcgctgcagggactgctgccgataaaggggggattcctcacccttgacggcgagcgttacagccgtctctcggccccttacttccgccgatggatggcctttgtgcccgacgcgccgcaactgccttatgagaaggtgagcgatctgttggaagaactgttcagtctggccgtaaaccgtgatgtagaagtgagcaaggaggccgttatccgggagttctcgctccttggattggctccggatgtctacaatatgcccctccggaaccttgacgcggagacccttcagggcgtgatgctcgccgccgagggcatcctgaaacggcgcatcctgcttatcgacaacctgcgctccactcgctggatggactctatcgccgcgctcaacagtcatcaggtgtcggccgtgataacgacctgcgatgaacaggtggccgcaaactttgataaaatcatcagactatgaccatatttagatttatcttggggctggcacttatcgtcctcccgctctacatactctatgcctttcaggtgaaaatcctacggaaagtgcttgtgggtgcgggcaagatggcggcctatttgctattgacggggctctgtctctacttcgtcatggagtggaacagcctcttcctgaacctcctttgcttcttgctcatgacccttgcggcctcggggatgaccgtgcggcgtgcacggctgctgggcggaaagtatgtggtgccggtcgccgtgggcgtcatcgtgagcgttcttgtcatcggactctacttcctcttctttgtgatgggattgcagaatccctttgatgcccgctatttcgtgcccgtcctggggataatgacgggaggaatgattgagacgaatgccaaggccctttcgacctattacgccggactcgagcaccacaaccagctctactattacctcgtgggcaacggagccacccacgacgaggccgtgaagcatttcttccgccgtgcccttgaacgggcggcactgccttggattcaccagatgggctacatggtggtgggtgtgtcgccagtcatcctctgggtgatgcttttcatggggagtagcgttctcgaggctctggcctatcagatgctcatcatgatcctgatgtttgccgcctcgctgagttctttgctcatcaccctttatgccgcacgcaagtattctttcgacgaatacgataacctgaagcccgggaaatgaggtcgtggcattcattcttcctgctcctgacggtgcttttctgcgtgagttgtaccggcggaagaccgcataagccgctgataggcggtatcaagagatcgatggctgaccgtgaggaggtgtggaatcaggattccgaggaagattctctggccccgaccgacggcggcattgaggttcccgctccgctgaatgaccggccggaacaactactccggcgcacgggctacaccgcttcctataacaggaatctgcgcatcgtgaactgggtagcttggcatctgacggccgaccataccagcggaccgcacaagcgtaagggcattgcctatacggaagacaccgaggtgcccgctccccgcgccacgaccttcgactatcagcagtcaggctatgaccgaggacacatgtgcccgtcgggtgataacaagtggagtcgtgaagcccaacaggactgtttcctgctctccaacatgtgtccgcaggaccataacctcaatggcggagattggaacgagctcgaaatggcatgccgccggtgggcggaagaatacggcgacctatacatcgtctgcggtcccgtgctctacagacagcggcataagaccatcgggcggaacaaaatcaccgttccggaggctttcttcaaggtcatcctctgtctgcagggcgagccgaaggccatcggattcatctataagaacaactcgggcaaccgcccgatggactcgtatgtgaactccattgacgaggtggagcgcatcaccggcatcgacttcttcccctcgctgccggatgatatggaagaaaaagtggaaaaagaagaaaacataagcaaatggaactaagaacattgaagatgatagtgctcgctgcgggcatcatgctgcttgcagcttgtggacaatcgcaaaagccccaggccgccatcggccggatggcggggctgtatgagtcgcccgccgaaccggctcaggccatgcgcccaaggctgaagaccgttactaaattcgaactcccggttccgctcaaagaccgcccggagcagattctcacgcgtatgggctacacggtttcctacaacagggagactaagacgcccaactgggtggcctggcacctcacccgacagcatacctacggccgtgcgcagcggtcgcaggagatgtttaccgaagacgagagcgtggatgcaccgcgtgccaccgaccaggattactacaactcccgatacgatcggggccacatgtgcccggccggggacaacaagtgggacgagaacgctctgcgccagagcttcctcttcaccaacatctgtccgcagaaccataacctgaaccgttatgaatggaacgacatagagatactctgccggtcgtgggcgcgtgagtatggctccgtggatgtggtgtgcggtccggtcttcagcggtgagcggaagaccatagggcgcaacaaggtgcgcgtgcccgacgctttcttcaaggtggtgctctgccgcaacagcggtgccaaggccatcggattcgtatatcagaataccggcaagaagcagaatgtatacgactgtatccgcaccgtggacgagatagagcggctcacgggcatcgacttcttcccggctctcgacgaccgcacggaggaaagggtagaggctgaggctcgtatcaaaagctggaatcccgcttatcccgaacgctaccactaaagaccgcagtcggcagactgcggaggagtatctgaacgaaaatcggggaataattcttaattttccttgattttctttcccgttccggataaaatgcttatctttgcatattaattcatgttagcgtgaaaataaaagaagtggttagtgcccttgaacgattcgcgcctctgcccttgcaggaagactttgacaatgccggcctgcaaatcggattgacagatgcggatgtctcaggggctttattgtgccttgatgttaccgaggccgtcgtcgacgaggccgtcgggaaaggctgcaacctcatcgtttcacatcacccgctcatcttccacaagctccgccgcatcacgggcgaggactatgtgcagcgtgcggtgatgaaagccatcaagaacaatgtggccatcgtctccatgcacaccaacatggactgtgcccagggaggcgtcaaccataagatggctgccaagatggggctccgagacctcggcttcttcggagcagagaagtcggtcgacggcgtgcagggaggcgagggagtcattggtatgctgcccgagccgatggcagccgacgacttcatcctgatgctcaagcacaccttcggcgtggagtgcgtgcaggccaatgagctgctgcgccgcccgatcaggaaggtggctctttgcggcggtgccggctcgtttctccttccagaggccataggacagggagcagatgctttcgtaacgggcgaaatgcactatcacgactacttcggccacgagcaggagatacagatagccgtcatagggcacttccagagcgagcagtataccagcgaaatatttcaatcaatcatagaggaacggtgcccgggggtgagatgttgtctcaccgagatatgcaccaatccgataatttatttatagattatggcaaaaaagaatcctacagacttgacagtagaagagaagctgaaggctctctatcagttgcagacctatctcagcgccatcgacgagaagcgcgccctgcgcggtgagcttcccttggaggtgcaggatcttgaggacgagcttgctggtttgaatacccgcctcgagaaaatcaacgccgaaatagaagatttccgtgcggcggtagtacagaaaaaaggtgagatagccaccgccgaggccagcattgcacggtataaggcgcagctcgaggaggtgaagaacaaccgcgaatacgacacgctgagcaaggaaatcgagttccagagcctcgaagtggagctctgcaacaagaagatcaaggaggctggcgtgaaggtagaggaaaagcagaaggagctggaggaagcccgtgaactcataaccgaccgtgaggccgccctcagcgagaagcgggccgagctcgacgacatcatgcaggagacccgcgacgaggaagaaaaactcaagaacaaggcacgcgacctggaagagaagatagagccgggactgctccgcagcttcaaacgcattcgcaagggtgcgcgcaacggactcggacttaccgtggtgcagcgcggctcatgcggcggatgcttcaacaagattccgccccagcgacagcttgatgtcaagatgcacaagaaaattctcgtctgcgagtattgcggccgcattctcatcgaccccgaactggcaggcatcaagcccatggagaccgccgaggagaagccgaagcgcaagcgcgccgtgcgcaagacagccaagaaaactgagcccgaagaggcagaggaggaagcataagaactacttttttaacctgtcgttataattcctccttcaaggatggacaagaagccggagcgagagttccggcttctctgtgtcttgtcagttcctctcatttcctctccttgccgtgggcaggagctctggcagcggtcgatgatggtgccattggccgttccctgcaatcttacaagcggcgtgtaacgcgattacacacggcttgtaacacgattacacacggcttgtaatcccgaggtcagtggctgccgggttttccggaaatggcctgttgcgcagtctgcggttatcgtttgccagccgtttcgcatgccggaaaccggcatctgcctactgttatctacgcaaatgccggtctccagccgaaagcctggtatccggcacaccctggaaaaatctcgcaaatattttgtgattataaataaaaaaccgtatatttgcgaaaagagaaaacccctccgaagaggggttataggtctttaaaccttcggcatatagccttattgcgataagatgtagaaaatcttatggtgcaaatataggcataatatctgaaacgacaaacttttttcttgtaaatctttaaataatacgaaatatgaagaagcggattctgggattggatacaggtacgaacagccttggatgggctgtcgtggatcgtgatgaggagagtggcgagtatgcgctcgtcgatcggggagtgatgatttttcaggaaggtgtgaagatagagaagggcatcgagtcgtcgagggcttccgagcgcaccgcccaccgagccttgcgccggcagtattttcgccgtcgtctgcgcaagatagaggtactgaaggtactcgtggctcataatctctgtcctcatctctccgacgaggaactgcacgagtggcatgtgcacaagaagtatccaaagaacgacgacttcatgctttggcagcgcacgagcgacaacgaggacaagaatccctattattaccgccatatctgcctgcacaggcagctcaatctggatgacatcggggaacggttcatcctcggccgggcactctatcatctggcacaacggcgcggatttcggagcaaccgtcttgagcagaccgacgagaaggagaccggcaaggtgaaagaagccatcacggggctctccgacgagacgagggaggcaggatgcgaatatctgggcgactacttcttcaagctctatagcgagcagggcaaccgtgtcaggctgcgcagccggtataccgaccgtgaggagcactacaagaaggagttccatgccatctgctggaagcagggtcttgacgagacgctgacggcagagctggagcgcgccctctatttccagcggccgctgaagtcgcagcggcagggcgtggggaaatgcaccttcgagcctcgctgccctcgctgtgccgactctcatccggactttgaggagttcagaatgctgagtttcatcaatgccgtgcgtatccaaggaccctttgatacggctctgcgcccgctcgacgacacggagcgtgcccacatcctcccactcttttatcgcaagagcaagcagaatttcaattttgaagatattgccaaggccttggcgggcaaaggcaattaccagcatattaaagatgcgggatacaagccctataagttcaacttccgtatgacacagggtgttgcgggctgtccgaccacggcgcagctgaaggaggtgttcggcgacgactggcaccggggcattgccgagacctatacactcaatacgaggaaggacgggacgctgaagacccctcgggagatggccgacgacatatggaatgtgctctattcgtttgccgacaaggagcatcttgtggcctttgcgaaagacagactgcagctcgatgacgacaaggccgagcagttctcgaagattcggctcacgcacagctttgcctccttgagcctcaaggccatccgcaagatactgcctttcctgcgtgagggcatggtctattcgcatgccgtggcaatggcgaacattccctccattgtcggcgagtatgcatgggagcagaagaagaacttcatccttgagaatgtgaaagcttatctcgacgacaaagaccttgccacaaaggacttctgcatcaagggattcctgcaggacaacttcagtctggagcccggcgcggcagaaaagctctaccatccctcgatgattgagacctatcaggatgctcgaagaaatgaggcgggcgtctatcaactgggctcgccgcgcacctcttccgtgcggaatcccatggccatgcgctcgctccacgagttaaggaaggtggtgaacgcattgctcaaagccggaacaatcgatgaaaataccgaggtacatatcgagtatgcccgcgaactgaacgattccaataagcgtcaggccatcatgcgctataacaaagatctagaaaaccgccgcaagcggtatgctgatgaaataaaaaagctctataaggatgagacgggcaaggacattgagcccacccaggcggaggtgttgaaattccagctttgggaagaacaggaccacatctgcctctatacgggaaatcagataggcatagccgatttcataggacccaacccaagattcgacattgagcacaccgtgccgcagagtgcgggtggagacagcacgatggagaatctcaccctctgtgagagtcgcttcaatcgtgaggtgaagaaggcccaactgccgtcggtattggccaattacgaggatatcctctctcgccttgagccttggaaggaaaagtatgaggagctctcaaagcaaatcgacaagaagcataccaacggcagtatggacaaggcgcagaaagatcgcatcatccaaaaaagacatttactgcaactgcagcgtgattactggcgaggaaaatacgagcagtttaccatgacggaagtgcctgaaggctttgcccgcaggcagggtgcaggcatcggacttgtgtcgaaatatgccgggctctatctgaaatcgctcttccacaagaagggcgaccgcaataagagcaatgtctatgtggtgaagggagcgtctaccgccgagttccgccgtatgtgggggctgcagggcgagtatgagaagaagagccgcgacaaccatatccaccattgcatcgatgccattaccatcgcctgtatcggcaaggcggagtatgacaagtctgctcattattaccgagaaaaggaggcctatgatgagggtagggctaatcggccgcactttccgaagccctggcctacattcacggaagatgtgcttggcatagagcaaagcctgctcgtggctcacgacactccggacaacatgaagaagcatgcacggaaaatggtgcgcacgcctcacggcaagtttcttgctacgggcgacagcgctcgctgcagtctgcatcttgatacttactatggagccatcgagcgggagggtaaggttcgctatgtggtacgcaagccgttgagcagctttgcgagcgagaaggaccttgaccaaattgtcgacgagaccgtcaagcaaatcgtgagggaggccgttgcggggaaagagtttaagacagctatcgcagaccccatctatatgaataaggagaaaggtatccgcatcaataaggtgagggtgtttgtgccttcggtaaccaatccgctgcatatccgcagacagagagatctttctcggaaagattacaaacaagaattccatgtggcaaacgacctcaactatatgttggcaatctatgaaggtgaggtgaagggaaagccgaagcgcgactttgaaatcgtgaacaacttggaggccgctgactattacaggcagagtatggacaggagagactggcctgccattattccagaaaagagtacgaaaaacggtttcccgctttattgcaagctaaagataggcacccatgtcctgctttatgagaagacggctgcggaagtagacttcgcgaactataaggatttagacaggcggctttatagagtctctggcatgtcgtctatgactatatctggtaataaatatggcgtaataaatttgcgataccatcaagaagcaagggcatcgaaagaaatcaagtcgaaaaacggggcatataaaaatggcgaggaacatcggccggcaattacgatgctccatactcaattgaaggctcttgtcgagggcaaggatttccgtatatcagagcttgggaaaatcacacctatttaatatatgtcctatgttgaaacgaagtgttgtattccagaatcccgccatgctgtcgttgaaggacaggcagttagtcgtcaaactgaaggactttcctgatgagaagcggacgattccgattgaagatctgggctttgtaatgatagacaatgccctggtatctatcacgatgccgttgctgaacgccctgtcggataataatatagcggtagtgttttgcaatgaaaagggtatgcccgcctccatgttgcagaatttagacaccaacaatactcagggagaagttcttcaaaatcagataaacgccacagaaccccttaagaaaaacttgtggaagcaggttgtagaggccaagataaggaatcaaagcaacctgctgatcaagtatggtaagaacggagagcagttgaaaccctattataagaatgtggcctctggtgattccaataacaatgagggtatcgcagcacgaatttactttcaggagttgtttgggaagaactttgttcgcaatcgcgacctgccgggagtcaatgccttgctcaattatggatatacggtgttgcgggctgctacggcaagggctatcatgagttcgggactctttccagcgttaggaatcttccaccataacaggagtaatgccttcccgctggccgacgacatgatggagccctatcggccttttgttgacgaaatcgtatttcagctccttaaggacggcaaagaaaatctggataaagagaccaagggacggcttatccgtgtaatgtatagcgacacttggtttcctaaaactatgcgacctcttgacatcggcctgtcgatgacgatggcatcactggctaaatgtttggcgaaagaacaaaaaagtttaagccttcctgcgttgaaatgagtgaagaccggttgaatagttatcatattatgtggttgtttgtcatgttcgatttaccgacggtaactaaaaaagacaagcatatatcggccaaattccgtaaggaattggagaaagacggctttgtcatgcatcagtttagtgtctatatacgctattgcggttctttagagagtgcgcatgtgcacataaaaagagtgaaatcgcttactccttcacgcggcatggtgagtattttaacaataacagacaagcaatactcaaatattataaatatatggggcgaaattaaagcaaaaaaagagccgcagccgatgcagctcgaatttttttagtatatttgcagaaggaagcatcaaaaacagccgcttcatattgaaagaatcctgcctaatcagttgatatgcagaagaataggagatatatgttgcggtttgatgtagaaagaagatatatagcaacnnnnnnnnnnnnnnnnnnnnnnnnnnnnnnnnnnnnnnnnnnnnnnnnnnnnnnnnnnnnnnnnnnnnnnnnnnnnnnnnnnnnnnnnnnnnnnnnnnnnnnnnnnnnnnnnnnnnnnnnnnnnnnnnnnnnnnnnnnnnnnnnnnnnnnnnnnnnnnnnnnnnnnnnnnnnnnnnnnnnnnnnnnnnnnnnnnnnnnnnnnnnnnnnnnnnnnnnnnnnnnnnnnnnnnnnnnnnnnnnnnnnnnnnnnnnnnnnnnnnnnnnnnnnnnnnnnnnnnnnnnnnnnnnnnnnnnnnnnnnnnnnnnnnnnnnnnnnnnnnnnnnnnnnnnnnnnnnnnnnnnnnnnnnnnnnnnnnnnnnnnnnnnnnnnnnnnnnnnnnnnnnnnnnnnnnnnnnnnnnnnnnnnnnnnnnnnnnnnnnnnnnnnnnnnnnnnnnnnnnnnnnnnnnnnnnnnnnnnnnnnnnnnnnnnnnnnnnnnnnnnnnnnnnnnnnnnnnnnnnnnnnnnnnnnnnnnnnnnnnnnnnnnnnnnnnnnnnnnnnnnnnnnnnnnnnnnnnnnnnnnnnnnnnnnnnnnnnnnnnnnnnnnnnnnnnnnnnnnnnnnnnnnnnnnnnnnnnnnnnnnnnnnnnnnnnnnnnnnnnnnnnnnnnnnnnnnnnnnnnnnnnnnnnnnnnnnnnnnnnnnnnnnnnnnnnnnnnnnnnnnnnnnnnnnnnnnnnnnnnnnnnnnnnnnnnnnnnnnnnnnnnnnnnnnnnnnnnnnnnnnnnnnnnnnnnnnnnnnnnnnnnnnnnnnnnnnnnnnnnnnnnnnnnnnnnnnnnnnnnnnnnnnnnnnnnnnnnnnnnnnnnnnnnnnnnnnnnnnnnnnnnnnnnnnnnnnnnnnnnnnnnnnnnnnnnnnnnnnnnnnnnnnnnnnnnnnnnnnnnnnnnnnnnnnnnnnnnnnnnnnnnnnnnnnnnnnnnnnnnnnnnnnnnnnnnnnnnnnnnnnnnnnnnnnnnnnnnnnnnnnnnnnnnnnnnnnnnnnnnnnnnnnnnnnnnnnnnnnnnnnnnnnnnnnnnnnnnnnnnnnnnnnnnnnnnnnnnnnnnnnnnnnnnnnnnnnnnnnnnnnnnnnnnnnnnnnnnnnnnnnnnnnnnnnnnnnnnnnnnnnnnnnnnnnnnnnnnnnnnnnnnnnnnnnnnnnnnnnnnnnnnnnnnnnnnnnnnnnnnnnnnnnnnnnnnnnnnnnnnnnnnnnnnnnnnnnnnnnnnnnnnnnnnnnnnnnnnnnnnnnnnnnnnnnnnnnnnnnnnnnnnnnnnnnnnnnnnnnnnnnnnnnnnnnnnnnnnnnnnnnnnnnnnnnnnnnnnnnnnnnnnnnnnnnnnnnnnnnnnnnnnnnnnnnnnnnnnnnnnnnnnnnnnnnnnnnnnnnnnnnnnnnnnnnnnnnnnnnnnnnnnnnnnnnnnnnnnnnnnnnnnnnnnnnnnnnnnnnnnnnnnnnnnnnnnnnnnnnnnnnnnnnnnnnnnnnnnnnnnnnnnnnnnnnnnnnnnnnnnnnnnnnnnnnnnnnnnnnnnnnnnnnnnnnnnnnnnnnnnnnnnnnnnnnnnnnnnnnnnnnnnnnnnnnnnnnnnnnnnnnnnnnnnnnnnnnnnnnnnnnnnnnnnnnnnnnnnnnnnnnnnnnnnnnnnnnnnnnnnnnnnnnnnnnnnnnnnnnnnnnnnnnnnnnnnnnnnnnnnnnnnnnnnnnnnnnnnnnnnnnnnnnnnnnnnnnnnnnnnnnnnnnnnnnnnnnnnnnnnnnnnnnnnnnnnnnnnnnnnnnnnnnnnnnnnnnnnnnnnnnnnnnnnnnnnnnnnnnnnnnnnnnnnnnnnnnnnnnnnnnnnnnnnnnnnnnnnnnnnnnnnnnnnnnnnnnnnnnnnnnnnnnnnnnnnnnnnnnnnnnnnnnnnnnnnnnnnnnnngttgcggtttgatgtagaaagaagatatatagcaacatatgcgccgagccgttcaatcttgccatggttgcggtttgatgtagaaagaagatatatacaatgctaagactgatgcaggtcgggtttgcttaataggttatggataagatagaaagtctttacactttccattgcctgttgttttatgaagtgtcatttcttcttttccgtaaggcggaaggaatttgtgataagccgctggataagtgttgcctctgcccgcgtggcatcaatgcctatccagtatttaggattgccgttatagggatgtcccagacaatcgtactgttccagtaatgcgggcacttcttctttgcggcacttcacggtaacatggtgcagatcgttgatgtcgaaatagcagaagatgtgcccgccggtatagaaagcaaggacatctcgcgctgccttgaactgctgaaaggggaatttctccacgacatcttcagacagcgacaggcagaaacttctcaattcttctatgttcataatcgtggaatgaaagcctataggtgtctatttgtgattcctgaaagaggaatatgcgagggaaaccatgacgcaggcaaggacgaggaggatgtcggccggtcggcgatgtttccagtaataatctattgcagtagtgaatgaaatctccgggatggcctcggctttgcgcagttgctccaaggtttcatagagagcggtcttgtcggttgtggtatcgtagacgaagaagtttactccttttcttccgctttcagtatatttggggatggagccgattacattgttgccgattatctgcagggagtctatctcgtccaccattgtctcgtcgatttccgcgtcgacgatgcatccgtatttcacatcgaatgcttccagctgatggtggttgggaaggggcacttcataataggtgccgatgatgtctttaggaaagacaaacctgtcgaggcacagggagccggccaggtacagcagtaggaatacaaggatgaatctcaagaacttgttcatatattcatgatgctttttcattgttggctccgtcttcgctttggaggagactggtcaccagcccctgtacacacgcagcttgagttcctgcaggtcggacagggccttcttgccgctccggcggcctatctcgatcatctcgctgatggccgcgggcgtgaagctggcgggaccgtagccgtcgagcttcggattgatgtacacatcggcatcgctgcggtttcgctcgtatttgacgaggtcggggcggtagagcgcccatttggcgaggaaggcgatgtcgcccttggcattttcgagtattttcggcatctgtcttggcttctcgccctcgtgcttgttctgcgtgaggtctacggcgatgaccacatctgcccccatggcgcgcacgatgtcaacggggaggttgttgaggagcccgccgtcgaggagttccaccccgccgatgtccacgggcttgaaggctccgggaatggccatgctggcacgcatggcacgggcgagccatccgctggagagcactacttcgcggtgattctcatagtcggtggcgacgcagcggaacgggatggggagggcgtcgaacgagatggagtcgcgccgcccgctcatggagtcgagcagctggatgatgtggtcgccccggatggctccccaggaggggtcggcgagcttggagttcttgcgcccaacggggaatccgaagatataggtaacgccgtccaccttcttcagcacctcgcccttcaggccttcctggcggtcgcccagcagggtgagccactcctgcgagcggaacatggagtcgagctgggccgagcggtagccgcaggcatagagcccgccgacgatggagccgatgctggtgcctgcgatatagtcgatggggatgcccgactgctcgatatacttgagcactccgacctcggcagctcccttggcgcctccgccgccgagcacgagtcccaccttgaggcgggaggccttctgggcgctcatcccggtcgcagcgaggcagagcagcaggcagcacgctatcttgaaatgtttcattatgtttgtcttttgatgggcggcggctcttcggagccttcaccgccgggtttgtttgcgggcaaagataatgaaaaaaacagagagacggaaagaaaacggccggaaaaacttcattcccctcttcccgtcggcgggacggccggcatcatcaggctgcggcacgcctcggcctctcgatgagacggaaagccgcatccaccatcagggagacaacgatggagactcccagcgtggctgcgaagatgagtatcggatacttgaagctgtagaagaagtcgtgaaacaggtagcggcataaccatgtgtgtatcatccagatgttcatggagtggacaccgaggaacaccagtacggcctttatccagggtcgataccgcaggacggcgagcaacagcaccacggcaagggcgaagagtccttcccacgaggcatggggaatcaggatgcggatgagcacgagggcgcagagggcgagcagcagacctccgttggcaatgcctctgcgatgaaggaaatgcctgaaccgctctattacctcatgccgcttggcaagggctccacagcagaagcagaacaggaactcgatgattaccacaggcagcgacagcagcgggttgggagaaatcgtgccgctgtagaagtgaagcagagtcatcatgaggaaggtgcccatgaatgtcgtaccgaccaccagccatggacggcatcggtcaacgattctgaaaacaatcggatagaaaagggagaggatggagtaaggcagcagaaaccagcactcgccgttccaagtggtccgcaatccagttatgttgtatataattgtctgtgaatcagacagatatgtcttacccccccctattattccgactgcgacaaagactgccgtaatcagccaataatgctcatagagcttgacgatgcgcgagacatggtgcgcgtcttttgccttgagatacacgcagtataagccgtatccgccgagggctacgaatatgctcactggactgcatgccccggcaatcagccaagcaaggggtctggatgcaatggtaaggtcggtatagtcctgcgctgcggacatgttgttgaacaagtgtagccataccatcatgatgatggccacgcctttcataatctgcgtgtattcttttgacataggtctttgttggttatggagtaaaggagtatggagtaaggagtaaaggagtaaagggaggactgagtaagagatggggaaggccacttcttattttctattccctttagaatatcctccttactccatcctccctttactgccttcccatctgcttcttgagcagttccggaatctcgctggtctccttggccacgggcacccctacggcctcgaaggctgttaccttgccctctgcggagcccgatgtgctggagatgatggcaccggcatgacccatctgcttgcccggaggagcctgacggccagagataaaggcggcgacgggctttgttacatgttccttgatgaactgtgccgcacgctcctcggcatcgccgccaatctcaccgatgagggcgatgctgtcggtctcagggtcatcctggaacatcctgagcaggtcttcgaagtagaggcctaccacggggtcgcctcctacaccaacggcggtagactgtccgaggcctgcctgcgtgaggttgtagaccacctcataggtgagcgtgccgctgcggctgatgactcccgtgcccccacgcctgaagatattggtaggcatgatgcccacgaggcattcatcgggggtaatcagtccaggacagttcggtccgatgaggttggctcccttgtcgcggatgtagcggtgagcgtatacggcgtcctccacgggcacgccctcggtgatgcagacgatgagcttgatgcccccgtcggcagcctcgagcatagcgtccttggcaaaggcagccggaacgaagatgatggaagtgttggctcccgtggttgccacagcgtccttgacggtattgaagacggggattccgtctacctgctgcccggcttttcccggtgaggtgccgcccacgatgttggtgccgtaggccttcatcttcgatgcgtggaaactgccgtcgcgccccgtgataccctgtacgataactcttgtgttcttattgactaaaatactcatttcttctggtttttaaacggttcttgatatgttctccccctaaagccttgcggctatctctacggccttgtggccggcgtcggccatggtagtgcccacggtgaacttggtgccctgcaagagcgcacggccctcggtctcgttggtgccggtgagtcggatgacgatgggcacctcggtatcaatctccttgaaagcctcgatgagccccttggccacatcgtcgcagcgggtgatgccgccgaagatgttgatgagtaccaccttcacatgccggtcgctcaagagcaacttcatggcttctacgattttctgggggttggaacttccgccgatgtcgaggaagttagcgggttcgccgccgtagagtttgatcatgtccatggtggccatggccagtccggcgccgttgaccatgcagccgatgttgcctccgaggttcacatagctgaatcccttctccttggcatagagctccttcttctcctcttcggtgggctcgttgagctcggccacatcgggatggcggaagagggcgttgttgtcgaaggtcatcttggcgtcgatggccttcagctggccgtccttgaggtatacgagcggattgatctcggccagcgaggcgtccttctccacgaagaggcggtagaggttctggaagagcggtatggcctgcttcacctgtgccatgtcgtcgaacagggcgaaggcggcctcacgggctttatagatgggcagtcccacgagcgggtcaatggcaatcttgataatcttctcaggagtctccttggccaccttttctatctccatgccaccctcgcggctgagcatgaggatgggcgacttcgtgcggcggtctacgaggatgctcacatagtattctgcggcgatgtccacggcctcgccgatgagcacgcggtctaccgtgaaccccttgatgttcatcccgaggatgttgccggcgtgcaggcgcacctcgtcttccgaagctgcgagctttacgcctccggccttgccgcggcctcccgtgtgaacctgtgcttttacgactaccttctcgagcccgagcttgcggtaagcttccacggcctcgtcgacggaatggcagagaatgctcctgtcgaccggtaacccatactgggtaaagaaaccttttgcctgatattcatgaactttcatagtaaattaattaattagtagaatttcatgcaaatataacatatttcttcgaaacaagaaagaattccggggaaaagtaggtttaaatagtataaataggtatatagtgctcgctcagctgaagatgacggtgcccagcgcggaggctatcttcatcaggacatacagcatggcgaagatggcgagcacgaagacaacaatcatggcgaggctctggagggcctttcggttgatgttgcggataacggtctcgtcattgttgaggaatccgttgataagggccatgttcctggagttggcgcgatggaagaagtcgagcacatcgcccacatagaaggggatgagtccgaacaggacatcgcggagtgcgttgttcaagatggcgagagtgaggggcacggagcgcagtcggaacaaggcgaagtagacatggacgagcgaaaacaacgccgtagccacatcgccgataccgccgggcaccagtcccgcgatggcgtcgaggtagtaacggtcgagccaggcggaaatcttctgcatgccttggtagaggcggctttcgcccagtcgtttctttcgttctgcggtggtcatggtctgttgggatgctttagagatggaaaagccggggtgcttgtccccggccttggtataatcagtcgaaagtcttgaattcataaccctgctcccggagccacttcagagcctgcggtagcgcatagtgtaacttgttgatgctcttcagtgagtcgtggaaggtgatgatggagccgttgcgggcatacttcttcacattgtcgagcacatcgtcggcggtcatccacttggaataatcgcgcgttacgagatcccacatgatgatgcgataatggcggttcatccaccaatagaccgaccgtttcatccatccatgtggcgggcggaacaaatgggcgtgaataatctcgttggccttatagacattggccgcataagtgatgggcatatgcttcagcgacccgaggtggttgaaggtgtggttgcccacctgatggccttccgccacgatctgattgtagaggtcgtggtggcggagcacattctcgcccaccatgaagaaggtggccttggcattgaactccctcagcgtctggaggatgaacggcgtagactccggtatcggaccgtcgtcgaaggtgagatataccgaatggtcattcttgtccatccgccatgtggctgccggatagagccatcgtagccagaacgagggttgctctatgaacatgggctatgg

SEQ ID NO: 1647 - DNA, 23654 bp, synthetic construct
  source 1..23654: mol_type = other DNA
  misc_feature 1..23654: note = Synthetic
cgagccgtagcccatgctttctgaaatttcggcagccgatattttgagttttgagaatggaacgatgctctccatgatttatctgttgaattcctcgacagcctcgtaaaaggcgtcgatgttctctattggagtgtgtggcggaatgtcgcagcccgatgagattacgaagttcggaaaatccttcgtaaggttgaggagtctgagcgtctcagccttgacctcggcagccgactgctgcttgaaaacctgaacagggtcgaggttgcccatcgccaggcagtccgacggaacgtcgcggcatgcctgaaccatgtcaatcttgtttccgaagtgatatccggcggctccggtctttatcatcgcctcggtgcactggccgttgtttccgcagttgtgcagaataacggcaaagctgtcgtcttgaacggcgtcgataatcttcttgacgtagaccgacgacagtttatagcagtcgtcgttgctcagaagtccggcggcaggctcagccatcagaacgccattcacgcccgtagccttgagtgccacgcagtagcgcagaatgaggtcggtacacttttcgagcagcgttcgtgccgccttctcgtttgtgtatggcagaaccataatctcgctcatgtcgaaaagccttcctgcaagcgagaaaggaccgatgcagccggcaagaaccggcttgtccgagatatttcgggcagccagaatgttggcgcgcagatattcgggtattcttcctgcttcgagcgacggaacttcaagactgtcaatctcttgctcattgctaacaagacgaccgttcacgctcggcacttcgttctccggaaagatgatgtcgctgccgaaagcctcagcctcgacggtcaagtccattatgaccgttgcggcagccgacggatagttgtccgacagatattttattgcctcgtagtgcacatttccgtcgcagacagcctctttcaccgtctttccaatcttctcgatgcccgggtgggtgagaacaggtattgctattgtcttcttctgactgataacattttttatccagccagacatatttagtttagccatattatgaagagctttctatttcggagctttgcgatagagataaacggcgatgaagctgaacaccacgttcggaatccatacggcaacgattggcgatgcgcctgcattaagggcaaacgacgacgaaaccgtctggagcatgatgtaggcggcgcacagcgcgatgccgatgcccagagccattcccatgccgcccttgcgcttctcggcagagagcgatgcgcccattattgccatgatgatggctgcgaaaggagcggcaaaacgtttgtgatattcaatctcgaacggctgaatgttggagaatccgcgcttgcgctgattgtcgatatattccttcagcaccggagtggtgagcgtttcttgctgaccctttgccaccgtaaggtcgttaggctcgattttgatgattgaatccatcttcgagccagtggttatcttctcgcgcattcccttcatgtcgcgaatcttgtagtcgcggataatccagtggtagcgtgtttctgaaagcgtatcgtactcaatgctcgtggcggtgaggtgcgacacaaccttcttgccctcaatcttgtcgaggcagaagtggtatcctgtgcgcgtgcgcaagtcgtagctctcaatataggcaatcacgcccgagtctacctgaagctgtacattgctcgcgccggttatgatgtgcttcttgctcttgtacttactctcgaactttattcgcgtaacgtttcccttcgggatgacgaatgcgccgaggtagaaagacagtccgccgatgatgatggccgatatgatgtaaggtctgagcagacgcttgaagctcattcccgtactcatcatggcaatgatttcggagcggtcggcaagcttggtggtaaacagaattaccgcaaggaacacgaacaactggctgaacaggttggagtagaaggggatgaaactgaaatagtagtcgaagataatagccttccacggcgcattctttgccatgaagttgtcgaggttctcgttgaagtcgaacaccacggcaatggatatgatgagtgccaatgacacgaagtaggtgccaaggaactgcctgatgatgtagcggtctatcttgccgacaacggggttgtcgatgaatatctttacaagaaattgcttgattttcttcatcttttcctaaatcatccctgaaaaatacgttttacaggcgtgttgagatgcgtttcatcgttgctgccttccacgatgtgaagtcgcctgctatgatgtgctgtcgagcctcgccaaccagccacaggtagaatgcaagattgtgtattgatgcaatctgcaaggccaagagttcctgtgcgtggaacaggtggcgcagataagcctttgtgtaggctgtatcaacgtaagacgctccgttctcctcgataggcgagaagtcgaactcccacttcttgttcttcatgtttatgatgccgtcttttgtgaagagcataccgtttcggccgtttcgggtaggcataacgcagtcgaacatatcaactccgcgctcaatgccttcgagaatattcatcggagtgcccccgcccataaggtatcgattaccctcggcattcttcgatgctatgtactccgcgctctgcttgcgcaggtcggtatatgtgcagccctgaacaatagggaacagagcctgactgtagccatacttcggttcagtctcgttgaatctcttgatacatctgtcgagccagcggtgagtcatctccatcgacttctttgcgtagttgaagtcggctgttcccggcgtacactcgtcgagagccatcatgatgtcggctccgattgtgcgctcaatatccattacgcgctcggggctgaagaagtgcttgcttccgtcaatatgcgagcggaattcgcatccttcctccttcagttttctgatgccgctgagcgagaatacctgaaagccgccgctgtcggtaagcataggcttgtcgaagccgttgaacttgtgcaggccgcctgccttctcgagcacctcgagtcccggacggagatagaggtggtatgtgtttccgaggataatctgcgcctttacgtcgtccttaacctcgtgcatgtgaacgccttttaccgaaccgcatgtgcccaccggcatgaatatcggagtctcaatctgtccgtggtcggttgttatgagtcctgctctcgcatttgacttagaatctgtatgctgaagttgaaatgtcatcttttagttaattctccttttttgtctcttcctttatcgaaaggtcgagcggattgtttaccttggttttcagaagtgcgatgtcaagaacctccattacgttagtaacgtagtggaatgtcacgcccttcaagtatatctctggaatagcctcgatgttgcggcggttgtcctcgcagagaacgatgtcggtgatgcctgctcgcttggctgccagaatcttctcttttattccgcctaccgggaggacttttccgcggagcgtaatctcgccggtcatggcaatcttggcgcgaaccttgcgctgtgtaagagccgatgccagagatgtggcgatggttattccggcagaaggaccgtcttttggcgttgcgccttcaggaacgtgtatgtgaatgttccagttgtcgaagatgcgctggtctatgccaatctgctcggcgtgagccttgatgtattcgagtgccagaacagccgattccttcatcacgtcgccgaggtttccggtgagcgtgagtttgccctgcttgcccttgctgagcgatgtctcgacaaacagaatctcgccgcctacgctagtccatgccagacccgtaaccacgccggcatattcgttgccctgatatttgtcgcggttcatctcgtcgcttcccagataatccttcaggtcggcaatcttaacggtctttacagcctcgtcgccgtccttggcaatctgcacggcaatctttctgaatacctgctttatcatcttgtcgagttttcgcactccgctttcgcgagtgtagttctcgatgatgtattcgagtgccgacttgtctatcttcagtttgtcgtattccgtcagaccgagttcctcttttgccttagggatgaggtgacgctttgcaatctcgagtttctcctcggttatgtatccgctcacctcgataagttccattcggtcgagcagcggacccggaatagtgctgatgttgtttgccgtagcgatgaacatcacgttgctcaggtcgtagtcgatgtcgagatagttatcgtggaacgccttgttctgctctgggtcgagaacctcgagaagggccgacgaagggtcgccgttcaccgtgttctgcgtaatcttgtcaatctcgtcgagaatgaagaccggattgtccgagccggctttctggatgcccttgattattcgtcccggcatcgcgcccagataagtgcggcggtgtccgcgtatttcagactcatcgtgcaaaccgccgagcgagatgcggacgtacttgcgtttcagagcctcggcaacagagcgtccgagcgatgtcttaccaactcccggagggccgtagaggcagatgattggcgatttgaggtcgccgcgcagtttcagaaccgccaagtgctctattattctctccttaaccttctccatgccgtagtggtctttgtcgagcaccttctcggcattcttcaggttggtgttgtccttggtgaatgtcttccacggcagactcaaaaccgtctggaggtaggtgtactgtatgttgtagtcgggcgactgtggattgaggcgttcgagcttgcttgcctcgcgctctactatctcgcgaacctcgtcgtcgaacttcttttcggctattttctctctgagtttctcaagctctatgtcctcagagtttcccagttcgtttaggatgttcttcatctgctggtgcaggaagtactccttctgctgctggttgatgtcctcgcgtgtctttgactgaatcttgttctttatgctggcgagttgaatctcgcggctcaggatagacatcagactgatggcgcgcttcttcagagaaggctctttgagcagcgtaatcttgtcggcgatagggaacagaaggtttgtgcagatgaagttaatcatcgtcttgcttctgtcgtcggtcgagtttctgatggcgaaggcaatctcaggattgttctgtgtctcctgaatgtatgtgatggtgcgttcgcggcagctgtcgaacacagccttgtattcgtcctcgtcctcgataggctcttcgttcttgttcaccaccttgcctctgaggaacggctctgtggctgtcagttcctgaagttcaaccgcgctgtaagcctgaagtattacggttgtggagttgtcgggcatatcgagtatgcgaagcaccttggcgagcactcctatggtgtacagatcgtcaaactgcggttcgtctgtatctggtgatttctggcagaaggttgcgatgaactcgtttgtcttttcagccttctttacaagtttaagtgtcgaagggcgtcccacggttaccggtgtcaccacgccgggaaagagcaccatgttgcgcatagggaggattggaacctcgccttcaaagtcaaagttggtagttctttcaacatttattgctccgtctgatatgatggaaatgcttgctggatgagagtccgattccatctggaaaatatcgtcaatcaatttcttcataattctggtatagaaaatacttaattttgatttctgccctcgacaagggctgagaaatgcggtgcaaatgtagtaaaaacagaagaaataataatatttttgtgcgtgaatttaagccaaagtagtaattttgcacataatttattgtcttgcaacagcatgtctaatagttttttcagattcaagaagtttacggttcatcacgacaagtgcgccatgaaggttggaaccgacggtgttctgcttggcgcgtgggcgcggattgacggcggcgagagcgtgctcgacgttggcacgggctcgggactcattgcgcttatgatgatgcagcgcggcgcacgaagcgtggtaggcatcgacatcgaggatacggccgtagaacaggcgcaaataaacgtggggcagagcatctggagcaattccgttaggattgagaaagccgatttcgcctgtttcgcgacagatgagaaattcgatgtcatcgtaagcaatccgccgttctacaagaacgctctttcgtgtcccgaccctctgcgcgacagggcgcgtaatgccgactctctgccgttctgccaacttgccaagaaagcagccgtacttctttccgacggtggcagactgagtgtcatcgtgccggccgaaaatgctctcgactgcatctgcgaggctctttccgaagggctaaggctgagccgccgcctcgatgtcatgggtagcgtgaggaaacctgccaaccgctcgcttctcgaatttgttaaaaatcccgaacgaatcccgaacgaatcccgagagatgagcatacgcgatgccgacggctcttattctgccgattattgccaacttacggcagatttttatctcaatatagaaaaaaaacactaagtttgcaatccgaataattttaacaactgtttatgtacgaagagaacgcaaacgatttgttcaagttccgcaagtttatggccgatgacgacagcgcggtaattgacgagtgccatcgcgccgccttggacaaactgcacactctctttcccgaaaagagagtaacgacctacgataactgtacgattggaatcgaaaccgacagtctctactccgacacggggctcgacatttacgagttgggcgttgtagacggcgaggtgtatgccatgcgaaacactcgcgatggcgaagttataactttcagaatataaagcagatgaagaaaatattgatggctgccgcagcggtggcttttttgtgctcgtgcggaggcggcaagggcttcagactgaagggaagcatcaagggcattgagcagggcgaggtttacatctacaacgccgagggacttggaaaggggctcgacacggtaatggtaaacggcggctcgttcgagtatcgcgccgagattgaacagcctacttactacatccttgtgttccccaacaaatacctgcaggttgtgtttgccgacaagggcgcgagggtatctctcgaaggcgacggcagcagcctgaaggatatgcagatttcgggcgacaaggagaacgaacgcttctcggatttcagaaaatcggttgccagcatcgacgagtcgcagattccggcaaaggcagaggaattcatcaagaataatccgacgtcgatggcgagcatctatctggtaaacaaatacttcatcgaagtgcccaaggccgactggggcaaggtggaaagtctgctgaaggtgataaagggcggacttccgaagaatgcgatggtagaccgtatgctctctaccgccaaggaagcgcagcggataaaggtgggcggaaaatgtccgtcgttcaagattacgacgaaagacggcaaaacgctaacacagagcgacttgaaagataagattacgcttataaccttctgggcatcgtgggatgccgatagtcgcacactcgagcgcaatatccgaaagctctacaaaaaatatccgtcgtctaagttgcagattataggcgtcagcctcgatgtggacaagcagatgtggcgcaatgccgtccgctacgactcgcttacatggaacgagagttgcgacttttcacactacgagaaccgcatggtcaaggatttcgtcgtaagcaatctgccgtctaacttcctgataggcatggacggaaagattatcgccatgaatctcctctacgatgaactggagaagaaactcgatgaagtggtaaagtaacagaggaattttattttaatccatctgaagtagagtctgtaaaaatgaaaaaaatactttgcttgctcgccttggtcgcctttgttggcacatcttgttcggataaacggaaaaaaaacgaagttaaaggtatttcgcatagagagtcaacgaatcttctacacaaagccgcctgtttgatgccatatttgatattcataatggctctatggacggtatcagcgacgtggaagccgatatttgggcaacaaaagttttgcaaagtcgttgaattttgatagctttgccaagtccgaacagtacgaagatgtttgtttgctgcagataaaagattcagcattaacggatgctgaatacaacgattatttacaacaagaatacaatttttactatgaactatgaacgagaaagagaagctgagggaggaaattcacaaggcaacgcagtattgtctggagaacagactggtaagtccgaagatgcagatagaggcgcacaagaacagggaaggagcacagaagatgatggcacactgcatggcggtgtatcagaagcacaaggaactgggcaaagtgaaggagtagaaagcaagcaagaaaaggggtatcttgtatcggaagagagatatgccgagctgaagaagcgacttcgcgaaaagctggaacagatgaacatgggcgtagaccctgagtctcttgctattaaacccaaatcggtcattagaaaaagtaagtagcaaaatgtaaatcgtcgattctgttatattgcagattaacaaaagaaatccggatgcaaaatcatttcattatgcaataagatatcacaagaatggtaagtttgagtcggcagacaaagagtgggacccgctgccagcagagataacgagcaataagaatcttatacactatatggattcttgcgtaagaattgacaaaagggtagacttcattcaattctacagatgtgtgtatttctgataggcaaggacggtggtttagtaactgatttatcgtttaatagaaaggcagcacaattctatatttacatatcttgttttgtgctgttttatttttggctaaaaaagagattcagggtatgtttgttgttttcttggtagtattagcaattgctgtctatttttatttcccgaataagggaaagagggcagaaatgatggttcagaacaaactgaacaacttgcccgacgaatacttctcgatatataacgctctcttcgagaataacggccgttccacgcagattgaccatatcgtggtttcgccatacggcgtgtttgtcatcgaaaccaagggctacaaaggctggatatacggcggcgagaacggggaatactggactcagaacatatacggaaagaagacacgtttctacaacccaatcatacagaacgaagggcatgtgcgtttcttgtcttatctgttgcgcgattttggaaatattccaatcattccaattgtcgtgttcaacaacgaagccactataaagaccgagttcgaaaaccatatcgtagtcaacagaaagaggctgaagagagccatccggcgctatcgtaacgaggtgctgagtgcggaagttcagaagaagataatagacgtgatagaaagtaattcacgcacaggctcttcggccgagaggcatcatataaaaaacgtcagaaaccgtgagcgacagtcggttagggatgtccgtaacggaaagtgtccccgttgcggaagcgatttggtgctccgtcgcggtaaatacggcgaattctatggctgttccaattatccaaactgtcgtttcctgataaataaaagggatgtgtgaagaggataataaaaaatccctccgaagagggacattaggtttacaccttcggcatatagccttattgtgataagatgtagattaaaatcttgttgcaaaaataatcagaatatttgtttttgcaataattcttcttatttttgtgctaaataatcagaaaaacatgagaaaaagaatacttggtcttgatacaggtacaaatagtcttggatgggctgttgttgacaagaacagcgacggcacttatactttggtagacaaaggtagccttatttttcaggaaggcgtaaaggatgagaaaggtaatggtaacgaggttagtagagccgcagaacgtacctcttatcgtgctttgagaagacaatattttcgtaggagactgcgaaaaatagaacttctgaaggtcttggtaaaacacggattatgtcctacgctttcggaagaggatttgaacctgtggcataccaaaaagatatatcctaagcgagatgcctttatggagtggcagcggactaacgagaactcggagagcaatccttattactatcgtcatgtctgtttgaccgaggaactcgatttgtccgacgaacaagaacgattcattcttggcagggctttgtatcatcttgcccaaagacgaggcttcttgagcaaccgcttagatcagagcgaaggtgaaagcgaagatggcgatgtaaagtcgggaatttctaatttgacaaaggagatggcagccaaaggatgtgagtatcttggcgatttcttttataaactgtatcgggaaaagggtaataccgagcgcataagaaccagatatacagaccgcaacgcacattacaaaaaggagttctatgcaatatgtaaaaagcagaatcttgaagcagaattggtaggcgaacttgaaagggctttgtatttccaaagaccgttaaagtcgcagagatttggtgttggcaaatgtacgttcgaaccaaaaaagcagcggtgtgcagattcccatccggcttacgagagattcagaatgtgggcttttattaataacgtaaaagttaaatgttctgccgaccctgatttaagacctttgaatgaggaagagaggaagattgccgagcaagtattctatgtaaagggtggcagaaagagcaagacaacatttgattttgaagatattgccaaagccatagctggcaagggcaaatatcagtacataaatgatgctggcgataaggagtataagtttaattacagaatgtcgcagggagtggcaggctgtcagacaatagcagctcttcgttctgttttcggagatgattacctgcactctattgctgaaacatatacaaaggcagacaacaagtcgcttgacgacatagagaacgatatttggaatgtgctctatttcttttcgtctgaagaaaaactgaaggagtttgcggttaagaacctgcaacttgacgatgatttggctgctaagttttcaaagataagactgagtcgtggctttgcatctttgtctttgaaggcgatacgtcgcatattgccgttcttggaacaaggttacagatacgatagtgctgttttgcttgccaacgtgccttatgtgatgggcgacagatggaacgtcgtgaaagatgaggttatggcaaagatgaacgaggttatttataattacaatccaaaggatgtcaatcttaacaggactcttgaatgttgcattaaggatatattggaagatgatttcaacgttgaggcatcggatgtttgccgtttgtaccatccttcgatgattgacgtatatcccgacgcaaaggaaatagatggagtcttgcagttgggctcgcctaaaacggattctgtaagaaacccgatggcaatgcgctcgctgcatgagatgcgaaaggtcataaacacgttgctccgaaacaaaatcatcgaccagaatacggaggttcatgtagaatatgcacgcgaactgaatgatgcaaacaaacgaaaggctttgtttgcgtggaataaaagtcagaacaagttgcacgacaaatacagggacgatattataaggctgtttaaagaggcaactggcaagactattgaaccaacaaagagagatattttaaagttcaaactttgggaagaacagaaccatatatgcatctatactggcgaagaaatcggtattgccgattttctttgcaagaatccaaagttcgatattgagcataccgtgcctcaaagtgcaggcggagacagtacggaaattaatctgactttgtgtaacagccgctttaaccgcgaggtgaaaagaacaaaacttccaacacagttggctgagcacgaagaaataataaatcgcatttctgagtggaaagataagatagacgaattgtcaaagaagatagaccgtttgcacactaacggctctatgacaaaggagaaaaaggatgcgataatacagaagagacatttgctcaaaatagaaaaggactactggaaaggcaaatacagccgtttcactatgaccgaagtgcccgaaggattcagtctcagacaaggggctggcatcggtttgatttcaaagtatgcggctttgttcctaaagtcgttgttccataagcctaacgaccgcaaccgcagcaatgtgcgaacaataaaaggacagataacggcagagttcagaagactgtggggcatccaagacgagtatgaggcaaagtcgagagacaatcatgttcatcattgtatagatgcggtaactattgcctgtatcggggctgaggagtacagccgaatggcaagtttctatcatgacgaggaaacttacaattgggacaagagtggcagtaaacctacgtttccaaagccgtgggctacttttgccgaagatatgaagaaacttaaagacgaggttgttgttgtgcacagtacaaccgataatatgccaaagcaaggcaagcgcagaataaaaacatctgttggtatggcttatgcgcaaggcgattcggcaagagctgcattgcacaaggatactaattacggcgcaatagaacgtgatggcaaaataaagtatgttgtcagaaaacaacttgccgacttaaaagaatctgatatcgaaaatattgtagatgaggttgttaaagagaaagtaaggcaggcagttaaggaaaagggactgaatcaggctgttgtcgatggcatatacatgaatgagaaaaagcgcatacttataaagaaagtaaggtgcattgttccaactgttaccaatccgcttagtatacgccatcaccgagatgagtcgaaaaaggaatacaaacagcagtatcatgttgcgctcgactctaattattgcatggcaatatacgaggggcgcgttaatggtaagatacagagaaagtatgaagttgtaaatatgcttgatgccgccagattctataggaaaagttcaaaaaaagtagggcatagctcaatggttcaagaagaaaagaacgggcttaagtacagatgcaaagttatgtcgggcacacatgtgctgcttttgcagaatgatgacgaggtgattgatgttaccgacaaaaaggttgtggcagcaaggctttactatgtggcaattattagtgccgacggaagactgcttttgagaaaccatcaggaagcaagaagagctggagacttaaaaagtgaaacgaatgcaaatgaattcagtcttacgagtggctataggtcgcagataaggtggagtttatcaaactttcgtgctcttgttgagaattatgatttcacgatagacaaactcggtaatatacggttgataaagaagtaaggggcacggttgggcgaacgtgaaaaaatagaattgccacctttgaattttgaaattattttagtatctttgtcaagatttacatcatatatcacttcttatacaaaaggagtatgcttaaatgcttattttaaagcgaaatataaaatataggttgtggtttgatgtagattaaggattagtaacaactcttattcgtcgacttgtgcgcaatgtgttgttgtggtttgatgtagattaaggattagtaacaacctgaacggaacaatagttacagatgcgttcgttgtggtttgatgtagattaaggattagtaacaactgtttcaattattttaatatctttgcaaagttgtggtttgatgtagattaaggattagtaacaacgggatttcagcccaagaaatgagcgaggggttgtggtttgatgtagattaaggattagtaacaaccggtatgcgttcgtactgccttgcagggtcgttgtggtttgatgtagattaaggattagtaacaaccgtccatcccagtagaatactggtctatgtgttgtggtttgatgtagattaaaggcaagaaacttgtttctattgtgaacaatgcaaaaatgacacttggcaaacaatccaagtgtcattttgggtatagttgcaaatctgtgttttcttactgcggaaacctcttcatgttttcttttcccatgtcgtagccgctgatgtcgtagcgtccgttgtctgtaagcttgtaccacggcgagtttgttgctctgtctactactatgtgaatctgctgcgcaggcatccagctttgtgccaccatgaaaatcttttcgcctttctggttcacagccatatccactattgttaccacgtggccgtaaaacctctcgttcacgtaaaccaggcagtcgcccaccttcaggtctttcggggctacaggcttcatctctttgcccatcgacgtgctgttgcagtaagtaaacacgttgtcgagatacttgcggaaggtggcatacgagtacgagtgctttctctgctgcgcccatgtagtgaatcttagaggctttccgctgcccagcgcggtgaaatatatgcggttgtaagcctttatgctgtacagatattcggcccacaggcgcatggcggcatcggcacattgctgcaaatccttgtcgcccacatcgatgtcgagtacggcgtaggcattctgatagtttattatttgcccatcgaacgtgtgaaccgttctgtcgcccgtcagtttgatttttctgaggaaattgccgtatccgtcgcacttcacccttgtgtatccggcgggaacgggaatctcgcctatggttttctgtgctattgctgataaaggactgcacatcaatatgatgataagtaaatcttttaatctcatggttcttattccgttggttaatttctgcaaaaataagaaaaaatcgcaaactccctatgcactatgcgcggaagtttgcgactgctctaaatataattggttgtttgtgtatatcaaatactctcgcttatcgactggagcacataatcgagaatttctggcgtgtgagtctcggagataaagttgccctcgaactgcgacggacttacgtatatgccacgctgaagcatgttattgaagtagcgggcaaaacgcttttggtcgctgcgctttgtgtcttggaaattgcgcacctcgctcttgttgaagaatagggtgaacatagagccgcaatggttaagctgaatatccttgccagcgataatctctttcaggcggctgatgaaacggtcgctcttctcatctagctttttgtagaagtcgggatgcgagagttgtgtgagcgtctctattccggctgccattgctacaggatttccgctgagcgtaccggcctggtatacaggaccgtcaggagcaagaatcttcatgatgtcggcacgtccgccaaaggccgctgctgggaatccaccaccaacaatcttgcctacggtggtcatatctggcttgataccaaagagttgctgagctccaccacgcgacagacggaatccggttatcacctcatcgaaaatgagcagactgccatgctgctcagtcacttcgcgcgcagccttcaggaaatcgagcgaagggcagacaacgcccatattgcaagccactggctcaagaattacggcagccaccttgtcgccgttagttttgaaatagttgcgcaaggcatcaatatcgttgtacgggagtacggctgtgtattttgtgaagccttcgggcactccggcagacgatgcgttgctgatgttagccacgcccgagcctgccgaaacaagcagatggtcggcatgaccgtgatagttgccctcgaacttgacgaggatgtcgcgccccgtgaatccgcgagccacacgtattgccgacattgttgcctccgtgccgctatttacaaagcgcagacgctccatcgaaggaattgcctcgcgcaccttctcggcaagtattgtctcattctcggtaggtatgccataactactaccagtatttatagctctaatggccgcactattaacgcgatcgttgcagtgtccgaggataaatacgccccacgacatgcagaagtcgataatcttgttatcgtcgatgtcggtaatatatgcacccttcgcttctttgacgaaaagcggcgttgcgccaacgctcttgagcgccctaactgggctgtttacgcctccgggaatgacttgctgcgcacgttggaaggcttcggctgattttattctttcgtttatgcccatttctgcatgaattctttagcgtaataagatatgatgtacttcgctccggcacgtttgatagctatcaaactttcgtatacaacgcgctgctcgtcgagatagccagcctttgcagctgacttgagcattgaatattcgccgcttacctgatatgccaccattgggatattagggaatttctgaacgccgcgagctatgatgtcgagataaggcatggctggcttaaccatagtccaatctgcaccctcttctatgtcggctgcaatctcgtcaagtccttggtcgtgagtgcgatagtccatctgataagtctttctgtcgccaaacgatggggcagagtcggcagcatcgcggaacgggccatagaaagccgatgcgtatttagcagagtaagccaaaatcttgcacttgtcgcgcaatcctgcctctacgagtttgttgtgcagagcctcaatctgaccgtccatcattgccgacggagcaacgaagtcggctccagccttggcatgaacgtaagccatctgcgccagaagcggaagggtagaatcgttttccacatcgtggttgtgaagcagtccgcagtggccgtggcttgtgtactcgcacaggcatacgtcggtaataacgataatctccggaacggcagcctttatcgccttcacggcacggcaaaccaaggcatcctcggcatatgcaagagtgcctttctcgtccttctggctgtcttcgattacgccgaaaagcagcactttgtttatgccgagcgtgtaaatctcttttatgtcggtgatgagtgtgtcgatagagaaacggaagattcccggcattgatgaaatctcatctttcacgccgttgccctcaactacgaagtaagggtaaatgaagtcgtcgacgctgattttcacgtcggcatattggtcgcgcacatcctgcgacgtgcggtaggttctgaaacgtttaaattgttgcatttttttatgttttttgttgtcgatgcaaagatatgaataataggcggtgtggcaaatatttttttatcatcttagtccaccttgcacaccatcagatactcctcgtcgttttctgtaatgacctcgaagccaagttgcttgtacattctgtaggcgtaatttgttttctgaacggatagcgatacctgcgtatagccctcgtctttaagcagttggagcatctgctgcataaggcgtgtgccgatgccttgcttgcgatattgcggatagagcgcgatggcgagcgacggcgtttggttgtcaatgtgtccgtagtcgttcattatgcgaacccaaactgcgccgacaatcttcccgtccgtttcggcaaccagacagaagtcgcctttgtgtttgccgaagtcttctacatatacttgtaaatcaggctttttgatgatgtctctggatggcggttcaatgccttcggggataaaaatcgcttcgtagagaaaatcgtcgagaagcgggatttcgttgtcttttatctttctgattctgcaagtcataagttcttccagtcttttctgtgttattgcgccgcgcgtcacaagctcattattttgtggaagataaccgtatatcttgacgaagttgtcaatcgtgctgggcgatgtgaaaacaatgcggtcgatggttgtgaggtctattttcctgacatttttcggcatctggtttatgtaggcaacaaccgtagagacctcgtagcccaaattccgcagaccttcgggtatgatgggcagcgcgatgcttgagcgtggaatcagaacctttctgccgccaccaagttgctcgaacagacggattacgccgtaagaatcgtccacatctggcataattacatcagcgatgccgaatttcttcaaggcttcagccgtagtttttcctatcgctactacattcactccagcgggaatgtgcggctcgtagtctgcttcgaaccagtattttacggcatatctgctcgtaaacagaatatagtcgaacttagctgcatcggccacggcacgccgcagagcctcgccatcggctgacggaacaatctcgatgagcggagtgtgaatgtactcatcgttgggcggagtgagacctgtaaacaacgttgtcatagaatgttgtcttttgcaaacatcttttttagcgcatcgttgccttttcgggcggtgatggcgagccgtccttgcatagggtgcgtctcgaacggcagaatctcggtaatctcgtcttccatgcccagtcttttcagggcgcaggtggcaacgatggcagaatcaatcttaccgctccgaacctgagccacgcgctcctctatgcagccgcgaatgcctacgattttcaagtcggggcgcagcttctgaagctctgccttgcgcagcggcgaacttgtgcccacggtgcttccggcaggcagactgagcagcggcgtgtggtcgcggctcactagcgagtcggtcttgtcggtagcctcgtacaaggctataacctccaatccgtcaggctgttgctgcggaaggtcctttgccgaatggatagcgatgtcggcttcgccgttgagcagagcctcgtcgagttcgcgtgtgaagatgtcgtcgggagcctcaccgttcagaagcgaaatcttcttgtgcgtatcgccgtacgacttacacaaaatcgtttcgaactgaatttcagggaaacgcttctttatctcctcaacctgaatctgcgacagacggctgtcgcgcgcaattacctttactgtcttgctatgttgctttcggcgttccataatctcctgaagttcatctatttcctcttcgataagttgttcagccttcttaacctcgtcttctcttaccgagatgttgctctgcacctttcgttccacgttgtgaaggttgtaaagtgttacgttgctcatctgaccgatgcgagggtcgatgtcgcgcggaaaggcaagatcgaacgccacaatgttgcggtctgtcggcatttcttctttaagaacaaccacgtcgggagccgaagtagcgcaaatcagaatgtcggtaaacttcagaaattcctgcttgttgtatagcgagcacgcctttatgtcgtactgctgggcgatgtcagccgccttttgcagcgttcggtttgcaagcagaatatgctgtgctcccttgtttttcaggaactttatgatatcctcggtcagcttgtttacgccgattattgttatctgcgcgttgcggaagtcgatgttctgttgctcaattatctcgattgtggcgagactatggctcaccgctccgtgcgaaatctgcgtctctgttcgcacgcgcttgccaatctggagggcgcactcaaacagtttgtgcattccggcagggagtttctgctccttgcgtgccgtgagataagcctcttttacctgtccctgaacggctctttcgcccacgatggcagattcgagtccgcacacaacgcggaacaggtgtcgtgccacatcctcgggaatgtcgccgttgccgtagtacagttctattcggttgcaggtctgtagaaagaccgatgctcccttgtcatccttgttaatctttttgaaatagtcttcgcgctcgccaagcgttgtgttgtggtggctgattgactcgtattgtatcattaccagtttgtttcttttatccagtttgtcaggaatttagcgttctcgaaaggcgtttctgccaatacgccatgtccaaggtttataatccagtttcggtgctctgcaaagaaaggcttgtacctctccatagtcgccgcgatgtcgtttttcggtgcgagcagcaggtgagggtcgatgttgccctgcagtcccacctcggggtgaacaatccgtcgtgcctcgtcgagcggcatttgccagtctatgcttacaaagttgcagatgtcgggcgttatgcttttaaaccctatgccgagtcctttcgggaagaagattacgggaatgcccatctctctgaccgccatacttattcgtgaaactgcgggtaggaaatattttacataaatatcggcaggcagaagtccggcatgactctcgaaaatctgaaaggcatccactccgtgctcaacctgtctcttggcagattctatagtgagcgatgtcacggcatccgtaagcctcatcatctcctcgcgattggcatagaagaagtgcttcacccttggaaatgaagcctgagtgcttgcgccctgaagcatgtagcacatggttgtgagcggtgctccgcagaagccgatgagcggtgtgtcggggtgctgctccttaaagatgtcgatagcgcggtagacgaagtttagcttatccggctgaacatcaagcaactgcgatggcttgtctgatgtgtacaggggcgatgagaataccggacctttctctgtccagtctatgttcatgcccattgccacaggtatcgtaagaatgtcgctgaacaagatggctgcgtctactccgaggtcggcaacgggcagaaatgttaccttggctgccaattcgggcgtagacatcagttcgtggaaggagtgctccgcgcgcatctgcatgtaacttggcagaactcgtcctgcctgcctcatgagccacacgggcggacggctgcacgcctttccgttcagggtatcgataaaaatgttagtcatctgatagaattttgtttgccacgtcggttgcctgttttattcggtgcgccatgcctattccgtcgcgcaggtttccggcaatcgtcagacctttatattggttctgaaccttttctatagcctcgaaccgttcgcccgatgttatctcgtactgcggaatggctctcttatgtctgaaaatcctgatgaaatcgggttttgccgatgccgggaatttcagcattgtgtggaaatactcctcgacgagggcagttatttgctcgtctgagtagtcgagcatctcggcatgcttcattccgccgataaagtagctgaagagtgcgccgccttctggtgctctgccttcgaagcaagccgacgggaacaggattccgagaaccttcttgttctcgcgcgacggaacgagtccgccgaaagcctgaaacttctttcccttggtgtctttcacgcctacgctcacttcgacgataggcgagtagttgaggttgtttagtttgctcattgtctcgtcatcgacgaatggcagtagttcgggcaaagaatatgctccgcaggttgtaacgaccttgttgcatgttatctgctgcttatttccgtcggcatcgctaaatgagatgtgccagccgtcgccctcgggcatcacttttatgtccttcagtccgagcaagatacggttgccgagatagtctgccatggcttcggtaatctttcccagaccgcccacggcagagaatactttctttgttgccagtttgtcgcggtcggtctttggctcgcgcgcctttgctattgctccgcgtacaaaactgccgtagttatgctcaagattatatagtttcggaagggcaaagcgcgttacgagcgcatcggggttgccggcgtagacacccgagagaaaagggtctacggcatagtttacgaacgatttgccgagtcttcgtcttgccagcgagccaaccgactcgtcgggatttgtgcccttctttcgccacggctcgccaaggattcttagcttgtcggcggtggtgaagagtggcgtagtaattgcgctgaacagtcccgacggaagggcgcggaatttagatcctttccatatcagacggcgtttagacgatgccggggctatctccaactggcatttgccgcccgatgtttcctgaaggtcgcgcatcagttctgccacttcgggcaccgatacaacaccggtgttcggtccgctctcaaatacgaatccgttttcagcgtgtgtctgaatctgtccgccagccttgtccatgcgctcaagcaccgtcacctcgcggcctttgcacgcaagggtgtaggctgtcgttagccctgttagtcctgctccgattactactatgtcggttgtcatgtcttttatattggttttgagaatgttttgtcggtgttttgcatcagagggtcgagcagtgccgccacgttgcgcacgagcggcgaactcgcctctgtcatctttatcgtgttttcttttatgtttattatcccgtcgttctgcatctccgcaaggcgttctgtgtcgaagttcaccgcctctttctgttcggggctgagagttacggcatagttgcacatcaggttgtctatagccgtgcgtatcaactgctgttgcggtgtcagaatgtagcccttctttattggcagaatgccgtcggaaatgctctggatgtattcgtcaatgtcttttgtattctgtgcgtatgccgtggcaagctgactgatgcctgtaactccgaaggcatagacctgagccgtggtgcgcaacgtgcagtagccctgaaagttgcggtgcagctgacctttgttcagcgcggtgtacagttcgtcgtgcggctgtacaaagtggtccattcccactctcacatatccggctttttgcagaagctgcgccgaagtctcgaacatcgtttcttttgtctgaaccgatggcagaccgtgcttctccagaatgagttgctgcttctttagccatggcacatgagcatagctgaatgtcaccaatctgtcgggttggagggcaatggcgcgctctatagtttgtccgaaactttcgactgtctggtagggcagtccgtacagaaaatcgaggttgatgttggccttggcatcgcgcagcaaagcgaatatctcttccatcggttcgagcgacggacggcggttcaccgtcttcagtaccttctcgtcaaagtcttgcacgccgatgctgaaccgtgtgaatcctgcatcaaccaaattgctccagtcgttaagcgtcaagtatccggggtgacattctatggctatctcgggcttatctatcgtgccgaacgtgcttgtcagatgttcgttgagttcctttatcgcctttgctggcattgccgtcggactacctccgccgtagtgaatctgcgagatgcgacggtctttgtctatatacggcaacagaaggtctatttccttgtgaagtgcgtcgatatatctttcaaccttcgccccgttgcccatggcatacgagttgcacgcgcagtagtggcacagatgc

SEQ ID NO: 1648 - DNA, 23648 bp, synthetic construct
  source 1..23648: mol_type = other DNA
  misc_feature 1..23648: note = Synthetic
caacctaagcagccgctcgccccgggagaatacattctggcatatcttttgcagagtccaatcggcgaacttcaagacctcctcgtctatccattctgcgtaggaaaagagtagtcagtcagtcaagtcgttcaacttgacacgtcaaaatgcccaacttgacacgtcaaaatgctcaacatgacacgtcataattgctaactacacacgtgaacttttccctcttcactttaggcgggcattatcttattatagacttatgctatccctaaattgataaagtaggcaatttaacctaaaaaattagactgattgtttcgtaatgtggaaacaaatcattacctttgcatcgagattataagaattaagtcttatgcataggaactgtcccaaggtcgtttacatggaggaagctctcacctttatcgagagcttgccaagggcggcaggtgataaattgctcgaaatagttcaccgagttgagcgaggcgagcgtaatgctcaactgttcaaaaagcttgttgggagcgagatatgggagtttcgagccctctccgacaggatggcatacagattgtttgccttttgggatacagaagaggaaacgttggtgattgccactcacggcattatcaagaagacacaaaagacaccttcgaaggagattgccaaggctgagagaataagacaagagtatttcaaatctaaagcaagtgagaaatgaagcgagtaggaaagtttaagatgtacagttcggatgaagtgcttgacaagcatttcggcaaagtgggaactcctcgccgtgatgagtttgagcggagcgtagcagtatcggttcatgcttatgagttaggcgaggcaattaaaaaggcaagattgcagcagaacctcacccaagaggagctgggtgagcgcgtcggtgtgaagagagcacagatttcccgattggagaagggttacagcatcagcattcccaccatgagcagagtgttccaagcacttggtgtggcctccgcatccctcgatctcggagcgattggtaaagtatctctttggtaatacaacatcttttgcaaaccaaacaagcaagaaatggaagtcaacatacctgaattaaaactccaagatgctgcgagtcagggcacagatgctttcttgaaggtcgttcacgatgccattctcgaggcgattggtggcgaggtgaatgcggagactttgccgctcttgaatggcgagcagacgacgctgttggcctacttcatcctgcgggaagaggtgatggacggcggtttcatccagctcattcacaatggctacggcccattcatcttcctcaatccctttgcgaaggcaatgagactgtggggtgctcacgagttcagcaagctcgtttacaagggcaggaaactcttcgaactgcacgaaaaagctctcacagccgattgtagcgacgaggaattcatggctctcttcgagaagtatcctgaattcgacgacctcgacgacgagttcatcgagatggaggaagaggtgacggacctcatcgctcactatgtcgatgagcatctcgagcagttttgctcaattcataattcataattcatagttcacaattgcttgggcggtagcaaattcttcacttttcattcttcatccttcactttatatatatggcaaagacgctgattcccaacaagggtaaagacataaacatcaagaacaaacgagcagagttcgactatctgcttatggataagtacacggcaggtatcgttctgacgggcactgagataaagagcatccgcaagggcaaagcgagcctggtggatacttattgctacgtgataggcggcgaggtgtgggtcaagaacatgtatatcgcgcactatgagcaaggttcctacaacaaccacatggagcggcgcgaccgcaagctcctgctcaaccgcaaagagattcgcaagatacagcaggcggtcaagtcgccaggcttcagcatcgtgccgacactcctgtttgtcgatgagaaaggacttgccaaactcgacatccacatagcccgaggcaagaaagaatacgacaagcgcgagacactcaaagagaaagaggaccgccgcaacattgaccggcaattcaagaagaactattagagtcaggtttcctcattaactcccataattcccataactcccataattcccataaaactgatttgatgcgcgaccgttacaaacagataaggaacggagatgagctggcagaattgcttgctcaaccagaagaagagctgaggcgaatagcctttcagaatgttgacctcacgacgctctcggagctcgcactcgctcatgtttaccgcgaatgccttttcctgagctgtcgtttgccgatgggactgaagcgtcagtcaagggattgcctcttcctgcccaatatgggcgaggagtttggctttcccaatcacctctattcgcctgaggaactctatgatggattcaatcccgatgagcccgatagctatgagaaatgctacgacgggcgcgtctatcggcatttcctcaagaaaggaaaatatgcgaccgacattaaggagacgctggcgcgaaccttgcacgaccactccataagcgattgtctgcaggacttcctctcgcgtttcgacgagcataaacgcgtgggagtgatgggcggacacggactttcgcgtcttgatatcgcttataaacaagtggttctactgagcaaacgacttgccgaattgggtttcctgatgatttctggcggcgggcctggggcgatggaagcaacacatttgggtgcttggatggcaggcagaagcgaagaagaactgcaggaagcgttctccattatgagcgtcgcacctctatacacagataaactctggctctcaaccgcgtgggaagtgcacaatcgcttccccaaccttggctacgagagccttggcatccccacttggctctatggccacgagccctccacaccgcttgccacgcacatcgcaaagtatttcgacaacagtattcgcgaggatggaatcctcacgatatcaaagggcggcgtcatttacacgcccggctcggccggcaccttgcaggaaatcttccaggaagccgtgcagaaccattacctcacctttggttacgcatccccgatgatctttatgggaaagaagtattggacagaggaagtgcccgtttggccattaataatgcaccttgtagacacgggaagatacaagaaccttatcctttgcctgacggacgaggtaggtgatgcggagcaagtcttgcaaggaaaataaaagggcgcactggtgatgtgatgaaactccgaaaaacaggttttgagggttcgctgcctttgtaatccatctaaccataatgggatggcacgccattagcatacgaaacatttctcggtaataaaatgtaaattgatgagtatcccgatctaaccagtacgcccgtatgatgtctgcgtcttaaccactgtaagaccatttcggacttcaatgataatgcaaatttagacgtttttgtcttattatgcaaacattttaacaattttctttctcttagtttgtcattttctttatttcttcttaattttgttaagaaaaacgcagaaaaagcacttatgactcttaatttttcgatagaatacaggacagagtggggacaaaatgtggaggtcgagctttgcttcctctcttctgagggcaaaacgcactggcagcgcatccctctcgaaacagatgacggcctgatttggaaaggtttatacatgctgaaagcaaggagcagacagttccgatatacgtatataataacgtcttcttccaaatccacacccgaaggagacgggattgtgcgccgagaatgggatgtcgtgccccggattttccctgccgacgatgcccgcacctacttcttcatcgaccattggcgcgatgtgccggaggcgtcttattgctatacggatgccttcaaggtagcgaacggactcgacaggataccgtttgcctcggtggcgctcttccctcggacgttccttttccgcattcaggcgcctcaaatcgcacagggagaacgggtcgcgcttattggcgaccagcctgccctgggcaattgggatgtggagcgagccctgccgatgattccatccaacaacggcgagtggctcctgtccatcagcggcgatggccttcgcctcccgttccaatataaatatataatggtaaagaccccccaaccccctttagggggagaaactgccaaagttcgctgggaggaaggccccaataggcagagtcctcagctcccccttaagggggatggggggacttgtgtcgtggccctttccgacggccagatccgtctcgaagcaccgcattggaaggtcgccggccttgttgtcccgctcttttctctcaggtcggaaggcagccagggggtaggggacttcggcgacctcaaacagatggccgactgggctgcctcggtgggaatgcacgccattcagcttctccccatctatgatacgattcaagaaggcaaggaaaccgacagttatccctacaatgctatcagcgtacacgcccttcatcccatttatatcgacctccgccagctgcctctccgggacaaagaaaagcttgcgtccttccgggagcgctggcaaaagctgaatgccctcccggctctcgactatgtggaggtcattaagatgaagcaggaatacttgcatcttctctatgaagaagagtgtcagtctccaattttcaattttcaattatcaattttcaataaacaaaatgccgagtggctgcagccgtattgtgtcttctgccatttgcgcgacacttacggcacacctcagttctcgaagtggaagaagctatccagctacaatcgaagtgccgtgacgaagtacatcgacagtcattccgcagaagtcggctactatgctttcgtgcagtatctcttgcacaagcagctttcggaagcagccgagtatgctcacagccgcagagtcttcctcaagggcgacttgccgattggcgtcagtccctgcagcgtcgaggcttggcacgagccgcacctcttccacatggacatgtcggcaggtgctccgcctgatgatttctctcggactgggcagaattggggcttcccgacctacgactgggaacgaatggcggcagatggctacctctggtggaagcagcgtctcggcggcatggctcagtacttcagcgcctaccgcattgaccacatcctcggtttcttccgcatctggcagataccaaaaggcagtccgacggcccttctcggacaattctcgcccgctctccccatgagtgtcggggagatagaatcctatggaatgcccctcgtgcccgaactgttcgtggcagatgccaggcagcccgagctttaccatccgcgtatcggagtcatcggggagagtgtctggcgctcgcttcccaagtatgagcaggacgcgtttatccgtctctacgaggacttctacttccgcaggcacaatgatttctgggcgtcgcaggccatgaaaaagctgccggcgctcatcgacgccagcaacatgctggtttgcggcgaggacctcggcatggtgcctgcttgcgtggggcccgtcatgaagcaactgggcatcctcagcctcgagatacaggccatgccgaaggcttatggagtgcccttcgccaaacttcatgagaacccttatcgaagcgtcgacaccatcttcacgcacgatatgccgaccctccggctctggtggaaggagaatccggaacgcaccctattatattataataatgtattggagcacgacggcaaagcgccggaggagccctcgggatggctctgcgaggagattgtggcgcatcacctcaactcgccctccatgctctgcctcatcagcctgcaggattggctttcgattgacgagggtctgaggaacccgaatctcgaggcggaacgcatcaacgtacctgccaacccgaagaactattggtgctacaggatgcatctccccatctcgacactccaggaggcaaaggctctgaacgagcgtctgaggcggctcatcgagcgctccgaaagggcatgaagtccaagttgacacgccgtaagactcctcccgacacttcgcgtcgctcaacttgacacgtcggatagtttgcaagtacatgtagttgcaattgcaagttcatgtacttgcaattgctgatacgcgataaagcaaacaactatgcgtgctaagtcgggcttatgggcgtgtcaagtcgggctactatgtgtgctaagtcgggcttgtcaggctttcgtcttttaccttatcccgcgttcgttcagggctctaatgtagcggcgggcgttcgcgtagtgctccgaaagcgtccgcgcaaaattgtgcgtgcccgagaagtcctctttcgcacacatatacagatacggatgctccacagggttcaacacggcatcaaggccagcgatggtggggatgcggataggtcctggcggcaggccgtagatgcgatacgtgttgtagggactctcggtcagcaggtgcttgcccaggatgcggcgaagcgtgaagtcacctgtcgcgaacttcaccgtcgggtcggcctgcaacttcatccccagacgcagacgattgaggtagagacccgcaatcatcggcttctccccattgttcgccgtctcctcatcgacgatgctcgccagcgtcgcaacctcttcgcgagtcagaccgactgcctctgccttagccttcctgtcagccgtccagaagtggtcgttctcgcgctccatgcgctccacaagcttgtccaccgagatgtcccaatagacctcgtaagtgttcggaatgaagagggcagggatggtggcagtcgtgtagccgtgcgtctcgcagtaagagctgtcagtcagcgccccggcaatctccgcggaatcaaccatcaggctctgcgaaagcgcagaagccagcctgtccatcgtgcgggaattcgggatgacaaggttcatcggctcctgcgtgccgttcctcagcaagcggaacaactgcaggcaagtcatctctttcgtggcacgatagcgacccgtatgaggatggaaactcatcaccttgctgtataaatcccagcgccaaccaagttcggacttcgccttgacgctatccatcgagtcgtctcggtcaatgaaaatcaatctgccttcagcctcatctccgcttggcgcctttgccgacacagaatagaacacgaagaaagtaacccctgccaccaggactgccagccccgaaatgagccaaataaacctcttattcatcgtctttaatgcttatttgggtgcaaaaatacacattttctcacataaaacaaacaattttgaattttgaattttgaattttgaataatatgttgtacctttgcacccgcgtttcgccactatggctcagttggtagagcaacgcattcgtaatgcgtgggtccggggttcgagtccccgtagtggctcagaaaaagcatcaagagagcaatcttatcctttattaacggaagattgctctctttctttttatccctcgattcaatcattcattacattttaattattcaagtttcgggagttaatgaagttaaagaagttatagaagttaaaggacgataccatattaattcataattcataattcttaattcttaattcagcgcggtagcaaattcttcattcttcattctacactcttcattccttttgcccggatttggctgcaaaaagctattgtcctttaacttcccccaagcgagcaaagcgagctaacttcattaacttctttaacttccataaaaatcataacatcagaaacttcagttaattatatattaattacacgatgtttataattaattacacggtattatgaagaaataaacagataaaactatgtctattcgagcagtcttaaagaaaaaatccgtatctttgtcaccagttaacttagcattagcaactgatattatgaaaaacatacgttcatccttgtcaaaactcatttgtggattgcttatcttcaccacaggaatctgttcggcgcagaccgtgcctaatttcgtgatgcctcaggctgaggaagcgtttatgcgctacctcaactggaaaggcggtgaggaaacgcttgttttcccaattctcacggatgtgcacaccggatggtatagcgaccgaggtgaagcctacagacacctcggctatatggcagctacagaccggctcttcgggtacgacttcatggctaatcttggagatatcggtttgaatggaggagacgcccgcaagtcttcggaagccgcagacaaggttgtcatgcagactcgccagcagatgggattgttcccaggcgtatggatttacacaccaggcaaccacgattgggacggaggagccggacggcactactcaagccagttcctttcggacgctttccaaaagccaagcgagcgatattccaacggcaacctgcatatcgcagaaggcaaggcttacggctactatgacctgcccgaaaagcacgtccgcatcatcttcctgaacagccaggggacagagacacttggcgagaactactacaccttcgcaggcgagcagctggagtggctgattggtgtattgaagagtacaagcaaaggtacagatatcttgacattctctcactacatgccccatcccatagggcgctggatgagtgtgaaggatgccaagcggccaacatgcgaagtgctttgccatttgcttgccgacttcgtgaatcgccgaaaaggcggcgagttgggattggaatggaacttcaagcgcagcaagggccgacttgtaggcctcctgtgcggcgacacccattgcaatcggcatatcaaagatgatggcgtgaactactacatcactcagggccttggctttgtggaccctgctcagatgcttcccggtcagacacatgccaactacgaccttactgcctccctgtgtttcgatgtgatagccttgaaactgaaaagcaagcaggtgcattccttccgagtgggagcaggaggcaaggattacgatttggagttcacgtactaattttcatggcaacacttaactcccatgagcgtagcgagtttacttccatttttttacttccatttttacttccgaaagttgaataaggtaatatggaaatcgtaaaccttctggactttgcccgtcgtgagcagctgcgtgactggctgatggtcaatcatgccacgtcaaaagaagcttggattaccatcaatcgcagcaaacaacctcgtgaagatgccataccttatgttgatatggtagaagaactcctttgtttcggttggattgattctaccgtcaagcggcttcccgatggacgtaatgcccaacgcatttcgccaagacgcaaaggaagtcattggacgaagcttaacatagaacgctgcgccaatttgtcagcaaaaggattgatgacagaagccggacttcgtgcaatgccacaagaatcaaaggtgatttcgtgaaaacttcttctggtcaagtgcatcagaaatgatgccctgggctctctttccttttacccctcaatccaatacattttggcaataacgctgaaatgtcttttatctgcatgctgacatcatttatttgacaatagttcaaaaaaacatcgaaaattgttttactatattctataatttgctaatttagcagccaaaaacgatagttgtggtaaacaatattcctaatcaagactttgaacgactaaataagaatagaaatatatgagatgaaaaaagcccctccagaggagaggcagtaggaattcatccttcggcatatagccttattgtgataagatgatgaatgaattatccgatgcaaaggtatgagtttttggtgaaatgacaaaacaaattgataagaaaatgaacaaaaaacgtattttaggacttgacactggcacgaacagtcttggttgggccgtagtagaccaggaagagaatggtcagtatacgcttgtagacaaaggcgtcgtcatcttccaggaaggtgtaaaaatagagcagaatggaacagattcgagcaaagccgccgataggacgaagcatcgcgcccttcgcaggcagtatttccgcaggcgtctgcgcaagattgaggtcttgaaagtcctgatgaaatacggcctttgcccagccttgaccgaagaggatttgaagttgtggaagcagcacaagatttatcctaagaaagatgagttcatgctttggcagcgcacgaacgacaatgaagatgccaacccctaccattgtcgctattcgtgtctccgcgaatcgctcgacctacagaagcagcaggacagatacaccctcgggcgtgccctgtatcacatggctcaacgccgaggtttcctcagcaaccgcttggatgaaagcgaggagaaggagagcggagccgtgaagagcagcattgccgacctcaacaaggagatggaggcgaacggctgccagtatctgggtgagttcttctataaattatataaggaacgcgcgaacaccatacgcatccgcacgcgctataccgaccgcgagcagcactacaagaaagagttcttcgccatttgcgagaagcagcatctgcccgaggctatggtggccgacctgacacgcgccctctatttccagcgtcccctgaagagccagcggcagaatgtgggcaaatgcacgttcgagaaaggcaaaccgcgcgtcagcgactcccatccaatgtatgaagagttccgtatgctctcgttcctgaacaatgtgaaggtgcaaggcccgaacgatgacgaaatgcgtccgctcaacgcggaggaactgcagaaaatagattcgctcttttacaggaagactaaacccaacttcgacttcgaagacatcgccaagaagattgcgggcaagggcaaatatcagtggaaggacgacaagcaggccgacttgccctacaagttcaactaccgcatgagccagggcgtgcccggttgccccaccatcgcgcaactgaaggaaatcttcggcgaggactggaagaacggcattgccgagacctacctgcagaacaccaagaaggacggcacaaagaagagcctcgacgaaatggtaaatgatatttggaatgtgctcttcttcttcgacagcaaagacaaggtaaaggaattcggcatcaagcatctgcaattggatgaagaaaaagccgagaagttctcaaagatacgcctgagccgaggctatgcctccctctccctgaaagccatccgcaacatcctgcctttcctggagatgggaatgatatataccgatgcagtcttcttcgcaaaagtgccagccatcgtcggtcagagcctatggcgggaacgacagagcgagataagggaagacctctcctatgccatccggatggcgatgaaagagaagcgtcgcatagacgaagccgtgaaggactatctgcaggacaacttcgacttgaagcctggagcagcagaaatgctctaccatccctcaatgatagagacctatcccgatgccaagccgaacaaagatggcgtcgtcttgcttggcagcccacgcacgaatgccgtgaagaatcccatggcaatgcgttcgctccacgaagtgcgcaaggtcgtcaacaccctcatcaaagaaggtaagataggaccggacacagaggtgcacatcgaatatgctcgtgccctgaacaacgccaacatgcgtgccgccatcaacgaatggcagcgcgagcatgacagaaagcacaaacagtacgccgacgaaatccgccgcctctacaaggaagcaacgggcaaagacatcgaaccgacggaaaccgacatcctcaagttccaactttgggaagagcaagaccacatctgcctctatacaggcgacaagattggcattgccgacttcgttggggcaggcccgaagttcgacatcgagcacaccatcccgcaaagcgtgggtggcgacagcacgcagatgaacctgacgctctgcaacaaccagttcaaccgctttgtcaagaaagcaaaaattccgacggaactcgccgagtacgaggaaatcatggcacgaatagagccttggaaagagcgcatcgacgacctgacgaagcagatagaccgcatcagcacgcgcggcatttgggataaggccacgaaggataaacaaatccgaaagaagaacaagttgaagatagagcgcgactattggcaaggtaaatacaagcggttcacgatgactgaagttcccgaaggcttcgctctccgccaaggcgctggcatcggtctgatttccaagtatgccgccctttatttgaagagttatttccacgacacactacatcccgaacgtcgccaggtctacagcatcaagggaaccgtcaccgccgagttccgaaagatgtggggcatacaggaagagtacgagaagaagtcgcgcgacagccatacccaccattgcatcgacgccatcgtcatcgcctgcatcggcaagaacgagttcaatatgatgggcaagtaccatcgcgatatgtttgattttagtgaaggtaatggaccaaagccccaattcgaaaagccttggcccaccttcacacaagacctcaagcaaatctctgaggaacttcttgtcgtgcacgacacgcccgataatatgccgaagaaggcttcgcgaatgatagaggtgaacggcaggaaggtcgtggctcgtggcgattgcgctcgtggcagtctgcatcaggatacctattacggcgcaatcgagagggacggcgacatcaagtatgtggtgcgcaaatcgctaagcgccatgaaggaaagcgatgtggaaaacatcgtggacgatgtcgtaaaggcaaaggtgaagcaggcgatagcagaaaaaggtttcaaggatgctatggctggagacatttatatgaacgaggcgcgcggcatcctcatcaagaaagtgcgttgctatacgccttccgttacccagcccctcgacatccgccgccatcgcgatgtgagtaggaaagactacaaacagccgtatcatgttgccaacgacgagaactacatgatggcaatctatgaaggcggcaagatgcagatgataaccgcgctcgacgcagccaagttctacaagagaagtgcagacaggaacgattatccaacaattgcacctgaggaatataaaggaaagaaactcaagtatcttgttcggaaaggcacacagattctaatgttagagaaggatgaagaatccatctcaacagcaaaccccaaagaactgtttaagaggctctttacaattatggtgttagaaaaagatggcaggctaatgcttaagcatagttcggaggcacggcctgctacagaagtgaagaaactcttaacatacaatccttttatgctgaaagatgatacacgttcaattctgcgtgttagtttgtcaaagctcaattttctcgttgaaggatatgactttacgataacgcctcttggagaaataaaactgaaacattgatatgcttaagcagacattggtgtttaccaatccttttcggctgtccacgaagaacgcacaacttgtgattgcttcaaaggatatgcctgatgagtcgcgaaccatccccatagaagatataggtgtagtgattatagaagatcagcagatttctattaccatacctctattgaacgagttggtcgatgctggtgtcgctgtcattctgtgcgatagaaagggaatgcctcacgctatgcttcagaatatggacggaaacaaccttcaaggcgaattccttcgcaaccagatagaggttggcgaagtgcttcgcaaacaattgtggaaacaaatcgtcgaggcaaagataaagaaccagtcggccttgttggaaaagcaacatggcaatggctctattttgaagccattctatatgaatgtgaagagtggcgatagcgataacagagaaggaattgctgctcggctgtattggggagcactgtatgggaatgacttcgtccgcgatagagaacaagaaggcatcaacgcattgttgaattatggttatgctgtgcttcgtgcagcaacagcccgggcgttagtctcggcaggattgaccccatcgctcggcattttccatcataacagaagtaatgcatttcctcttgcagatgacctaatggaaccctatcgcccctttgtcgatgaagtcgtatatcatctgtgcgaggagggggaactggagataaacaaagaaactaaggcaaaacttcttggaatactgacatgtgacactttcttccataaagtgacaagacccttgcaaataggcttgtcaataacaatggcatcattggcaaagtgctatgcaggaaaacaaaagaacctttcgctacccatgctgaaatgagtgaagtccgtttaaacgcatataagataatgtggcttatagctatgttcgatttacctacaaagacaaagagggaacggcacgactatgccgtctttcggaaaagtctggaaaaggatggctttgtcatgcatcagtatagtgtgtattgtcgtttctgcgcatcattagaggcgagggatgtgcatgtaaggcgagtgaaatcctttatgcctggcaaaggcagattaagtataataacaatcacagacaagcaatactcaggaataataaacatttggggagaaatagaacaaaaagtacagaaaagaccagttcaattagaatttttttaataactttgcagtcgataagatactcatcattccacttcttataggtaaaaaagtgttctattgttctaatatcaaatagaatacatcatataggttgtggtttgatgatgaaatgagataagaaacaacaggtaagcgtggaaaacccaaagcattcttgttgtggtttgatgatgaaatgagataagaaacaacgaccatgtgcgaaacatggagaaggcacaagttgtggtttgatgatgaaatgagataagaaacaacaccccaacgagtaagccccacaccgccaccgttgtggtttgatgatgaaatgagataagaaacaactatataagtttgtcctgcagccaggctccgttgtggtttgatgatgaaatgagataagaaacaacggtctgagtttattccttccgacgtcattgttgtggtttgatgatgaaatgagataagaaacaacggcaacccctttgcccaccctacaaacccagttgtggtttgatgatgaaatgagataagaaacaactctatgctggcggtaaggaaatgcccgatggttgtggtttgatgatgaaatgagataagaaacaacccgcgacctgcaagcactttcgtggagcggttgtggtttgatgatgaaatgagataagaaacaactttcaaacgcatacttaagccaagacgagtgttgtggtttgatgatgaaatgagataagaaacaacgcgcggcgtctgcgtagctaacgattcaaggttgtggtttgatgatgaaatgagataagaaacaacgcttggcgatggggacgcgtttctttttgcgttgtggtttgatgatgaaatgagataagaaacaattcgatgtgaagaatatctgcagcttctgtggttgtggtttgatgatgaaatgagataagaaacaacaagagcctataacgatagactggattgggtgttgtggtttgatgatgaaatgagataagaaacaacacggaagccagatgacctacaacgagttcgttgtggtttgatgatgaaatgagataagaaacaaccaattacgcgctgttgtcgcttcgcaggctgttgtggtttgatgatgaaatgagataagaaacaacatcttttaaaatatactttgtaacatatttgttgtggtttgatgatgaaatgagataagaaacaacgaatagacacctttattcatagtctctttgttgtggtttgatgatgaaatgagataagaaacaacggaaactcccatcgggcttcatgctgttgcgttgtggtttgatgatgaaatgagataagaaacaacgcatggctggaacctgtcactatccttggtgttgtggtttgatgatgaaatgagataagaaacaaccgtacaccgatgctgtcctgccagaaggcggttgtggtttgatgatgaaatgagataagaaacaacagcgcaagagcagcagacctccgtcagcgtgttgtggtttgatgatgaaatgagataagaaacaacctgaacagcctgagcagcggcactctgagagttgtggtttgatgatgaaatgagataagaaacaacatttccgctacgaaggtacgactttttctagttgtggtttgatgatgaaatgagataagaaacaactcaatattaacacgctttcgaagttgagaagttgtggtttgatgatgaaatgagataagaaacaactgttcacgcagttcgcccaccttgcacgagttgtggtttgatgatgaaatgagataagaaacaacgagagccgtgtgagcagtcgcagtgtgcaggttgtggtttgatgatgaaatgagataagaaacaacacctttctcagaaacaccagctttgccggagttgtggtttgatgatgaaatgagataagaaacaactcaagaccggcagaaactaaatccgcacgggttgtggtttgatgatgaaatgagataactttctgtgtgagatgaaatacctgcataacgatttctttcatttccttgatttctgcgggacataaatacatacttcatggatttctatgtttcgggaaaagcatgtttttccctcttttattttgcgctttgcgaaataagtcgtaattttgcgccgcaattataataatatgtaagaagtatgaaaacgaaaaaccttattcatttctgttttttgacctttgcctgcctgctttcctcctgcactggcagctccgactacgaaagcgtgaaaggcgaccccatgcagacgcgtatctatacgctcgacaacggccttaaggtctatctctctgttaacaaagaggaacctcgcattcagacttacatcgctgtgcgtaccggttcgaagaacgaccctgccgagacaactggcttggcgcactacctggagcacctcatgttcaagggcactaagcagttcggcaccactgaccccgaggccgaggcaccgctgctggacgagattgagcagcgctacgaagagtaccgcaccatcaccgacgaggcaacccgcaagcagaagtaccacgagatagacagcgtctcgcagctcgcagccaagtacttcatccccaacgagtacgacaagctgatggccgccatcggcagccagggctcgaacgccttcacctcgaacgacgtgacttgctacatcgaggacatcccctcgaacgagatagagaactgggcaaaggtgcaggccgaccgcttccagaacatggtgattcgcggcttccacaccgagctggaggctgtctatgaggagtacaacatcggcctctcgaacgacggcaacaagcagtacgaggcgatgctggccaagctgtttcccacgcatccctatggcacacagaccaccatcggcacgcagcagcacctgaagaatccctccatcacgaacatcaagaactacttcgcaaagtggtacgtgcccaacaacgtggccatctgcatggcgggcgacttcgaccccgacaagacactggccatcctgaagcaatacttcggcgaatggaagccgggcgaggacgtcgcccaacccaccttccccgagctgaagccgctgacgcagcctgttgataccaccgtcgtaggccttgaggcagagaacgtctggcttggatggcgcagcgagaaagcctcatccttgcagaacgacacgctggaactcgtcagcgccgtgctctataacggcaaggctggcctcttggacatcgacctgaatcaggagatgaaggtgatggatgccggtgcttttgctgagccgatgctcgaccacggcctcttcctcttggcaggtcagcccaaggaagggcagtcgctcgacgaggtgaaggagctgattcttggcgagataaacaaactgaaatgtggcgacttcgatgaggacctgttgctgtctgccttgaacaacaagaagctggatgacctgcgcagcctcgaccacaactcggctcgcgtcagcaagatgctcgacgccttcatcaacggcatcgaatggcagcagttggttggccagaaggaccgcctcgcaaagataacaaagcaagaactcgtggacttcgcgaaccgtttcttcaccgatggctacgtgacagtctataagcgtcagggcgaggacaccacgcagaagaagattgacaagcccgccatcacgcccattcccacgaaccgcgacctcgtcagccagttcgtgaaggacattcaggagtcaaaggtggctcccatcgagccccagttcctcgactacaagaaggacctctcgttcttcactacacagaaaggcttgcccgtcatctacaagcagaacaccgaaaacggcctcttcgaactgcagttccgctatgagttcggacaggaggacgacaatcgctacgacgtggctgccaactacatcgactacctcggcacggacaagctctctgccgcacaagtcaagcaccagttctacaagatggcctgcaactacgccatcagcgtgaactccgacgctatcaccattggcctcagcggcctcgccgagtatatgcccgaggcactcgctctgctcgaggacctgctccacaatgctaaggtcgatgaggaagcttatcagcagatggttgggctcatcctgaagaatcgtcaggaccagatgtcggagcagcgcagctgttttgccatgttgggtgagtatgccctctatggcccgcacaatgcccagcgcgacaacatgaccgagcagcagcttcgcgagaccaatcctcaggaactgctcgacctcctgaagaacatttcccaatatgagcaccaggttctctactacggtcctattgctgaggagaaactggatggctgcttgtccgacctgcatcccaccgaaaagaatttgaagcccgtacccgaaggcaagccctatgagttgcagacgatatcggagcccgaggtcatcatcgcgccctacgacgccaagaacatctatatgcgcatgttcgtaaacgaaggcaggcagacaaacctcgacgagcacgccaccatcgaactcttcaacgaatactttggcggcggcatgaacggcgtcgtcttccaggagatgcgcgaggcgcgcggtctggcctataatgccatggcatactatcttacccctgccaagaaagggcagcccgagtttttcctcacccacatcatcacgcagaacgacaagatgatggactgcgtcaaccagttccgcgaaatcctcgacaagatgcctgccagcgaagccgccttccagattgccaaagatgccctgacaaagcgacttgccagccagcgcaccaccaagttcggcgtcattcgggcttatatcaatgacaagcgacagggctttgacttcgacgtggacaagaagatttacgaagacctgcagaacctgaccttgcaggacatcaccaatttcgagcaggctaacatcgcaggcaagacaggccgctacgtcatccttggcaacgagaaggaactcgatatggcaagcctcggccagattgcaccaatccgccgcatctcgctagaggaaatcttcggctactaaagtcgactgattaaactgcgaattgcacgaattgttctgtctgacaacaaaaacgacaggacaattcgtgcaattcgtgtattctgtggttattcaaaagcttctcggccgaaaggcacccccattcttatttcaccagcactttgtggccgtcctgaatgtaaatgccccttggcaatttaccatttaatgatttgtgatttatcatctgacggccttgcaagtcgaatacccttccttcgctttcggagtggggtggagcgatgaggcccgtgtcgtcgtccaagtcctcgagaatgaactcgccaggattggtcttgtcggcataaatgtagctgccgacgttccgcgagtcgaagcccaccaggcggctgttctgccagccgcaacgcagataggcattcccatcttcgagacgttcgacttgaatccatccgtgcttgtccgtcggacttgtcgtcgaggaaatgattcgccatgccgaactgctgtcatacgacatgtagtgcccgtcggctttcagcttaaagaatgccgtgaagccctgcaccttctcgaaagtgaagacgtagctcgggtcgctctcattgaactgtccaagacagaaatgaccttcgttgttgtttgtcttgtagtgcaggcaaaggccagattgcttttcgcgaatgcgatagcgatgctctgtattgatggccgaaatccaccaccagtttttaggtaacaaggcttcagcctcgacataaagttcggctgcggaagcgtacttcttatcgtcaacgacggtacggacgaggaacttcatgtaccgtgcttcgggcttgcttgggatgccgaccgtctgcttgtccgaagagttgctgaaagtgccgctggcagctggttcgccccatacatttgggttaggactgaaatagacttcgtagcgaagcacgcgaccgttggaaccatcctttcgacctttgtaggagaaggaagtgatgcgataggtctgcttcatgtcaaccaccagttcgtgcggacaatcgggcgtcgatggattgtattgtgtatgccaaatcgtgttctcgtcatcgtcgattgcatttgctgctctctcgttgttgccttgctgactgtcaacgctatatattgtccattcgcttttgtcgacgaagaagccgtatgccttctccactatcatgctcggagctaagccattgccttccgcataagcccttagcagtccgcctccgcgcatgtcgatgggctcggtatagggctcgtagttctcgccgtcgaggctataatatatggtagtgccggcgggattgtcggagctgagaatcgcaaatccgtgtccatcatcgccaaagcgaacgggctggcagacgggcaatccgaggcagcctctttgcgtcaaaatggtgtcggaacatgcttccggaatcggcataatcatgaagcagaagggtgtttgctcgagtttcttttcatatttgtcgagcacatcgggtccgcaacttgcgtttccgagagccctgttccacgcgtcgagcgatacaaccgtagtgcgagggaatgtgacctcgtagggatgccccttgcgattccagggagccgtgtagatgtcttccgcacgccaatggcccacggtcgttgccatccccgacggattggcgaacgtcaggcctttgcccgacttgttggttatggccagccatctcacatcctccttattgccagtttcttgcggacgaatgtggttcgtccattgctccgtcacggtactgtgccagatgccaagatgggcggcatagttgcggtcgcgatagctgtcgaacggtcctcggcccagccaagtaatgtcctcaaaggcatagggcatctcgaagcggaagccgagcttcggcaaaatggccccttcgatgttcggtgttgttacggtacttacgctaatcgccccatcgggatagatgcggaactgcttgctggtcgtgaacacgagcgctgatgtgctggtcttgtaggtatctgtgattgagagttggatatatttattgttctcgtccttctccacctcccagtcgccactcgtcatggtgagcgaacgcacgcccaggctttcccaattgccctcttgcgccttgtcgttttccgtgggaatgcggaacgtgttgagcttgatgggttgattgatgagggtcgtgcctgcgaggacatatttcgagagcgttccgcccgagaaagtcacggagaagttggcgcccttgacggtacgagatgcccctgttccgctgatggaaagtgtatcagtgccgtcgtaattgtagggcagaggtgctgtcgcttcgcggatgacggcttccgatgctgccacttcatagccggcttcggcccaaggcgttgcttcgcggagagtcgtggagaagcgaatcgtgtagcgggaagagggtttgaaggtgatgccgtcgaagggaaccgtaatcgtcgtgctgtcccacggcgcgatgtccaggtcggggagcgagccgtcggcaatgccaataccatcctcgcttataacatactgtacatcatatccgttgaaattaatctgctgaagtttgttctttaccttgaacttgccctgttcggcatcaagcagcatgacgtcgagcggctgatagacgcccttcatgttgaagctcttggcggtcggggtgcagttggccagcacaactccgttgcagcagaagctgccgtcgttcgggttgtcgccaaagtcgccgccataagcccagtagtattggtttgccttgccgggtacgggcatcttgaggccctggtctttccagtcccaaacgaactcgcccaccatggcaggatagggttcgtagatgtcgcgatagtagtcaatctggttgcccattgagttgcccattgcatgtgtgttctcgcattgaatatgagggcgttggttcgtcttgcccatgcggcttttgcccgttgaaagcatgttgtcgtagctgccgtacatggtgctcgtcacgtcgctccattggctgttcccctcgtagtgagtgatgcgcgaggtgtcgagtgccttgatggcctgcatgacgctttggaagttattgccgccaccgctctcgttgccgccgctccatccgaagatgcagacgtggttgcgaagggtgcggacctgcctctcgttgcgctccaccattggcttgcggaagagttcaacgctgctgagccccatgtttccgtggcattccacgtccgcttccgcgaggacataaaggccgtattggtcgcagagctcgtagaagtagggattgttgggatagtggctcgtgcggacagcgttgacgttgagccgcttcatcgtcaggacgtccctcagcatctcctcgcggctgacggtgcgacccgtctcttcgctaaagtcgtgccggtcaacgccgtgaaccacaagacgtttgccattgatgagtaaagctccgtctgaacggattgtgaccgtcctgaagcctatcttgcaggctcgcatatcgaccaccgtgccttcggaatccagcaggctgagggtcaggtcgtagagtttgggacgctctgcgctccagcattccacatcggaaaacgcgaaggactgtttgatgttgcccgatgttgtaaccgatttggtggtttccttcaccacgtttgcgccgtcgctaatcgtcatttgcaacttcattccgctcagcgacccgccttcga

SEQ ID NO: 1649 - DNA, 23642 bp, synthetic construct
  misc_feature 1..23642: note = Synthetic
  source 1..23642: mol_type = other DNA
tcttcgagcggaacgacatggcgggtctcgacatgagcaaggtctgccttgtcctcgacttcggcggcaacagagcgggcaccatcatcaaggtgagcaacatcctgttcaccgaaaaggcatacgactcttcgcaggacacgaactcttgtcccctacccgactacaagcttgtctggcacgacgagttcacatcgcgcatcatcagtacaatccgctggacctaccagacagccgatgccggttgggtaaaccacgaactgcagacctacgtcaatacgaaaagccccaaagggacaaaggtggcagaaagttcggacggaaccctgaagatacacaccttcagggaaggcgacaagatatacagtgcccgcctctatggcaacaagtcgcaaggcttcaagtacggctacattgaggctcgcatcaagttgcccaagggcaagggcacatggccggcatggtggatgatgcccgtcagcggcggcggatggccgggttgcggcgagatagacatcatggaggaagtgggcgtggacgccaacatcgtttcgagcagtattcattgccaagcctacaaccatccgacgaacacccaaaagactcatgccatgacgtgtgtgggagcggaagacggcttccacgtctatgccctcgaatggacggaagactacatccgcaccttcgttgacggcacggaacaactctacttcgagaacgacaagcagggcaacaacgacacttggcccttcaacaaagccttctaccccatcctcaacgtggcttggggcggcgactggggcggctatgctggcgtcgatgagtcggcactcccgcttaccatggaggttgactacgttagggtttggcagaagcggtgagacaaagcctgtgggtgatgcagtcgggaagctcttcctcgtagtgcgtcaccatgacgagcgtcttgtgcggccgttggcagaagcacttgattatctgtcgcacaagctctcggttgcggtcgtcgaggccgtggagaggctcgtcgaggataagcagctcggggtctttcacgaaggcacgggccaacaggcagagccgttgctcgccgctactgagctgcaggaacgagcggtcggccaatgcttccactccgaacacatgcatccagtcgaggcacgtctgcttctgctcagggcgtggacggacataaagtccgacagagtcgctcaatccacttgccaccacatcgatggccggtatgtccttcatgtaggctcggtgcatttcggggcttacgtaccctatgtgtttctttatctgccagatgctctcacccgttccacgacgatggccgaagagttcgatgttgcaggcgtatgcttgcggattgtcggcacagacaaggctgagaagcgtgctcttgcccgagccgttcggtccgctcaaagcccatcgctcgccctcgtggacagtccagtcgagaggttggagaatggttcggtcgccatagcggatgctgacattgcggaagcgaagtatctcgccgccatcggccggatagaagtcggaagcagagaggttgcggggaggcaagtcagctatccattgctttatatcttcggccaacagcggacgcggcacagcagcatattgctttctgtattcagcaagcgtcagcttcggcagcaagcgcaaaccttctacgggaaggacgtgggtgatgaagtcggggatgtcgtcgcgtttgctcaggacaaggatgacgaggatttccgcctctcgcgtcatcatatccagcaggcttcggaagtcgcttcgtgcctgtgcgtcaagcccgatgaaagggttgtcgaggatgagtacacgaggactcatggcaagcgctttagccatttggaacttgcgaagctcgccgctgctgagggagatgattcgctttgagagtgaagaactaagcgagaagagagaagagtgaagagtgaagagtgaagaatttgctgccgcactatctctcaactctaaactctcttccgacttgtcgcctgagcacccacggagcgcaagaactctcttccgacttgtcgcctgagcacccacggagcgcaagaactctaaactctcttccgacttgtcgcctgagcacccacggagcgcaagaactctaaactctctcttcagtaattctcctactgtcggcatgtcgtcggctatgtcgtgctggttccaacgctgctgatagtagtacgtgccgtcctgctctccataggagtcgcggaaggagatgtacttcaagttgtcgctgacgagacgcgaacaggtggacgggaagtcgtaatgcacctcgttgagtagcagcggataatgtccggtgaggacttccacgagtcgcgacttcccggcagcattgtcgcctacgatagcaatctgctcgcctttgtttatctcaaggttgattggttcagccattcgccacaaaggatggcgaggcacaccgttctctatcttaatcattgtatggtatatattctagtttctgtggatctggtatttgaatgagcattcgatattagctccaattcaattatgaacgcagcgtgttccccacccccttatccctccccttagaagggaggggagtcgcggcggaggagcctctccccaaccccctccaaacccttcgggcctccgtcgcttacactccccaattgctccgcttttaacgggcaattgccccgaggggaggctttctgccgcgaaaaagtctcccctccccctaaaggggttagggggtctgtaaaaggttaaatcgctaaattgtacataaattgtaaattgtaaattgtcaaattgtacattacagtacattatttaggaggctttcatttatttcactctttccttattcttctttgcgaagtcggcccagctgcgatacttgtggtcagtttcgggcttgcccatctgcaggaagtggcaataggcggctcccagagcatcggtggcatcgaggaaacgtcccatctcctccttctctacgtgcagcatgcggcggagcatgtcggccacttgttccttgctggcattgccgttacccgtgatggccatctttatcttcgccggagcatactccgtgatgggcacttgtcgctgaatggctgcggcaatggctactccttgggcacgtcccagcttcagcatgctctgtatgttcttgccgaagaacggggcttcgatggccatgcagtcgggcagatagccttcgatgatgctgcagacacgctcgtggatgtggccgagcttgaggtaagggtcgccaaacttgcgtaggtcgatgacgcccaaagcaagcatctccgccttcttgtcctgaacgcgaagtacgccgtagcccatgatgctcgtgcccgggtctatgccaagaataatgcgctccatatctttttttgactgcaaaagtacaaaataattgtaaaaaacactcaaaagtgctaagaaattattaattatgaaccacgaattatgaattatttcgtacctttgcaaagcaaagaggacttcgtgacgccacgagcgagcattcttcgcgacgacagctgcctcatcgccatcggaacaggccgacgaaaccttccgctaagggcatcgaaaaatgcaacgtggagcgtagcccgatgctccgtggagagtaggccgattctccgtggagtgtgagccgattctccgtggagtgtgagccgattctccgtggagtgtgagcctcccctcctctgggtcacttcggatgcctcacggacaagcggccttcaaggcagcagacgactattgaagtacacaattatcgaacagaacataaaacattagtaaacagagcataacaacacaaacaaaaagatgaaaaggatactctttattgccattgcagtcttttctatggtcaatggtaaatggtcaacagcttcggcacagacgcagaaacagaaagtgaatgtcagcgaggttcaagcggtcgctaccacaaaagcagagaactacgcagaaataacattcgatacgcttcgccacgacttcggcaagttctcgaagaacgaaccgctggtgcgttgcgcattccccttcaagaacaccggaacggctccgctcatcatccatcaagcctttgccagctgcggatgcaccgtgcccacctacaccaaagaacccatcaagccgggcgaaaaaggcgtcatcgacgtcacctatgacggcacagacaagttccccggccacttcatgaagaccatcaccatccgctccaatgcagtcaacgaggttgtgcggctcaccatcgaaggaactatggagtgaaacaaagttgaaaattgaaaattgaaaattgaaaagaggttagaggtaagaggtaagaggtaagaggacacctttgccccctcagcatcccaaactatcctctaaccactaaccactaaccacaagaaaaaagttagggcggtagcaaactcttcactcttcacttcgccgaaggcgacattctatatgacttgaccatggacatcgcgaaactcttcttcctcctccttcttttcctctttgtcggcggactgcctgccagcgcagaagaggattggaaccccttggcacaagaagaagccatcgtgacaagtggcaacgcccgcttcactatccttacgccccgactcatccgcatacagtacaccacagccgatgccttcgaggaccgcgccacctttgctgtcgtcaaccgtcggctccccgtcccagctttcacctgcaacgaagaggacggctacctcgtcattcgcaccgactcgctgaccctgcgctacaagataggggcgagaatcctcaagcaagccaagaacagcaacgtgctgggcatcaccttccagatgaacggccgacagatactttggtaccccggcaaggacgacgccctcaacctgcttggcactcagcgcacactcgacggcaacatcggcgacacccatcgcgtctccctcgagaaaggactcctttcgcgcgacggctgggccatcctcgacgagtcgccaagcactcaaagaggcgatggcagccgctctttcccgttcgaaggagaagtggatggcattccttggatagggaaacccctcgacgccaacgctatcgactggtacttcttcggctacggccatcgctacaaggacgcgctcggcgactacgtccgcatagccggacggcaacccctgccgcctaaatacatgttcggctattggtacagcaagtatcaagcctactcgcaaagcgacgtccagcaactcatccgcgacatggagaaccggaacatcccccatgacgtgctgatgatagattgcgattggcatcagaactcatggaccggctggacgtggaacaagtcgctctttcccaatcccgccacgcttctcggctggatgcacacccaccacaccaagtccgccctcaaccttcatcccgccgacggcatcggctccagcgacgacaactttgccaagatacgaaacgacatggggcttgaccaaagcgtcaccaccgtcccttggcaactggaggactccactttctaccgcactttcttcaagaacatcatgcgcgtccgcgagcaacaaggcgtcgatttctggtggctcgactggcagcaagacctcaccagcaaatacatcgcaggacttgggcagaccttctggctcaaccacgtcttctacaacgacatgcggcttcaccgcaccgaccgccgtcccgtcatcttccatcgttggggaggcatgggaagccaccgctaccccatcggcttctccggcgacaccttcgccacctacggcaccctgcagttcgagagctacgtcacagccacagccgccaacgtctgcttcggatattgggggcacgacggtggaggctacctccaacccaacaacatcaacaccgacccagaactcgtgctccgatggatgcagttctgcgtcttccaacccatcttccgcacacacggctcaagccaaagcggttgcgagcgacgcatctggaagttcagcaacttcgacctccagaacgaagccttccaactccgctacacccttataccttatatatatacagcagctcgctgcgcctacgacaccggcgtctccatctgccgaccgctctactacgaatggcccgaagagaacaaagcctattccgtagaagacgaatacctcttcggcgacgacatcctcgtctcgcccatctccacgccttcccgcagcaacggcacaagccaacgctccacatggttgccccaaggctattggtacgacatctgccgctcccgcatgctcagcggcggacgcaccatcaccgacgaatacgccctcgacgagatacccttcttccttcgcctcggcagcatcattccctgcaatcctcccctctcgcacatgaaggaagaacccgcctccctcgtcctttgggtcatacccggagacgatggcgaaggcaccctctacgaagaccagggcgacagcgaagcctacaaaaacggcgagtacgccaccacacgcttctcccaaagccatccctcctccggcaccacgctcaccatccatccccgccaaggaagctacgaaggcatgctcagcgagcgcgcatggcaagtcttgttctttgccgccgaagagccggatgtcgtcaccgtcaacggcgaaagaacccacgattggatctacgacggacagctccaccgcctcaccgtcaacgtcccctcgcatccctgcaccgagaccatcatcgtcaactacagagacaaagagacaggaatcaggggaattgaaagtggaaaatggaaaaatgaaaatgaaggtcaaatcgtaaatagtaattcgtcaaatagtaaatgttttgatttaagcggccgcgaaatggtcaatggtcaatggtcaatggtcaatggtaaaatgccaaagggcttttacatagtcggtagcaagaaaatcataatcccctacaagccatgaaacgcctcctgctcatacttcttttcacctttccattttcaattttcaactttcaactttcaactttcaactttctgtatgctcaggacatgtcgcgcctctgggcagtaggcacagccgtgcccggtggcatacaggaactgacacccttccccaacaaacagttcaaatacaccggtcgcctcgtagaaggcgggtcgctcaccttccgcaacatggaagcaggtaaaggcaccggcttgcgctacatcaaacccacctacgaagatgcctatgccgtgacaaaccccatgcccttcaccctcgccctcgactccgcctccagcacatgggtcgtccccctcaccgaagacgtctatcgcatcaccatcgacctcagcgccaagaagctcaccggcgaactcttccgtccctggaacgaactcttcatcgttggtggagccaccgaatgcggatgggtgacatacaccttcctgcccttcacccgcgacgaggacgaggtctgcgcttgggactggacaggccttctgcgcgagcggcaagagtatggcgaaccacgccgcttcaagttcctcggacagaacgcctgggagccgaaagccctccatcccttctcgcaggacgaagacgtcctctccagcacccagctgctcaccggcggcagcggcgacaacaaatggagcatccgccaagaaggctactaccacatccgcgtcgatgtcttccgcgagacagtccaagccgaatacctcggccccgacccacccatgttaaatgaagaattaagaatgaatttcgcctgcggcgaagtgaagagtgaagagtgaagagtttgctaccgccctgtaaatggctaaattactaaatcgtaaataaattgtaaatcgtaaatcgtcaaatcgtaaattgattaggattgtaaataaatagtaaatagtaaaatcgtaaattaattagggtgttttaaccattaaattaacaaatctatgaaaaagtacattgctgaatgcatcggtacattcgtactgacattcctcggttgcggagcagccgtcagtctgagttgtggagcagatactgcttcagtagttggaacagccattgccttcggtctttccgtagtagccatggcctacaccatcggcggcgtatcgggctgccacatcaatcccgccatcacgctgggctgtctcgtcacaggtcgcatcagcgtcaaggacaccatcggctacatctgcggacaagttgtcggagccatcatcgcaggcgctgccctactctatctctatcccggttcgggtctgggagccaacggcatcggagcaggttgtgccggaagtgcgagcatcgcactcgtcgctgagatcatcctcacagccctcttcgtgctcgtagtgctgggtgccacccacaagacgaatggtgccaccaacaacttcgctggtctcgccatcggtctctcgctgattctcatccacctcgtaggcatccacttcaccggcacgagcgtcaaccccgcccgttccatcggtcccgccatcttcgcaggcggcgatgccctcgtcaacctttggatcttcatcgtaggtcccttcgtaggtgccctcgtagcagcatgcctctggaagctcgtcgaggtaaaggaataagcacatccatcattgatacagcaagccccgagagcaatcgtccctcggggcttgttccgttcccgaccccttagagaaagtacgcccctctccgaatccctcaaagcatgcacctatccatcagcccacatgctaaagttgaaacagaaataatatgaaacaaggggatttgacgatttcgtcagtaatagcaaaagaatggatacgaaaacagccagttgtagggcaaaacactacaaccttcccataaaagcatccgaaaactttggacgcatcagattattttgtaacttagcggtcgaaaaagtacattttttaataaaacatgcacaatacacgtccgctctcacacatcacatttgatgtctggctcatagaacaattgcagttcgcatcttccactggtttgacactcgaagaacttaaaagtcgatggatggcacgtcccggacatcggggcaatctctcccgcgacatgctcaccacccacagaaaaggcatcaaggacttcctcggactgagaatagaagcccccgacaggatgcactactgcatcatgaacccagaagtgctcaagctcgactcccttgcaaacgacctactgaagagcatccagaacttcgtgttcctgcaagagtacaaagatttgggcgacctcatacagcccgagcagatagagacaggcgcgtgcttcctgcagatgataggtcaggcgctacgggacaagcggaagctgagcatcacctatcagaaattcatagacgaagccccctaccacgccatcgtgcatccctatctattgaaagccgacaaaggccgctggtacatcttcgcccacaaagaagggagcgagcatcaagagtacgtacaatgttttgccatggaccggaccaagcgcctcgaagtgatacccgaaaccttcgtccccaatccggaggtcgatatggtcgaatacttccgcgactgctttggcgtatggcacgactacgaaagctatcccgtccgcgacatcaccatcagctgcaccgagaaagtagcccactatctgcgcacactccccctccaccacagccaaagagaggacgcctaccgcgaaggccccgacgcccgcgtcatcttccattaccacatctcccctacccccgacttcatcggcgaactaaagaaatggggtaacgaaataagaataaaagaagggaaataaaaaagcccctccagaagagaggcagtaggaattcatccttcggcatatagccttattgtgatttgatgatgatgaattatctgaatgcaaaggtaagacaattattagaaacaacaaaataaaacaaagaaaaaatgaacaaaaaacgcattttaggactcgatacaggcacaaacagcttgggttgggcggttgttgaccaagaagaaggcggtcaatataccttgattgacaaaggagtcgtcatctttcaggaaggcgtaaagattgagaagggagtagagtcgagcaaggctgcagaaagaacgcagcatagagcacttcgcaggcagtacttccgccgacgcttgcgcaagataaaggttctggagattttggtgaaatacaatctttgtcctgccttgactgaagaagacctgaagctgtggaagctgcgcaagatatatccgaagaaggatgagttcatgcaatggcagcgcaccaatgacaatgaagatgtcaatccctatcattgccgttacatctgtctaaacgaagtactggacctcgacatgcaacaggatagatacactttgggacgcgcattctatcacatggctcaacgacgaggtttcctgagcaatcgacttgacgcaacagaagaagatgagagcggtgcagtaaaaagcagcattgccaacctcagcaaggagatagaggagggcggctgcaaatatctgggcgagtacttctataaattatataaggaaaaggggaacaccgttcgcatccgcacacgctataccgaccgcgagcagcactacaagaaggagttctttgcaatttgcgataagcaacacttgcccgaagagatgattgcggagttggcacgggccttgttcttccaacggcctctaaagagccagcgtcagaacgtgggtaattgtacattcgaaaaaggaaagccacgatgcagcgactcccaccccttgtatgaggagttcaggatgctctcgttcctgaataatgtacagatacaaggaccttgggatgaggtctatcgtccactaaacgaggaagagcgtcagaagatagattcgctattctacaggaagagcaagccaaacttcgacttcgaggagatagccaagaagattgcaggaaaaggcaaataccaatggaagggcgatacacagacagacttgccctacaagttcaacttccgtatgtcgcaaggtgttcccggatgcccaacgattgcacagctgaaggaagtcttcggcgatgattggaagaagggcattgtcgaaacctatatgcttggcacaaagaaggatggaacacagaaaggcattgatgaaatggtgaacgatgtctggaatgtgctcttctccttcgacagcaaagacaaggtcaaagagttcggcatcaagcacctgcaactagacgaggaacaagccgaaaagttctcgaacatacgcttgagccgcaactatgcttccctgtctcagaaagctatacggaacatcttgcttttcctgcggatgggtatgatttattctgatgcagttttctttgccaaagttcctgcaatcatcgggcaaaacctatgggaggcgcggcaaagcgagataatggaagacctctcttatactatacaaatggcgataaaagagaaacgtcacatagatgaagccgtaaaagactatctgcaagacaacttcgacttgaagccaggagcggcagagcttctctaccatccttcgatgatagaaacctaccccgacgccaaaccgaacaaagatggcgtagtcctgcttggcagccctcgtacgaatgccgtgaagaatcccatggcaatgcgctcgctccacgaagtgcgcaaggtcattaacaaccttatcaaagaaggcaagatagggccagacacggaggtacacatcgagtatgcccgagccttgaacaatgccaacatgcgtgccgccatcaacgaacggcagcgggagcaggacaagaagcacaagcagtatgccgaggagatacgccagcgttacaaggaaaagacaggcaaagacatccagcctacagaaaccgacattctgaagtatcagttgtgggaagagcagggccacatctgcctttatactggaaagaagattgacataatcgacttcatcggagccagcccgacttacgacatagaacataccatccctcgaagtgcaggcggcgacagcacgcagatgaacatgacgctttgcagcagccgatataacagggaggtcaagaagaccaagttgccgacagaactggcggagcatgagttcataatgacgcgaattgaaccttggaagcaacgcattgaagagttgagaaaacaaatagatcgtgataagaaaggcaatgaaagtgacaaagcagccagagacaaaagaatacgaaggaagaatctccacatggaggaattgaaatactgggaaggcaagtacgacagatttaccatgacggaagttcccgaaggctttgcacgccgccaaggtgcaggcatcggattgatttccaaatatgcggccctctacctgaaaagttatttccacgacacactccaccccgaccgccgtcaggtcttcagcatcaagggaaccgtcacctccgagttccgcaagatgtggggcatacaggatgagtacgagaagaagtcgcgcgacagccatacccatcattgcatcgatgccatcgtaattgcctgcatcggcaagaacgagttcaatatgatggggaagtaccatcatgatatgtatgattataatgaaggtaatggaccgaagccccaattcgacaagccttggcccaccttcacgcaagatctcaagcaaattacagaagagcttcttgttgtccacgacacgcccgacaacatgccgaagaaggcttcaagagtaatagaagtgaacggtaaaaaggttgtagctaaaggcgattgcgctcgcggcagcctgcaccaagacacctattatggtgccatagagagggatggcgaaatcaaatacgtggtgcgtaaatctcttagcacattgaaggaaagcgatgtggaaaacatcgtggacgatgtcgtaaaggaaaaagtgaagcaggcaatagcggagaaaggcttcaaggatgccatggctggagatatttatatgaacgaggctaaaggcatcctgataaagaaggttcggtgctatacacctaccgttacccaacccctcgacattcgccgccatcgcgacttgagcagaaaagactacaaacagcaatatcatgtgatgaacgacgaaaactacatgatggcaatctatcaaggcatcgtgaggagcaaacgcaaaacgtcgtttgttttggttaacgcacttgatgccgtaagtttctacaaagagagcacggacaggaacgactgtcctgccatcgtaccaaaagagaataaagggttgccgttgaaatggtgtgtcaagaaaggcacgcatttacttatgcttgaagaaggagaagaaaatatatttttctctaatgccgaagaactgagcaacagacttttcactatcacgaaaatggataaaaacggactcttgacttgtagaaatagtaaggaagcacgtcttgcgggagatctgaagtgtttcttgaattcaattactttcaaattgcaagatggctatcgtcctattcttcgcatgagtcctactaatttccattttctcgttgaaggatatgatttcacgataacacctttgggcgagataaagctaaaactctgatatgctgaaacaaactctggtctttaccaatccatttcgtcctgggaataataaacatttggggagaaatagaacaaaaagtacagaaaaagccagtgcaattagaaatattttaataactttgccaaagatttgatgttcatcacaccacttcttatatataaaatgtattcaaaggccttcaatataagctgaatacatgatataggttgtggtttgatgatgatataagataagaaacaacaaccgtttccccatgggtaaaaaggtgggggttgtggtttgatgatgatatgagataagaaacaaccaacgaagtaaagaagtgcgcaaaggctggttgtggtttgatgatgatatgagataagaaacaacccatagactccgataacatcgttagcaccgttgtggtttgatgatgatatgagataagaaacaacccgcagcacagaacgccgccgcagcacagggttgtggtttgatgatgatatgagataagaaacaacgccgccgtattgatttagccgccgcacgcagttgtggtttgatgatgatatgagataagaaacaacaggcagcagcagcagaggcagcagccaagggttgtggtttgatgatgatatgagataagaaacaacgacaatgaggaagcatctgttggagaacagttgtggtttgatgatgatatgagataagaaacaacttctgtaaatgtcatcttctacccttcgcagttgtggtttgatgatgatatgagataagaagctatatatcgtagtccatgcttagaacaaagcgcggatagctgcataaggtgagttgagaggcttcgaggctaacattccacgttatccactaacttcctgcatgcagcaacgccctacacagcacgccgtgaaaatgataaacactcgtcactcgtcactttttggtctaacatgttggaaataagctaatgacgaggtgacagtactgtcaccctaccgtcaccctatcgtcaccctctcgtcacctcgcatcctattgaatcacaatgctataaccgtgaaggtgacggggtgacggtagagtttcaaattttgaggcaaaggggggagttgattatgctgcacacaaagtggaggttagcgattaggaataatgctattctctaactgctaacctctatgtgctaacgtttcatctatcccgcagggacggggaagtttagcgcaggcggtcgagcgagcggactaacttctcgtcgtgacgtatgccccggtatgcgaggcagagcaggatgagggctacggctggcagggcggctgtccaatggggtcgccatgatgccgtgagttctgctacaagcagacggctgatgatgccgtaggcgatgtaccagcagacgagcaggatgatgctgaatgtggcgagccgcatctgaagggtgcgacgcttgtagagccagatgtcgaagaaggtgactgccgtggcgatgacgagcagggccataagtacgggacagaaatagaacatgtgttctttctctgccgacacgagccataggttgtacatatcgactgtttctgtgccttcggttgtgagcaaatgcgcgatgggcgtagagagacagccgatgcagaggatggtggcaagaagcaggtagatggtctgtatgcgttgtatcatcgttcagtcgagcagggaggcctctttgctggggttgcggaagtagatcttgccgtcgatgaattcctgtgtagccatgagggttggcttgggaagcttctcgtagtagcggctgatttctatctgttcgcgattctcgaacacttcgtcgaggttgtcctgtgtgctggcgaactcagagagtttcttgctcagttcctgcttgatatcggcagaaatctgattggcgcgcttggagatgatgactacgctctcgtagatgtttccggtctcttcgcacagattcattacgtctctggtaactgtgtcggtaggtgctgaaattttcttgtaatccatgatataatttactatttgacgatttactatttacgatttatttacgatttagccatttaaccatttacttcccccttcctcccttccccctctcccacgggagagggttgaggagaggccatttaattttcgatttgactatttacaatttacgatttatttactatttagtaatttagctgaccctctctccaactctaagaccccccttagggagagtggagagctttttcccgtcagtaagcctcccctcggggcaattgcccgttaaaagcggagcaattggggagtgtaagcgacggaggcccgaagggtttggagggggtcgagggggtcttctttatttatgatttcttttgccaagtgaactttttaatatatttctgctgcttcagattttccacatcctttttggctctctccgattcttgcatctctttcagagcctctttcgcatcgtcgttctttttcttcttgcttaattcgtcttcttccggcaggctgcctttcctctctacgacgcgttcggagtaatcgaagattgcgttcgcctctttcaggtacttgctttcggggtagtcgttctggaaggcatagtattcgtcgatggtgtcgcggtagcgctcgaggcgtttttcttctacgctgtgtcgtgccagcaggtacttggcccgaaggatgaggacggagaggtcttcgcggagctgcactgaggcgtagggatagtccttgagggcgttctgtgctgtgatgacgcaggcttcgtagttgttgccgccgtagatggagttgagcgtgtaggtgccgaggtcgtagtagagcttggctgcgagatactcctttctgacgagcttgtcctgcatttcgtagatgacttgctgcgcttgcgacttgagggtcgtctcggggcagtagtcgaggaagctctggtactcgttgatggcttccatggtgcttgtctggtcgaggcgtatgtcgggtgtctgcttgtagagcgcgtagccgctgttgtagcgagccatttccatgtagtgccccttggggtaggactggtagtacttcttgaagaacatggctgccgactcgtagtctttggctttcatgttgctttccgcgagcatgtagaggctttcctcaccgaatggggtacctttcagcagggtcagcagggagccgaatagctcggctgcctgatgatagttgcccgacatgtagagggctttggcggcttcgtacttgtattcatagtcgccattcttgagcacggcattgtactcgctgcaggcggtgagcaagagcgagcatgcgacgagaagctggaacaagagacgatgcattttcttcatatcaaggcgcaaagatatgattttttgctgattctgccaaaactgctctcataaaaaagggcttaggaggctgtttttaacgattattggctttcttggggtcgtaaatagctactccgacaaacgaatcggcacatccgtagaagagaaaccactttccgcggaagggtacgagtccttcggtgaagacggtaccggaggggtactgtccgctcttctcgaaggagtcttgggggtagaagtaggggtagtcgaggcggtcaagcaggcgggtcggctcgtgggaggagaagagggcttgcccggcacaataggctccggaggcatagtgtgggtcgccgtcgttgcctccgcggttctttccgttgtagaagaggatgatgcccttgcgcgtcttgatggctggcggcccgcattccacgagctggctgtcgaagtagcctctgcgggtgtccatgacgtgcagcagcgtgccgtcgggggccagcatgggcgtccagtgtatcaggtcggtgcttgtggcgatgttgacgaagttttcgccccagtacatgaggtatttccctttgatgcgagcgatgacttggcggccgttcttcatctcggtcacgatggaacccgacttggagtagcctttgctcagctggcttttgtgggcatcggagaagatgggaccgtgtttcgtccaatggacgaggtcgcgcgatgtggcgacgctaagccgggcaagcttgtggttccaacttgtgtaggtcatcacgtaaaggccgtcttcggtcatgcagacacgcgggtcttcgcatcctcccggcacgtcgaagtcggtccattcgtcgccaccggggaagaggacgggggagccgtgatgttggaagtggatgccgtcctcgctgaaagcatagccgatgcgcgaggtgcgggagccgatgcctttggcgatgttgtcctcggcacgatagaggaggacgatgccgccgttgaacacggtagcggcagggttgaacgtttcgctgttctcccattgagccaccttgccgtgcatcgggcagaagaagcgactcgtcgtgtcggggcggacgatagggttgataccagcaggccgctcgaagccgagccaagcccatttcttctcagtattcggcactttctgtgcctgcaagggaagcatcaaagcgaaagatgctaaaaggaatagggacttcatgagttaagagttaagagtgaagaatatcgcctccggcgaagtgaagagtgaagagtgaagagtgaagagtgaagaatcctagataatttactatttgacaatcctagataatttactatttgacgatttactatttactatttatttacgatttagtaatttaaccatttacttcccctttctccctctagagggagttattccccctaaaggggggtagggggtctttttcaactttcagcctctccccgaccctctcccgtgggagagggagttattccccctaaagggggttagggggtctttttcaattttcaactttcaatttctttactgccttcgagacgacataacctcggaaggggttctcaatggtttgcagggtgatgccgttgagcatctcgggttctagcacgtggtgaaggtcgtcggtgatgcctgtgccgatgagctttagcaccgcttctttctgtgtccagagtcgtgtgaaagcgaggtcggggaaggggtctgcaaggatggtgtccgcttcctcttggctcattgtgtatcgcacaagaccctctttggctgggcggatgtgctcaatgtccaagccacaaggatggtcgctgaccagacagccgacggcttctttgcaatgactgatactgaagtgtatctcggggtgctctgcgaggaagggtttgccgtgctcgttgaagcagaaagctggtttgccgccgatgccgaagagctgtcgaagtcctcgaagcagttcgatgtagcccacagcacagtcgcgtcggccctgaggaaacttgaagcgcaaggctgcctcgcgtcgccattcgggcagaaagacgagaagaatttccgtctgcgcttcgctcaatgcagagacatggtcgttgatgcagagaatttctttcatggattctagcaaatcaactttctaagtggttagaggttagaggttctttgcgtcgccttcggcgaagtgaagagtgaagagtgaagaatcaaagttaccagccgccctgtaaatagccaaattattaaatagtacataaatagtaaatagtaaatcgtcaaatcgtaaattatttcaactttcaattttaaactttattccccctaaagggggttagggggtctttttaaattttcttattgccagcaggcacacaggggctgatagcgcgttgacttggaagaagacttcgtacccgagcttctctaccatccaaccgctgagggccatcggcagaaacatggcggctgctacgaggggaatctgcaacatgccgatggaagcggcgtagcgcgaacccgaaacggcactcacgggaagcctgcacacaccaagtcccatgccgaagagcagctgcgccgtcatcgtacaacagcagagcatccacagcgactgaggcggactgtaggtcattccccaatagacaaacggagagagcacaaggctgaaagccattggccaaaagcaacgttggaggccgtagtgcctgatgaaccaccaaccgatggctatgccgaggctgaaggctatcacccccaccgtgccttgcgcaaagcctatctcctgcatggtacattgcaaaccgcctcgcgcatgcgtatcatataaatatagtacgcgcgcgaagaacatcagcccttgtggcaagaggaggaagaagaggaagaagaaccatcccacagccccttctctgctcgtccatcttcctgccttttgtccgctctcgcctcggaggtatgctttcccctctttgctttccttgcaagctctgacgcttctctccaagggggacgaagggagaaggcagttggtcagactaagcatgaggaagagtcccgccacgacatagcatcccaacgaccacgagtagcgtatctgtcggaaatacacttgcagcgtgccaacaaggaagatgagtgctccgtaggtgaagatgacggctatctgcgagcagacatggcgcggaaccatcagaagtcggcggaagaaggagcgcaggcggctctcgtagtacatgcgggccgtcagttcgtgccaagcacagaagagactgaccaacagcaaggcgaggaacacagccactggcccacggttgaaggagaaggccagcaggatgagtgctacgaagagaagcgcctcaacgatgtgcaccatctgcccgaagtgccctacccttctcacccacggacgcatgaacgacttcagcacccacggcacgaagaggagcgcggagcaaagcgttgcccatgccggtgccacgtccagctggagcagcatcagcaaagcaacgtaagtcaccattgcccccggtatctcttccgcagcaaagagggtgaggaaacgaaggcctcccccgtcccctccaaaggaagggggaacggagtcgccttgactccctctcttttggagagggctggggagaggctttttagtagcttcttgcgatgaggacacgtgccttgctgggtttacctgttaccatatccacgccttctgtctgctcaaagccgaagggcacgcagcggatggtagcctgcgtctcttccttgatgcgggcttccgtctcggctgtgccgtcccaatggcagaggaagaagccgccgtccttgacgcgctccttgaactcttcgtagttctcgcactcgtagatatgggcgtcgcggaaggctttggccttggcgaagatgttcttctgtatgtcgtcgaggagcgtcttgacgtagtcggcgatgccagccaaggggcgcgtctctttctccaacgtgtcgcgacgcatcacttccaccgtaccgttctccaagtcccttgcacccagcacgagacgcacgggcacgcccttcagctcgtagtcggcgaacttgaagcccggacgtctgttgtcggcgttgtcgtacttgacgctgatgcccatccgcttcagctcgtcgatgatgggagccacggcagcatccacggctgccatctgttcgggcttgccgccaatggggatgatgaccacctgaatgggagccaatgcaggcggcagcacgaggccgttgtcgtcgctatgcgtcatgatgagcgcgcccatgagtcgggtgctcacgccccaagaggtagcccaagcgtattcgggtttgttctccttgttgaggaactgcacctcgaaggccttgccgaagttctgtccgaggaagtggctcgtgccgctctgcaacgccttgccgtcctgcatcatggcctcgatggtataggtgtcgagcgcaccagcaaaacgctccgtctcgctcttgacgccctgtactaccggcacagccatgtactcctcggcaaacttggcatagactttgagcatctgctgggcacgtgcctcggcttcttcgcgagtggcgtgggccgtgtggccttcttgccaaaggaactcgctggtgcgcaggaagagacgggtgcgcatctcccaacgcatcacgttgcaccactggttcaccagcaggggaaggtcgcgataggactgtatccaattcttgaaggtgttccaaatgatggtttccgacgtgggacggatgatgagttcctcttccaatcgggctgcgggatctaccacaacgccgtcatgtgtctcgttggttttcaggcgatagtgtgtcaccacagcacactccttagcgaagccttccacgtgctccgcctctttcgagaggaagctcttcgggatgagcagcgggaagtaggcattctgtacgcccgtctccttgaacatatcgtcgagcgtgcgttgcatcttctcccagatagcatagccatagggcttgattaccatgcaacccctcacgtcgctctgctcggccaagtcggccttcaccaccaattcgttgtaccacttgctgtagtcctcactcctttttgtaaggaaatccaattcttttgccatagatgtattctttattcagtttatgtatcccgtaaaacacacagtgccgtctcgtcagtactcccacgggaaaactccagtactcccacgggaaaactccagtactcccacggtgggactggggacatgccgtgtgcttccgtgggatgacagcctgcctgaaaaggctttatcggccttaacgcgagtgcaaaagtacaaaaaaaagtttataattcataataaatcccctttcttcatcctacattcttcattttttcgtacctttgcaggcaaaatcaggaaacaaggatttattaacagattaaaacacgaaaaaatgaaagcaaagaaattaattctgggtatcttggccatggccttggtattctctggctgtaacatgaacaacaccaccaaaggcggcctcatcggcggtgcaggcggcggcgctctgggcgcaggcatcggcgctgccatcggcgcactcatcaacggctcaagcggcgctaagctcggtgctgccatcggtgctggtgtaggcgtagccggtggaaccacggccggcgtcctcatcggcaggaagatggacaaggcaaagaaggaggcagaagccattgccaacgcacaggtttccgacgccgtcgaccagaacggctaccaggccgtgaaggtcaccttcgagagcggcatcctcttccagagcggcaagtccgtgctcagcgctgcagcacaaagctcgctcaacaagtttgccaccgacgtcctcgctgccaaccccgacatgaacgtaggcatcgtgggctacaccgacaacgacccctggaagggcaagacagccgaacagagcgttgccgccaaccagaagctctccgaacagcgtgcacaggccgtcagcaacttcctccagaagcatggcgcagctgccaatcagattcaggaggtcgtaggtctgggcgaaagcaaccccgtagccgacaacgccacagcagctggcaagcagcagaaccgccgcgtagaggtctatctctatgccagcgacgccatgattgaagctgccaagcaaggtactctgcagtaatcgactcagccccctcccccagcccttccctcccaagaggaaaggcttcgggggcttaacgcccctcttccggaaacagacggaagtggggctgacgtttttccgcactgacaaaatgcaagcaaaacaggcattccgcttacacacgacatttcgaagaaccttcaagaatcgcttaaaacggctcctgtggcacttttccaccctcagacaaaaatatgggcttaaatcgaaagccatttcgcaacgacttaacagacaacccattaccaggcaccacacacgattcttcatttgactcgaagtgtcaaattgcaacacagagatagcagaacaaggtgattttccacgtttttgcacactttttgacagagaagaaatccaaagacagcacgggaagtttccaaacacacagtgtcaagtcggcctacaacccacgtcgcatcggccgacaacctac

SEQ ID NO: 1650 - DNA, 23639 bp, synthetic construct
  source 1..23639: mol_type = other DNA
  misc_feature 1..23639: note = Synthetic
ctgtggtggtgtttgctgaggagaaccacaataccgaggaggaattgattcgtgcgctcaccctcagcaatctcacggccatctacatcaagcaaagcctgggttcgctctcggcgctctgcggttgtgtcgtggccagcacgggcagcagcacgggcatcacctatctgatgggcggcaattatgaacaagtgtcgtttgcggtgaagaacatgatcgccaacctgacgggcatgatttgtgacggtgccaaacccagttgcgccctcaagctcacgacgggtgtcggcacggcggtgatgagcgcgatgcttgccatacagcacaaatatgtcacctccgcagagggcatcatcgaagacgatgtcgacaggagtatccacaacctcacggccatcggcagcacgggtatggatgtcaccgaccgctacgtgctcaatatcatgactcataaaggcaaaacaccgcaagataacaactaagagaaatcacacaaatcatctatataatgaaagagataaaatttagtctgctggtcgtgctgttgtggatgactgcagtgcttcaggctcaggaaatgcctgtgaaattcaccacacagcagaagcaggtgtcacccacagaggtggatgtcttgttcacggccaaaatcgacaagggatggcatgtctattccaccgatatccccgaaggtggtcctcagtcggctgtcatgcacaccgagaaggccgagggagctcagcccatgggtggattgatcaaacaaggcaaggaaatcagtgaggatgacaagatcttcgacatgaaggtgcgctattttgagaacaatgtcaccttcatccagaaatacaagatcacagggaagacctacaacatcaagggctatctggagtatggcgcatgcaacgacgagatgtgcatgcctccctcgaccgtggagtttgacttctccggcaagggaccggaagatgcgcccgcagcagaaccgcagaaggaggagaagcctgaggaggttgccgcaatgcccgtggctgcacttggcgccggcgactccctcgatactgtggcggctgacactgccgctgcttccgtgcccgtcgactccgctctcatcgccaaggctcagtctggttggtggttaaccagcatcgacaagctgaaacagctcaatggaggcaatatttccgaccgctcgtggctctatatctttctcatgggacttctctatggcctgctcgctgtgttcacgccctgcgtgtggcccatcatccccatgaccgtgagcttcttcctcaagcggagcaaggacaagaaaaagggtatccgcgacgccatcacctacggcatctccatcattgtcatctacctggccctcggcttgttggtgaccgctctcttcggaccgcagaaactcaatgaactggccaccaatgccgtgttcaacctcatcttctgcgccttgttggtcatcttcgccctctccttctttggatggtttgaactcaccctgccgtcgtcatggaccaacaaggtcgacagcaaggcctcttctaccagtggcttgctctccatcttcctcatggccttcacgctcactctcgtgagcttctcctgcacaggacccatcatcggactgctccttgtggagaccaccacttcgggcaactggatgggaccggccataggcatgcttggcttcgccatcgcactggcactgccgttcacgctcttcgccctcttccccacatggctcaaacaggctcccaaatcggggtcttggatgaacaccatcaaggtggtgctgggattcatcgaactggctttcgccctcaagttcttctccgtggccgacctggcttatggctggcgtttgctcgaccgtgaggtcttcctgtcgctgtggatcgccatcttcctgctcatgggcctctacctgatcgggaaactgaagtttcagagtgacatgggcgacgacaaggcgatgcctgtgccgtgcatcatgctcggactggtgtccatcgccttcgccatctatatggtgccgggactgtggggcgctccctgccgcgccgtgagcgctttcgctccgccgctctacacacaggatttcaacctcaataccaaggaggtgagggctgcctataccaattatgaggagggtatggctgctgctgctgccaagggaaaaccggtgatgctcgacttcactggcttcggctgcgtcaactgccgcaagatggagatcgccgtgtggaccgaccccaccgtggccgacaaactcaacaacgactatgtgctcatctcactctttgtcgatgacaagacaccgcttgacaaacccatcgaggtggagtacaacggcaagaaacgcacgctccgcaccatcggcgacaaatggagctacctggaggagatgaagtttggctatctcacccaaccgctctatgtgctcgtcgataacgagggcaatccgctcacccgttccttcagttataaggaggatgtggaggattacctcaagttcctcaacgagggaaagaaaaactaccgttgagaatgacagggcaaaggacggctctcttgtcaaccacctatttcggtccggtgcagtggtatcagaaactgcaccggtatggtgaggtgaggttggagtgccatgaccatttcgtgaaacagacctaccgcaaccgatgcctcatcgcttcggcgcagggggtgcaggcgctcaccgtaccggtcatccacgatggtacggccgacatccgcgacgtgaggatcagcgaccacggcaactggcggcaccttcattggaatgccttgtgcagtgcctacggcgactcccccttctttgagttctatgcggacgacctggctccgtttttcgagcggcggtggacttttctgttggatttcaatgaggagatcatggccatgatgtgccgtttgctcgacatccatccacacatcacgcccaccgaagtctattggtctgccgagatggtggagggagagggcaacacagacgatttccgggaggtgatccgcccgaagcatccgttgccggatgcggatttcttgcccaagagatattatcaggtgtttgagcagaaacagggttttctgcccaatctcagtatccttgaccttctgatgaacgaagggaatgagagtattttttatttgtaggagtttgggagtttaggagtttgggaatttaggagtttaggggtttgggagtttaggagtttgggagtttaggagtttagacgtatgctttttgtggcgttttttcccgctatccttcgttttgtctgttctgtcggttttcaaatctggcaagacgtagagcgacatcaaacctcattatctcatttgaaaatcagtgtggtgagccgttggggagaaaacagctcggcggctacttcctgtatttcctgtgcggtgatggcatcgatgttctggcagagacgctccacgtcgcgctcccatccgtagtgcaggaaactctttccgaaactcagggcaaaaccctccctggcatcgcaagcgatgccgatctggcctttcaactgttgtttggcggctttcagctgtgagtcggtgagcacatggtccaccatgcgctgaagttcgttgtgcaccaggcgcagacagcgtgacatgttgtgatggtcgcatccgaaatagacgctccaagcacccaggtcgctgtaactcaccatcgcgctctccaccgtatagaccagtccgcggcgctcgcggagcgagaggttgaggcgtgtgttcatccccggaccgccaaggatgttgttgagcaggtagaggggcatgcgcttgctgtcatggatgccgtaggcgcggttgccgaccatcacatgggcttggtgcgtgctgcggtcgaattcataggtgcccggctgatagccttccacggtttctcccttcgcgtcgaggtcgctgagcagcggttggttgtcgggaaatcctgccgtcgctttctcaagcagtctgacaagacggtcaaaatggaggttgccgtaagcgaagaacaccatgttttcgggacggtagaagcggcgggtgaacctcagagcatcggcggtcgtgaactgcctcaccctctcggctttcccgaggatgttgtggcccaggggatggttttggaagaggatgttgtcaaactcatcatagatcagttcggcgggggagtcattgtagctctcaatctcgtcggcgatcacttccacctctttgtcaatctctgcctgggggtaggtgctgtggaacacgatgtcgctgagcaggtcgatggcacggggcaggtggtctttcagcaccgcggcataatagacggtgtcttccttgttggtgaaggcattgaggtcaccgcccacacgttccagactgttgatgatgtgccaggcgcgccggcgcgtggtccctttgaaagtgacatgctcgcagaaatgtgccagaccttcctcgtcgggcgcttcatcgcgtgaacctgcgttcacgccgtaaccacaataaatcaccggagaggagtcatacaaatgtatcacccggagtccgttggccagtgtatgtgtgttgtattttgtattcatgatggtgtcttttcccattttttattccgagatggaacattttcgacgcgagcgccaaaattacgaagaattcccgaaatgcagtccgtttttttaaaataatcatccgatggtgtgataattcaggaaaaaaccctatctttgcaagactattataccccttgtggcgctgaagcactgtgaggggcatatcaacaactgtaataacataaggagaactcatgcgtaaagtaataggtataggagagaccgtgctcgatatcatcttcaagaacgagcaacccataggggccgtcccgggcggttccgtcttcaatggcatcatttccctcggcaggtcgggaatcaatgcctcgttcatcagcgaggccggcaacgaccgtgtgggcaagaacatcatcaagtttctcaaggacaaccacgtcaatgccgacgagatacatgtctatcccgagagcaagtcgcccatctcgctcgctttcctcaacgagcataatgatgcggagtatttgttctataaggaccatggtcacgaccagttggaatttgtgtgcccggaggtcaatcccgacgatatcgtcatgtttggctcctattatgcagtcaatccggtcatccgtccgcaggtgctgggcttcctcgactatgcccgcagccacggagccatcctctactacgatgtcaacttccgtccctcccacaagaacgacgtgatgaagatcacgcccaacttgttggaaaacctcgagtatgccgacttcgtgaggggcagcgtcgatgacttcaaggtgctctacaacaaggaggaccccgacaagatctacagtgccgaggtgtcgttctattgcaagaacttcatctgcaccaacgggacgaagaatgtcgaactgcgcgccacacgcggcatcaagaagagtttccccatcatccagaccagtacggtgagcaccatcggagccggcgacaacttcaatgccggtttcatctatggactgatgcgctacggcatcacccgcgaggcgctcgacaggggcatccccgcccgcatctgggacaagatcatccactgggcacagctgttcgcagccaattgctgccagaccatcagcaactccatcaccgtggagtttggtgctcagatggctgaggacgccaagggcgagaaggacacctacctggagtggtgacgcggcgatttttacagattagaaaacccaataatcttatcattatatgacaacaatcaccaataacatctattacgtgggcgtcaacgaccgcaacaaggctctcttcgaagggctctggccattgcccaatggtgtatcctacaactcctatctcattgatgatgagaaggtatgcctcgtcgatacggttgaagttgatttcttcacccagtttctcgagaacatccatgaggtgatcggcgaccgccccatcgactaccttgtcgtcaaccacatggaacccgaccacagcggttcgattgcgctcatccgaaaatactatcccggcattcaggtcatcggcaacaagaagacctttggcatgctcagcggtttctacggcatcagcgagaatgaactggaggtgaagaacggcgacaccctcagtctgggcagtcatgaactgaagttcgtgctcactccgatggtccactggcctgagaccatggtgactctcgacaccagttgcaatgtgctgttctccggcgatgccttcggctgcttcggtgccctcaatggcggagtcatcgacagcgagatcaactgcgacacgttctggttggagatggtgcgctactattccaatatcgtgggcaaatacggcacgccggtgcagaacgccctcaagaaacttgccggtgtcaaactcgactatatctgtgccactcacggaccggtatggcacaccttcatcgacaaagtgatcggcatctacgaccgcctgagccgctacgagagcgaagagggcatcgtgatctgctacggtacgatgtatggcaatacggagcggatggcagagatcatcgcccaggcagccagcaaggccggcatcaagaacatcgtcatctacaacgtgtcgaagacgcatcattcctatatcctgcgcgacatcttccgctacaaggcgctcatcgtgggtgctcccacctacaacaccagtctctatcatgagatggacgtgctgctctccgaagtggctcataaggacatgaaaaaccgcctcatcggatggtttggcagttatggctgggccagcaaggccgtggccaagatccaggagtggaacgacaccgccctgcatttcgaggctgtcggtgaacccgtggagatgaaacaggccatcgacgccgactcccgtgcccgttgtgaggccctgggtcgtgccatggccgagcgtctgattgaggaccgcgcatagataatccaaccgcgaccatgaggcccactgacttacaatccaaagtcatcgcattcctgcggtttccgctcatcgtgatggtgctgtttgtgcattgcaactacaccacgctgaacggagagtgggcttcattgccttttgccagcggttttatccatatcgtgtcgcagcgcatcgctccgattgccaatgcctttttcttctttatttcaggctacttgtttttcaagacggggcagttcgcactcgacatctatctcaagaaactcatccgcaggttgcagtccttgtttgttccgtatgtgctgtggaacctgctctatctgatcctggccatcatcgttggactgtttgtggcccgtgtgcccatcctgggcatcccgttcgaccagatgtctttcaccgacgggttgaaggccttctggaacatctccttgattgagggcggcagcagcatcaccgcacccatcgccgtgcagttctggtttatccgcgatctgatggtggccatggtgtgctccccgattctctatttcctcgtcaggtggtttatcatcctgtcggggaagcggcccctggtgcgctacctgttgtttgtggcggtcatctatgccttgggctatttcccccagatcacgggcatcaatcccgactgcctgctcttcttcagctacggcgcttatttcggtatccgcaagaaggagttcattgtggccatgctgccttacacccttcctgccgccattgtcctgggtctgctgattctcttggaacaatggtggccgtgtgagttcatctaccgcatggagtatgttgtcggactggtgttcggcatgtctttgaccacggtgatggtgagggccggcacctggtatgtcaacatgaccctctcgacgggcagtttctttattttcgcctatcattatctgttcctcggcttcgtggtgcgtttcctcagcagtggcgtttttgtgccccacagcagttggctggccattctcatctacctgctctcggtcacgctgaccgtccttctcggtttacttctttattggttgatgcgtacccggcttcctttcacgacctatatcctcatgggcggacggaggtagccataaccttatgatgccatgaaaaaaatgattcatcgtctcagtgtcttatcctgtggcttgctggccattggtcttgtttgtgcttgtgccgtctccgaggctacccgtcaggagcgggccgagcgtctggctcggctgaaggagaatatctccaccggattggcagagcggaagttccaaatcgacgtctctcaggcccatccacagggaagagggcgcacgattcatctcaccagttcttattcggtgagggtgtcgggcgacaccatcgtctcttatctgccattcttcggcagggcatacagcgtgccttatggaggaggacagggattgaatttcacgggccgcattgtgagttacgaatcaggcgtcacccgcaagggtgagcacgtcatcacaatgggtgtggagagttcggaggatgtctatgtctatacggtgagtctctttgacaatggcagtgcctctgtaggtgtccagccgcgtcagcgcagctacatctatttcaccggcaattatcacgaagaataatctccttattatttgcagtcatctctctataaaaagtagagacgtcacattggggcgtctccatcggggtttctcccgccttatgcgccctcacccatcttctcttggagagaggatgggtgagggtgtctcaacgtctcaaagtgagcggattaaaaaccagatgacggggacaaggagcgccggcaagaggttgagtgtgcggcagtccttcagctgaagcagggaaaggccgctgcctgtgatgagcaggccaccgataatcaatagttctgccatgagggcgtcgctgatggctgaggctgataaatgtgccaccagccagaacattccctgccaacagaaaagcacgggtgccgctaagatcatgccgatgccgtaggtggaggcaaacaccatggatgacacgaaatcgagtgtggcattggtgaaaagaaaggtgtggtcgcctttcaaagcagagatgacaggaccgagcatcgacaaaggaccgatgcaatagagcaggatggccgtggccagtccgtcggcaagacggttcttcttcccttcactctgtttggagtatttgtccaccaaccgcttgaaatgcccgtcgatgtcgagcgccgtacccacaacgccccctatcgccagtgatacgatgaagagcacagggtattccgactggctgaaatgggagatggtggcattcaggccgatggccagggatgccagtcccagaccggtatagagcacttccttgtatttgtccttgattccgcgatggagcagtgccccgatgatgccacccgcgataatggtggctgtattgacgatggttcctatcatgatactttgcacattattatttggaaagctggtgcaaaaataagacaatcttcctatatatccgtataaatggcaggaagaaatggcattttgcataccattcggagaaaatgtcatccgtttctgtcgatgagtggaatgtttcccttatgtcttcatttatactgtaaatgtaattacattctttattccatatttatcaataaatttgaccaaaatgtttattcatctttagcaagttgaaagaaaataaataattaacttccgcaaattgaatgcagtttgattgatacaaaaaatgccctccgaagagggcatataggataaaatccttcggcatatagccttattgtgataagatgtagaatatcttacgtttacaaagatagactaaaacaatgaaactacaaaaaaaaccgcaaataaaatgttagaaacccattttatttgtgtaattttggctcattatataaaaatagcgacaatatgaagaaaagaattcttggtatagatacaggaacaaatagtctgggatgggctgttgtagataagaacgaagatggcacttattctttaatcaacaagggtagtttaatctttcaagagggagtgaaaatagaaaagggaatagaatcgtcaaaagcagcagacagaacctctcatcgtgctctaagaaagcactattttcgaagaaggcttagaaagatagaagtacttaaggtgcttgttgaatttaattggtgcccgtatctgacgcctgaggctcttcatcaatggcatgttaagaaaatatacccgatggatgaagcctttatatcatggcagcgcaccaatgataatttcgaagagaatccatattattacaggcatatttgtttgcatagaaaacttaatttatgcgagaggtctgaaagatacattttgggaagggccatttaccacttagcccagagaaggggttttctcagcaatcgtcttgaacagggaaatgaagaagaaactggtaaggtgaaagaagctatatcttccttgtcaaagagcatgtctgatgttggttgtgattatcttggcgattatttctataagatatacaaagaaaagggaaatacagaaagaatacggacacgttatacagaccgcgaggaacattataagaaagagttttatgccatctgcgagcagcagcagctttctgaagaaataatcactaagttggagaaagccttgtatttccaacgtccgttgaaaagtcagcggcaaggagttggcaaatgtacctttgagcccaagaaacatcgtgtagctgattctcatccggcattcgagttgtttagaatgttgtcgtttgtgaacaatatcaaggtaaaaggaccttacgatgttgaactccgtcctctttctaaagaggaatttaataagatgaaacatctctttttcatgaagagtagaacgacaaagccacaatttgattttgaggatattgccaaggctattgcaggcaaaggtaaataccagcacatcaaggatgctggtgataaagaatataagtttaattacagaatgacacaaagcgtcacaggatgtccaactattgccagtcttatatccatctttggcgaagactatgaagcagctattgctgagcaatatacactttctgatggcaagaccgtgaagcagatggttaatgatgtctggaatgtgctatatagttttaatgataaggataaggtaaagctatggggaaaagaaaaacttcagatgagcgatgaggatgctgagaaattctcaaaaatcaagttgacccacagctttgcatcactcagtttggcagctgtcaacaagattctgccttggctggagcaaggtctcatttatccacatgcagtgttgatggcaaaagtgccggatatcgttggtgaggaagtttggaaaacccgtggcgaatctatcacaaaggaactatatactctgataacgaacttcaaccccaaggatgtcgctatgcagggaacgttggatttctgtatcaaagacatcttgaaagatatgtgtgatttggcacctggcacggctgaaaagctctatcacccctccatgatagaaacctatcctgacgcgaagaaaaattcacagggtgtgtaccagttaggttctcccaagacaaatgccgtacgcaatccgatggcaatgcgctcacttcaccagataaggaaagtcattaatactttgcttcgcgatggcaccattgacagccagacagaggttcacattgaatacgcccgtgaactgaacgatgccaataaacgtaaggcaatagcccaatggaacaagaacagagagaccctacgtaagaaatatgctgaagaaatacgcaaattatacaaggaggaatgtggaaaggaaattgagccaactgaagatgatattgtgaagttccaattatgggaagaacagaatcacctttgtatttatacaggtgaatctataagcattactgattttattgggcccaatccaagttatgatattgaacatactgttccacgtagtgcaggtggcgacagcactcttgaaaatatgacgctttgctccagcaggttcaatcgtgaaataaagaaagccaaactgcctactcaattgtcaaatcatgatgacattctggaaaggcttgaagagtggcgtgagaagatagataaacttcgtagggatgtggatcatgtaaaaacacattcaggaatggaaaaggccgtaaaagaccggcggattcagaaacgtcatctgctaaagttggaacttgactattgggttgggaaatataagcgtttccaaatggaagaagtgccagaaggttttgcccgtaggcaaggtgcaggtattggtcttgtaggtaaatatgccggcttgtatctaaaatccttgttccataaggctgacgacaggaacaaaagtaatgtgcgtgtcataaagggtgttaccactgccgagtacaggaagatgtggggtatacaagaagaatatgaaaagaaatcccgcgacaatcatgtccatcattgtattgatgccatcacaattgcctgtatagaacctggcgaatataatgccacagcaagatattatcagcagttggaagagtatgagaggacaaaggcggcaaaaccttctttccccaaaccgtggacatctttcactgaggatataaaagcaattgcgcagaatatgctagttgttcatagcacccctgataatatgcccaaacacgctcgtaagtatgtgcagacatccaacggcaagaaactcgccttgggtgactcagcacgtggctcattgcataacgatacctattatggtgccatcaatagagacggccatattaaatacgtcattcgtaaagaactgagcagtctcaaagaaagcgatgttgagaacatcgttgatgacgttgtaaaggagaaagttaagcaagccattgcagaaaaaggattcaaaactgcaatggaagaggacatctttatgaataaagaaaaagggatcaagataaagaaagtaaggtgttttacgccatccgtaacaaatcccttgcatattcgttcacatagagacctatcacgaaaggagtataagcgtcaatttcatgtcactttggatggcaattattgtatggctatttatgagggagatgttaacggaaagataaggcggacttatgaaatagtgaatatgattgatgctgcagcctatttcaaggagagtgcagatttgacaaaacattatcctattgccccagagagcaaaaatgggcttaaatttagatgcacgatacgtactggtacacagattatcttgttgcaatcagatgacgagaagataaatcttgaaaacaaagaagatcttgtaaggcgattttattatgtggctgttatgcaaaaggatggaagaatagttctgcgctataatcaagatgcacgagacgcaacgacactgaagaaagaacgtaaatccggaacttataaagttggagagcaatatagatcagaaatcatgctatctctctcagacttccatgccttggttgaaggggttgatttcaaaatcaatattcttggggaggtcgcaatgctttaataaagagttaaggggtttgcgccagataagggacatgtgagcgttctttcaattacggataagcaatattcgaacatcattcacatttggggagccatagagaaaaaatcaaggccaaccccattgcaattggaatttttttagtatttttggagagaggaaaggctattagaaccacttcatataggtattatatgttataagtgtccgaaaacaagcaaaatatgacaaatatgttgtggtttgatgtagaataaagataaaagacaattgagaataataatcttgctcgccagatgtgttgtggtttgatgtagaataaagataaaagacaattgtagcacgtctcgccctcgcctgtctcgtgttgtggtttgatgtagaataaagataaaagacaatgaagccctactatatcaacacaggtataagttgtggtttgatgtagaataaagataaaagacaatagaatcagaatccataaaaggataagcaaagttgtggtttgatgtagaataaagataaaagacaatgacacccatctctttgccaacttcgataaagttgtggtttgatgtagaataaagataaaagacaattggaagaaacatggaacaatagcaccaaagttgtggtttgatgtagaataaagataaaagacaatctcggaatcgtattgctgcgccaacagcggttgtggtttgatgtagaataaagataaaagacaatacaccctttgcggtaccagtctcgcagtagttgtggtttgatgtagaataaagataaaagacaatccgacgacatcgtgcggcacatcctcgacagttgtggtttgatgtagaataaagataaaagacaatcgctgagagggcaggtagacgtccaggtagttgtggtttgatgtagaataaagataaaagacaattcaatcaggtgtcacactggaaccaccacgttgtggtttgatgtagaatagagataaaagacaattaaatactcaagggaaggatgttcgtgctgtttttcgccatgtgctactatgcatatttcaacgagcagttgggacagatgaagatgacactcagcgttgcaaacgggaatgagaaatatgacacgaaagttgtgcttaaggcagaagaaaactctcttatggtgtggatggagtataacaccccagtctgtcttcagttgctatggacgaccgtttgatttgagaacatattatatatttttggggttactaaaaaataatcgtaattttgcagcgagaaatagaaacgactatgacaaaccaatccaattcggcagcacagcgcaaatcagccatcaagaaaatcctgaactcagagtttttcgactatgtcatgatagccatcggcatgatggcgtatggcatgggatggacgctcttcctgcttcccaacgacatcacgacaggtggcgtggcgggtgtatcctctctcttgtactggggcatggaggtgccggtgcaggtgagttatttcggcgtcaacgccctcttgctgttgggcgcgctcaaggttcttggcttccgcttttgcctgaagacgatttatgccgttggtgtgctcaccctgttgctgtcgtttctcactaatttgggcaaggagatgcatctgctgcaggaccagcccttcatggcgagtatcatcggcgccatcttctgtggtagtggcgtgggattgggtctgtcattcaacgggagcactggcggtaccgacatcgtggcggccatagtcaacaaataccgtgatatctctttgggacgtgtgattttactctgcgacattttcatcatcacttgttcctatctcgtgtttcatgacttcgagaaggtgatctatggctatgtggtgctctgtgtcaccgccttctgcatcgatcaggtggtgaactcccgtcgcagttcggtgcagttcttcatcatctcaagtcattacgaagaaatcgcccgccgcatcaaccaggaacctcatcgtggggtcaccgtgctcgacgcgcagggcttttattccggccataacatcaaaatgctctttgtgctggccaagaaacgccagtcgagcgagattttccatatcatcaacgaggtggatcccaccgctttcgtcagccagagccgagtgatcggtgtctatggtgaaggcttcgaccatttcaaatttcataaataaaaaggtgcgctttttaccttgaaaaatcattattttttgtgaaaagtgatataaaacacccttttttgctttctttattagtaactttgctatctgtatgtgcacatcatccgcgagggtggtggcttttgaatgtttaacctttaaaaaaatgcaagaaatgaaaaagctattgacattggtgcttgccatggtgatcggaatcccgtgtatggcacagaagtggggactggtgaaagacgaggatggttacaccaacgtgcgcaagggtccgggtactaagtatgagattgtagaccagattcccgacggcatgttcgtgagctataagtccacgggcacaggatggcacaaggtgttcaccgtctataccgatggttcggaacccgatttcctgggatatatgtctgccaacaagattgtgacgcctccgcgtatgggtgaactcaaggaagtggccatggtgaaggacgaagacggctataccaacatccgcaagggtccgggtaccaaatatgccattgtcggaaaggtgcgcgacggaggatatatccttatcaacagcggatcggatgccagttggctgaaggtctatacccagaaaggcaagttccgcggctacatcagcgccaacaaggtggtcaagatggagtcgccagttttctaaaccatttttgcaatgaaggaatctctctatcgattggtcctgggcggatgtgcgctcctggcggtgctctgcttgtgcatgctctcctgtgtgagggagcgtgtggtggtctccatcgatggatttgacctccacgcaccggagggggtcaccgtgggacgggcgtctgacatctgcttcgacaaggtgcctcacgacttcctcaccatccgtcgcacggccggagggttctcctggcaggtcaacgaccgttggctgaggtcggactcgctgtgttatttccatatcaacggcgagaatcccaatgcgcataaactgtcggagtcacagaccatcgtggtgggcacgggcagacagcgcaccgcattgccggtaagggagttggatgccttgctctcaggacatgagtcgcagtatgtgatgctgcgcaatgccttggagaagcggcgtcaggaaactggcggcgaccaaggggatttccgggagagaagagagattcgttcgtttttataccgctccaagagccattggggttctttgggggcgtggcagctcgtcatcctcgaccgtcatacgaccatcgagggtgacgggacctccatcggctatgccacggccgattcggtagccaactgctgcaaggtgcagttctaccgtctgatggaatacagtctgatgtcggacagcaaaaaactgttccgcatcggcgatgtcagttacctggccaaacctgttctccagactactgcatgggaagcaggacatgccatgatccgggaggaggacggatggttcaccgtccgttatcccaagcctctgacctattctgaggattgcggtatcctgcgggagatgacagagggaaagaccagtacgctgaccttgcaacagaccgacgggtcgctgcccgtgggtcagagtgtttatatcccgcagttctccaggaaagtgagcgaggaggtgtgccatctgacggtcgcgggcgatagtttgctcgtagccggacagcgggtgaagtctggatggagcctggtgccccggttgtcgcccgtcgaggtgaccatgggacaggcgcgcctgcatctgcacacagcggtcatcggcatgggactgctttgttcctatctctggctgcctctggtgattttcctgctcatcttcttcgcttatcccaaactgatggatgtggaggggaagaacatccgggggatgaccttgtgggcggaagacctgccccgcatgttccgcatggtgtctgccatcgccttgatctactgcatctgcaaggtgatgattgcggtcaaactctcctggaccgctccttattttgagaaactcaccggggtggtggtggttgatagcggactcttgctcatgctccttttctcattgtcggtcttggtcaattatgattttctccaggctggcgaaagcccgcgcggacacatcggatggcgcaagtgggcggctctgctggtggccgtgtttggagtgactctgtgcttcttcgccctgaaggtgatggaccgtggtttcagccgtgaggtattggcatcgtatctgccaggagaggtcttctcctacaatccctttgcctggacaaagaaaaacggaatcaacgacctccaccgcagcatcccctatactttgctgctgttcaacctgttgactatcctgctgctgttggctcataatgtcagagccacgctgaaacagtggcagagcaaaggccgtcgggaagagcgtgacagggttcttcagcacaacaggaaaaaccggtggtggtcttctggacgtgccagcaactgggtggcgctggtcgtggcattagcctttgccatactggtggttctggccaccttgattcccggcaatttctcctcagcaccgatctcactcctggtcatcctgggcatgggctatgcgctgatgcgcgtggacttcgtccacaaccgggtgtgggcattcctcacctctgtgggtgtcgctgcgatgctgctcatcgccgcagtggcgccgtccacggccgacaagggttatttcaccaactgcctcggtctggtgagtctcgtggtgctgctgtatgtcatcgtgtcgaaatacgaccattccccgtcgtccgccgatctgtcgaatgatgccaaggagcgcaagattatgaacatattgatgggtatgatgatgctctttgctgtctttgccgtgccgaagatcatgacgctgctgcttgatgtcgagaatgtcgattacgacaggtcgccgcgccggtttgagatggcctcgcagtttgacgactaccgcaacagcggttaccgctatgccgtcagcgacacggagttcatgatggtgatggttcacagcatgttcaacgccgatggccgtgacccgctctctccggagcggcatgtcctccatccgtcagtatccaccggacagtcgcctgtggtgctcaacgacgtggcggtgcccgtggcttttttcggcacctatggatgggctgcctatgtggtttatttcggactgttggtgttgcttctcgtctcggtggtgggttattgtctgcctgccaaaagacagttggagagaggggtggagatcgacgtgcggatgctgtggcggttgctggccgtattgatgtgggtgggtacttcctgctacctctacgggtcgtatgtcgggcgtttcccgtttacgggaaggttgaatcctggtttcggtgtcgattccgtgggtgagatcctcgagagtgcgattctccttgctttcatgacggccgtatccttgcgaagagacaagcaggtcaggacaaatcaatcaagactatgagaataatcaatgatatcatcgggtttttcgtcaggctttacctggcgttgaaggaacgtttcacccgtcccagggagaagaaagtgatgaggcttgccgtagtgggacccacaggatgcggcaagacctacctgttgtgcgacatcatcggttcgttggagaaactgggttgcaggcgtgacgacaagtacaatgacggtacgctgcaccgtgacgcctacgatcttatcgagaaccagaagcacaatggaggtatcgacaagaccctgatccatgcctgccggcaggaggatatctattgttctcgtttcatcgacaacctgggcaaccggatgaccatccagtttaccgatatccccggtgaggtgatgacaccggagtcgatgagcatgttccgtgcggtgatgaaggccctgatggcttgccgcaacagacttttcctggccaccgactgggataaccccaagacccacaagacggtgagaatcattgaactcgtccattcggaaaccagcaacatggccgtcagcggactgggcggcaaactgagcttttccaacgggggaagactcgctgctgatgcccagggacaagtgtatgtcggcacatcggccaggaaggcttattacgagagacaggacttccacgagggccggcaacggaagatcagcggcgccgatttgttcctcgacttcctgcactgtgatgtcgacagtgttatcaatgccatcatcgaggcctgggaactgctcaagatcgatgacgtgcttccgcagaaactcaaggctgcggcttcggggtcgggcaagtcgctgtttcagaatgaatacaagaaccatttcttctttcactacaataccttcttcgctacggatgtggtggtgtgcgacaagtgctgcatgcctgtcatcagtgaagagaaagagactatcaacgatcggtttacaacgatgatgcaggtgctcagaaacctgaccaactacaaggatgctcctgccaagaagtggtatctggccatgaagggcatcgatgccgtgatgagggaggagaaatggcgtgaggtctatcagtgttccgaacaagacctcaacctggtctattcccacttcctcgtactgttccgccaggcttgtgaacatggtttgttggccgacggtaccgttcccgccacttatacagtgccattcagttcccccgaacggatgatggactggttgacgaaaagggaatgggatgtggatgaagaggaggaaaccacagaggacaaaagccagttggtgtcgctcctcgatggccattaccgccgtttcgctgctgatgtggacctgtttttcaaacgtccggaagaatatgtcatgctctcggcttatgacctcagcgaacatgtgcggcgcagggtggatgacttctgccatctcgacgactcgcaggtggccgatgacccggagaagcgggatgagcgccggttgctcaacctgcccccgcatgtctatttcatcgccacacccatcgacaacgagtttcatatctgtggccattgtgccgatgaccccacgctcttcgagggtgatgcgagtcactataaccaccgcgccggtttcggcgcgctgcaactgaccacggacatccttctcgctcatggtgccaagatcagtgagaaatacaactgtttcggttatgtgcttgaccatgttcatgaccaggcataggaggtaggggatatggaagagggcatgaggatagaacatctggtgatggggtcgctggtcaatgaaccgggggatacgacgctgtctttcacccctggcgtgagcagcggcgctgaggcgctctgccgcatgatggcgggcgacggacccaagcatgcctcatggtatctccttcatcccgccgccggacagcataccattgtccatgtgcaaggttcacacacctcctttggtggtggtgtgcgtgactatgccacacgggtggtgtatgagtttgactctgcggccttggtggccgcaggcggatatttgccgttgttgccgtcgctcgatgcgatgcgccgttatgaggaaaaacgctacgaggcctctcccgataagatggtgaaggcgaatgccaccagggctctttccgtcgtggagcggcaactgctgaatgacgtggcctacagcctggctcgtcatcgcaggttgttcatccgggtcggagaggatgaactgcgggtggccgatgacctccgacagtctccacggctgaggtctttgctcggtgtgttcgatcatcttcccctacaatggagggattggatttcgatggctttctcggtcaacagttcgtcgggcgatgctcaaggtttgttggcggacatccacgtcgtggtgcaccatgaccctgtcgaggcctggggcgatgcggctcgtggcgcctgcgtgctggactggactgccgcccaacccgaatgggtgccgcaggagggagatgaggacttgcccacggaggaggacttgcgccggctcggtgagactgagcctttcacctcagacccgtctgtctcttccggctcgtcaacagcgggtgatgtacccgttgaggcagagcgcacccaaaagacgcctgtgaaacgaaaaggatgtattgtaaacatattggagacagttttgtcgatagttctggggtatgtgtgctgtcatatactatagaaaccaaatgatgaggatatgaaattcaacagaaaatggatggagcatcatggcatgttggtcagactggttctgatcggctttgtcttgaccatggtcttgttcacagccttgaaacgctgcaccgaggtgggcaagtccgcggccaaggaggtgtatgtgcccagcaacgacgagggctttgtcaagaaagccaatttgttgctcagccatcttgtgcaacagggcaatgatgagcactccgacatccatccgcattccatcaccaccttgcaggagcgctatcccgccctgcagttcgccttgccctacgacgaggatgccgtggagggcgccagggcaacggacatcaggttggtcggcatcaaagccgacctgattcaggatgaggatgacaagaacttctattacaacagcaaccttcccaaattgttggaacagcagcgcgagaacctcagcgaaagggtgttccgcatctctttttctgcggtcgattctctcgtgatcggaaagatagaggtgatggcccacctcttcaaggtggcgctcagcaaggacccctgggtaggaaccgtttcctgtgcagacaatgctctctttccggaggctgagcattgtttcctcacctgggggaagtcggtggtacccatccgcatggtgcccgacagcagcagggctttgcaaggaggacacgaacaggtggtgcggctcgacgagaattcgcatactctgacgatgcaggaaggacagcccatcgattactaccggctctttgccaacgatgaggagggacggacgacactgtgcgtcaccctgccgtcggcaacgggacgccgggtctatctcgactacctcaccggaggccggttgcgcgtgaggtgtgtgggatgctggtgccagccttattgcgagtcgggggcactcaagactgtgccgcccacttcggcagcttcacagggtgaggtgtttcccctcaatcatcagctcaaactgattgtctctgcccagcaacagtcggagacgttgggcgaactggtggtgagccgccgcaatccgatgctcaccctctcatcgctcatccgttcgagcaagggccgttcacgctataccatcccctccgtcctgaccgaccgcttcacccagcagattgtccagggcctttccggtgcgctgcgcaattcggtctataaggacagcatccacctgagcatcgaccctatgctctccatggtgatggaacgggagttggagagttacgcccacgaactcatgggcaacagggagaaattctatgacgatgaccaatgggaactgtcgctcaccgtgatggacatggcgactggcatggtcatcgcagcgccttattaccggtcggccgaccgtgaagtggatgaggcactggccatcagccgcaagaatcccgcactgacacaccggtatatcgggtccaccttcaaaccgctcgtggcactggccgccgtgcttacccgaccggaacttgcgcgactctccaccgtgggcgactaccgcatcacccgtcccggcgatggcaagaaagtgaaggccaaggccatgttttacggtcatgagacctctgcctggtcggccaagggcagtgccgc

SEQ ID NO: 1651 - DNA, 23633 bp, synthetic construct
  source 1..23633: mol_type = other DNA
  misc_feature 1..23633: note = Synthetic
ttatcaatctgctgttcgacctcctgttcgtcgtcttcggctggggcattcagggcgccgtctatgccactatctgcagttatctgctgtcgttggtgatggtcgttcccgaggtgcgtcgccagtggcgcgtgttcgccctgacgtcagtgttccgctcctggttcccctcgctcacctggcattgcggcaagcttggactttccgacgccacaggctcgttcgtctcagtcatcatcttctcaggcatcaatgcagccgcccagcgcctctatggagccgacggtctcgtcgtggtcagcgtgttcatgcagatgctgtctgtcggttcactggttacgatgggtgtcatcttctccatgcagtcgctcggcatgaccttcctgggcgagaacgaccttcgtggctatcgcatggtcatcagccgcagcctggtcatcgtcattgcttgcatgggcatcatcagcttggtgatgggactgtcgcccgagctgctgcttaggtgtttcggagccgatgagcaactgataggcttcgcccgccagcccatcatgattctcagcaccgccctgctgccgtttgccctcctgttctactattgctcagtctatgtcacccagaatcgggttcggctgtcgataggcgtcatcctctccgagccgccgttcatcctggccacgctgtgggtgatggagcactacttccctgggcagttctggtggttcttcaccgtaggtgtcgtcatcgcccttgccgcctgtcttgcaacggcctggatgatctctcgccgcaatcccatggtcgatcgtttcacactcgctcccaagaccgtcgatgagccttatctcgactactccttgaactacgatgagcaggaggcccgttctgccttcctcgacattctgaagtatctcgatatctgcgaactgtcgaaagggctgtccaaccgtattgccgtctgtgccgaagaaatcatgaacagcctcattggcttgaagacccaggagggcatgtcctgccgtcatttcttcgatgtccgcatgatggagatcatggacgacgcgggctcgcagtcgcgcggcatccagttcttcttgaaggcgcgtggcaagtccttcaacccagtccgcgaactctccctcaatcccgagtccatgatgacaggcaatgcactcagcctactcctcgtcaacaagctatgcgacgatatcgactacaactaccgcaacggtgtcaactgcgtcaccatgaagtttttcaagtcatgattccttaggtttcacgtgcccagaaccgtgtgttcattatgacagcgtcattttccgcacccacgaaagagagcttagccgaaaagtgctaggctctctttacttctgtgaaacttttgtcgacctaagatttgatgatttcgtggaaatgatgtaactttgcagcggattaaaagattagtaattatgaagaagataatattggccatagtcgccatcatgactgccataggtgttaatgcccagacaaacctgacaggtagggtgtatcataatcccaacattatggctaaaatgatggagcaggaagtaaacatcgacaagaaaattgctgaagcccggaatgaggctattgccaaaatggagaagaagaaaggccgtaagctgactaaagaggagttggcaaagatcgataaagagctagcgggaatcaaaaagcaggcagaggcagcgaagaaatgcatgtcaacagcgataaccgtagaattcaccagtgccacagacctcgtcatgaggcaaaaaaccagggtggacgacgaggccttgaaaatcttgggagtaggatggcttaaacgcaaagcccttaaagcttcactcgccttaatgcctgagtctcagaaagcgaagtatgaggtgaagggtaataaggtgattgttatcgacgataaggatcgcgatacgcttaccataggtaacgacggaaataccctcagcggcatattcgacaaaaaaacaaaatataccctgaaaaggacaaagtaaggtgtcatttttggctatacctgactttgaagtaatcacacttgctgacaaaaaaaggagcccagccttataggttgaactccttatttcgttacaggaggaccgaaatcccctgaatgatggcggtgttagaatttgtaagaatcaacaatcgagctactacccttatattttttttcgatagtaacctcgcttccggtcaagaatttgccatatttttctttcagcgtggaggtcacctcttgacaacccttcttgatctggtcagacacatcggtcttactctttccctcgggagcatatttgtaaacaacaccagtataaaggccctctacataggcttgtgtcagttctgcaggcacctcgctgattccaccagccctgacgaaacggatagtgatgtcgtactgatacatatcagctgctgagctgctgtcatcatcactgccgcatgaggtaaacactgttgtaagaccgcagagaaggatggcggtaagcatccacaaaattcttttcttcatttctttttagtattaattgtttgtagtacgttaatagcgttttgatatttatattccttataaaagaaaagtgagtttctttgcggagagagagggattcgaacccccggtacctctcggtacggtagttttcaagactactgtaatcgaccactctaccatctctccagtgctctgatgtctcgaaagcgggtgcaaaggtacaagtttttttggaaacctgcaaattttaaagcaacttttttgctaattcgatagaaaatgagtaattttgcagcgtgatttatccgaataacttcgaacgcaagcttggtttcgacgaaataagacggctgctgagggaacgttgcctgagcacgctgggcaaggaaaaggtagatgagatagccttttccacagactgcgcgcaggtgaacgaatggctgacgcaggtgcgcgagttccgcaggctgcagacggagaaagacgacttcccgatgaatttcttcttcgacgtgcgccaggccgtgagccgcatccgcatggagggaacgcatctggaggaagaagaggtgtgggacctacgccgctcgctgcagacgattgcggacatcgtgaaatacctgaaccgcaacgaggccgacgacgaggaggaaccagaatacccctaccctgccctgcaccgactgacggagggcgtgaccaccttccccgccatgattcgccgcatcgactccatcctcgacaagttcggaaaaatcaaggactcagcctcgatgacgctggccggcatccggcatgagctggaaaagacacagggcagcatctcgcgtaccttatatactatactgcactcggcacagaaggacggcatcgtcgataaggacgctgccccgaccatgcgcgacggacgactggtgatacccgtagcaccccaggtgaaacggcgtatcaacggtatcgtgcacgatgagtcggccacaggtaagacggtcttcatcgaacctacggaggtggtggaggccaacaacaaagtgcgccagctggaggctgaggagcgccgcgaggtgatacgcatcctgaccgtattcagcgacgaggtgcgcccacatgtgaaagagatactcgagtcgtaccagttcctggcacgcatcgacctgatatacgccaagtcgcagttggccgaactcacgaaggccttcgagcccgaagtggaagacaggccgcacatcgactggataagagccatccacccactgctgcagctctcgctggagaagcagggcaagcaagtggtgccgctggagatcacactgactcaggagaagcgcatcctgatcatctcgggtccgaacgcaggcggtaagtcagtctgtctgaagaccaccggactgctgcaatacatgctccaatgcggtctgcccgtacctatcggcgacagaagcacctgcggactcttccaccacatcctgatagacatcggcgacgagcagagcatcgaaaacgacctctcgacctactcgagccatctgatgaacatgaagcagatgatgcgccaggccgacggacagtcgctgctgctgatcgacgagttcggcagcggaacggagcccaccatcggcggagccatcgcagaggccatgctgaagcagttctggaagaaacaggccttcggcgtgatcactacccactaccagaacctgaagcactttgcggaggaccatcctggcgtggtgaacggtgcgatgctctacgaccgtcatgagatgcaggccctcttccagctcgccatcggacagcccggatcatcgtttgccatcgagatcgcccgcaagacgggtatccctgaagaggtaatcaaagacgcctccgacatcgtaggtcaggactatatccagagcgacaaatacctgcaggatatcgtgcgcgacaagcgctactgggaaggcaagcgccagaccatccaccagcacgagaaatcactggagggccatatccagcgctatgagagcaacctcgaggaaatcgaacgcgagcgcaaagccatcctgcggcgcgcccaagagcaggccaatgaactgctggcagaagctaaccgcaagatagagaacgccatccgggaaatcaaggaggctcaggctgagaaggagcgcacgcgagagatacgcgaggaactgaaacaattccgcgagcaggtgaccagcgacgacacgcagggactgatgagcgaagaggagtttgccaagaagctgcgccagatggaagagcgcaaagcccgtaaggagaagcgcaaggccgacaagcagaagaacgccgaggaggccaagcagcgcagggaacaaggtccagatatcacattcccgcagacgctccacgcggctattgccgtaggcgacaccgtacgcatcaaaggtctcaacacaatcggtaaggtggagagcatctcaggcaagcaggcactcgtgatcttcggcgacgtgaagaccaagatgaaagtcgagcagctggaacatgccgagaaagccaaggaagagaagaaaaagtcggaccactcggatctggccattcagacctcccgcataaccagctcgaccatcgaagaccgtaaatacaacttccgtcaggacatcgacgtacgcggcatgagaggcgacgaagctttggataccgtactccacttcatcgacgatgccatcctcgtaggtgcctcgcgcgtacgtatattacatggtacgggtacaggcgtcttgcgccaattgatacgccaatatctagccaccgtacccaacgtaagccactaccgcgacgaacacgttcagttcggcggagcaggcattacggtagtcgatttagactagcttcgaggccctttcaggccgtttacatctcttgacatatatcatgtgtgcgtgcacataattcttaaaaaaaccaaaaatatttggctaagtggctgaatgtccataactttgcacccgaattctaaaggataacgcggtactcgtgatgagatccgcctaaagtatagagcttatgattatagtaaagaaagcaagtgtagccgtgatggctcttgtattagcttgcacaagcgtgtcagcaggcggcaatgccaaaaagagcaaatcaacatccggctttaactggaatccagttatggaggcaattattcaggtagaaagcggcggcgacgccaaggcagtgagcggaaactccgtaggtgccatgcagatcaccccgattctcgtgaaggattgcaatgcgattctgaagaagcagaacagcaagaagcgttttacgctcgacgaccgctacagcgtggcaaagtcgaaagaaatgttcaagctgattcagtcttatcataacccggagaacaacattgagaaagcgatccgagcctggaacggaggacctaagtacagtgtccgcgccacgaacaggtattttaagaaggttatgagcaagttaaaatagagaattatctctagactatacaaatccggttgtcaggatgaaacctggtagctggattttttattttaaataaatcctaaattatttgtcggttttaaggacaatccgtatctttgcacccgataataaacttttaaattatatttatatgacactgattatcattttggtcgtcgtagccgtcctcgtattgggcgtcatcggcatctacaacaaccttgtgaaactgagaaacaaccgcgaaaacgcgtttgccaacatcgacgtgcagctcaagcagcgccacgacctgattcctcagttggtagccaccgtcaagggctatgccgagcacgagaaggaagtgctgacccgtgtgactgaagcccgcgctgccgctatgagtgccacaggcatcaacgacaagatccaggcagagaacgccctgagcagcgccctggccggactaaaggtatcgcttgaggcctaccccgacctgaaggccaaccagaacttcctgcagctgcagactgagattgccgacatcgagaataagattgccgctacacgccgctacttcaataccgctacgcgcgagctgaacaacgccgtgcagaccttcccgtcgaacatcctcgctggtatgttcggattcaagaaggagccgatgttcgagattccccaggaagaccgcgccaccatcgagaaggctccggagatcaaattctaaaggctgatgaagtacgtaggcatacagagccagatatccagcaacaacacgaagagtatgttgctgctgattgctttccccatcatcttgttggggatgacgtgggtatttctggctaccatcaactacttcagcacaggctattacgaccaggcaggttactttgtgaaccaactcgacgcagacagcgtgaactggacattcacacaagttgctcccttcatcgtcggcggtgtggccatctggtttgccatcgcctatttcagcaacaccaagatgatccagcacgccacgggcgcccagccgctgatgcgcagggagaatccgcgcgtatataacatcgtggagaatctctgtatggctggcggtatggagatgccgaaggtgaacgtgatcgacgatccgcagctgaacgcctttgccagcggcatcgacaagaactcctataccgtcaccgtcaccacaggcctgctcgaccgcctcaacgacgaggagctggcaggcgtcatcggacacgagctgacccacatccgcaaccgcgatacccgactgctcatcaccagcatcatcttcgtaggcatcatctccaccgtgctctcgctcgtggtcaggatgatctacaaccgtatgtggtttggcggattcagcagcaacaacaacgaccgtaacggcaagggtggactctcaacgaccgtcatcctgctcatcggagccgtctgtgccggtatcgcctatctcttcatcatgctcacccgctttgccatctcgcgcaagcgtgagttcatggccgatgccggcggtgcagagctttgcggcaatccgcaggccctcgcctctgccctgcgcaagatctcggctaacccaggtctcggcgatgtggagcgcgaggacattgcacagatgtatatcatccaccccaaacagctgtcgcaaggcctgatgcagttcctcagcggactcttcgccacccaccccagcacggaagagcggatcaggatcctggaacagttctgaacgaatccccaagcatcgtgagcaaatttccctccatctctccctcttttgcttgaaacccctttaaacactggggaagcagagagggagagatatttttcatccctccctcatctctccctcatctctccctcaagcctcaggcaaccctgagtggcaccacctcatagtaggccacgtgggagcgctccctgtgcttgaatccgagcgcagagatcacctttcccaacctcaccttgttgccgatggtgttttgcaatgtgggataatcccgctgaatgatgctcacgatctggtcgcagttcatcgtcttcaccacctcaccctcgttaggctgacggaagcaggccgtgaacatctccccgatgtccttcttctccatgaagtccaggttcagctgctggatgcgggccacctcatcgttgctgtaccaataaggagccttcagctccagcagctcatacatcacctgtgcatacagctgcccgtagtcaatgtcgcccgtgttgtcgatcatctgcccgtctggaatctggatgcagatatagcggcggctgcccgttgcgtcctgcaggggatgacggttgttggtagtggccacaaacgaggcaaagcgcagcctgtcctcctgggcccgtccgaagataggacgtccgttcaccttgctcacagagagcgtctgcttcaacgacgactgctgcgagggtcggatggcatcaagctcgtcgaggttgacgatgagattgttcgtcagcgccatctccttgtcaaacttgttcgataggttcaggtggtccagatagtactcacgcaggttggcaggcaacaggcggcgcacgaaggtggtcttgccgcagccttgcgagccaatcagcgtaggtacacactcattgccgtgcagcatatccatctgcatccagtgggcaacggcagagcgtagccagacggccagatagttcagctgctccgagctgatgccaggcagacggctgaagatacgggccacgtggttctgtccgtcccatttcggcagactcttcaggaatgcctgcacgggattgtattcaggcacctcttccgactccacatagtcggctatctccgcctttgggctacccttctccagcacgtcctcgcgcttggcccggatcacgatgctcttcaaggctgcctgcgtcagcgggcgatagttcagttcagcttcgtcgaagccgttcgagaggccgtcggcagcatcagccgcctccggcaaagttgcaaactccaccttcccgttgagcatgttacgacggaaacggtagtagttcatgaggaattgctcgatcacaagcgctccctcctgtgaagccctgagggctccatcagtcaatagtaaactgttcttcatctgttaatatttaatcaaaatgttaatctacttccttcaggctttatccttgtagtaatatcgagacgcgcttctcatagcgtgctttcgtcataacgcgtgtgttgccgcgttttcgagtgcaaagatacaaaataaaatcgagacttgcaagatttgccgttccaattcgtgcttttttttcccaaatgttaaatcaattggataggcgacgggagggatgagggagagatgagggagagatgagggagagatcaaaattatctctcccgctctgctcccccagtgtttaaaggggtttcgtgcaaaagagggagagatgagccattttttgcgactattaatagaaaatattgcgactattaatagaaagcgttgcaagtattaatagcaatttttagtcccaaggcgggactatgatgttcccaggctgggaacatttcattcccaaggtgggaacatttcattcccaggctgggactttttgctgcctagttaggtagcaaattctccatagccagcttacggctcgaccgcaacaaggttacggtctttcctcttcgatccgaaacctctcctattctccgcataaattcggcaatagactcgttttattgccgaattttttgtttcggcagggcacaatccacaatttttactaaaaaaggatgtagcttacaaatgtcccaacaaaaaaatgccctccgaagagggcatataggataaaatccttcggcatatagccttattgtgataagatgtagaaaatcttactggttgcaaagataacaaaaaacattgaaccaacaaaattatttcactaataatttgctcttgttattctttttttgtaattttggctcatgatttctaaaaacctgaaaatatgaagaaaaggatacttggtatagacactggtacgaatagccttggttgggcggttgtagataaaaatgatgatggggaatattctttaattcataaaggtagcctcatctttcaagagggcgtgaaggtggaaaagggaatagaatcctcaaaagccgcagacagaacagcccatcgttcacttcggaaacaatattttcgcagaaggcttaggaagattaaagtccttgaggtacttgttgagtttggctggtgcccctacctctcttctgaagcacttcatttatggcacgtaaagaaaacctatccgatggatgaggctttcatgtcctggcaacgaacaaatgataattttgaggagaatccatattattataggcacttatgcctgcatcgctacttggacttaaacgaacagagtaataggtatatattaggtagggcgatgtatcatctggctcagagaagaggtttccttagcaatcgtcttgaccaaggaaacgaagacgagacaggtaaggtcaaggagggaatttcctctttgtctaaaagtatggaagaagccggttgtgagtatcttggcgatttcttttataagatatacaaagagaaaggaaatacagagcggatcagaactcgttatactgatcgcgaagaacattataagaaagagttctatgctatatgcaaacagcagagactatcagaagaacagatttcgaaattggagaaagccttgtatttccagcgtccgctgaagagccagcgacaaggagtgggcaagtgtacttttgaaccaaagaaatctcgtgtggcagattctcatccgtcgtttgagttgttcagaatgttgtcattcgtaaataatattaaggtaaaaggtcctcatgatgtagagcttcgtcctcttacaacggaagaatttgaaatggcaaaacctgcatttttcaggaagagcaaaccgcagtttgactttgaggatattgccaaagccattgctggcaagggcaaataccaatatataaaagaaataggtgaaaagccctataagtttaactatagaatgtcgcaaagcgtcactggatgtcccacaatagcaaatctcatgtcgctctttggtgatgactatgaggagggtattgcagaacgatatactttatcagaaggcaagactcctaaacagatgttgaatgatgtttggaatgtgctatatagtttcagcgacaaggacaaggtaaagcaatggggtaaagagaaactgcagttgagcgatgaggaagccgagaaattctcaaagataaggcttacccacgcctttgcctcactcagtttagcggctatcaataagattcttccttggctggaacagggactcatttatcctcatgccgtcttgatggcaaaggtacctgacattgttggagaagaagtttggaaaagtcgtagcgaagcaattacaaaggaactgctatcactgatatccaatttcaatccgaaagatattgggatgacaggaacattggacttctgtatcaaagacattctgaaagacatgtgcgatttggcacccggtgcagtagaaaaactttatcatccgtcgatgatagaagcatatccagatgccaagaagaattcacaaggcatttatcagttaggatctccaagaactaatgctattcgcaatccaatggcaatgcgttcactccaccaactgagaaaggtcatcaacacattacttcaagagggcaccattgataaccaaacagaagttcatattgaatatgctcgcgaactgaatgacgctaacaagcgcaaggctattgcccagtggaataaagaccgggagaataagagaaagaaatatgcagaggatatacgttctttgtacaaacaagaaagcggtaaggctattgaaccaactgaagatgatatcgtaaaattccaactgtgggaggagcagaatcatatttgtctttatacaggcgaatcgattggtattacagattttattggtccaaatccaagttacgacattgaacatactgttccacgcagtgttggtggtgatagcacgctggaaaatatgacattatgctccagcaagttcaaccgtgatgtaaaaaaggccaaactacccacagagttgccgaatcacgatgacattttgggacgactggaagggtggcgtgagaaaatcgaaaaacttcgtaaagatgcagatcatgtgaaaacctattcgagcatggacaaagccaccaaagaccgtctgatacagaaacgtcatctgataaggttggagctcgactattgggtagggaaatacaagcgtttccaaatggaagaagtaccagaaggattcgctcgccgacaaggagcaggtattggtttggttggcaagtatgcaggtctttacttgaaatcgttgttccataaggctgatgacagaagcaagagtaatgtgcgggtcgtcaagggggccacaactgcagaatatagaaagatgtggggcatacaagatgaatatgtaaagaagtcacgcgacaatcatgtccatcattgtattgatgccattacaatagcctgtatagagcctagtgaatacaatgctacagcaagatactatcagcagttggaggaatatgagaggaataatgcgccaaagccttctttccccaaaccttggccgacctttacagaggatattaaggcgattgcacaggaaatgctggttgttcatagcactccagacaacatgccaaagcgtgctcgcaaatatgttcagacttccaacggtagaaaactcgcaatgggggattctgctcgtggctctttgcataatgatacttattatggagctattgaacgagacggagagataaagtatgtggttcgtaaaaccctaagtagtcttaaggaaacagatatagaaaatattgttgatgatgccgtcaaagaaagagttaaaaatgccgttgcggaaaagggattcaaagaggcgatggctggagatatttttatgaacgaaatgaaaggcatcaaaataaagaaagtgagatgctttacgcccgctgtcacaaatcctttacatattcgaacgcatagagacgagtcaagaaaggagtacaagcgtcaataccatgttacacttgacggtaattactgtatggctatctatgaaggagaagtaaaaggaaagttgaagcgaacttatgaaatagtaaatatgatggatgctgctgcctattataagaagagtgcaggaatgactagcctatatccgattgctcctgagaacaagaacgggcttagatttagatgtgtggtacgtactggaactcagataatacttttgcagtccgataatgaagaaataaatctcactgataaggaagacttagcaaaaagattctattttgtggctgtgatgcgtagcgatgggcgattagttctacgatacaatcaagatgctcgtgatgcgacaacacttaaaaaagaacgaaagtcgggagcatataagacaggcgagcaatatcgttcagaaattatgttatctctttcagatttccatgctttgatcgaaggagttgatttcaaaatcaatgtacttggtgaaatagtgatgtttaaatagaactgtcaatgttaagcagcattgtttcgtaaaaacttggagaaggacgggttttctatgcatcagtttagtgtctatatcaggtattgcggttcacttgaaagtgcacaagtacatattaaaagagtcaagagttttaccccagagaaggggcatgtaagcgttctttcaattactgataaacaatattcaaacatcatccatatatggggtgcaatagagaaaaaaactaggccaaccccattgcaattggaatttttatagtatttttgctgacgaagaagaaatattcagccacttcgtatatgtgctacgtgccataattcattataaatgagggggattatataatatacgttgtggtttgatgtagaaatgagataagaaacaatcagacgtctttcgccttgcggtcgcgcttcgttgtggtttgatgtagaaatgagataagaagcaatccaaagcagacgcgtacgaacccacgcacgttgtggtttgatgtagaaatgagataagaagcaattatgcccgagggtgtgctgctggggcagggttgtggtttgatgtagaaatgagataagaagcaatccacttcgttgcatctgtaaacagctatagttgtggtttgatgtagaaatgagataagaagcaattgccgactgctccacaagctgcgcaagatagttgtggtttgatgtagaaatgagataagaagcaatcgtcggtgcggaagtagaactctatctgcggttgtggtttgatgtagaaatgagataagaagcaatacgactcagcggtacgatactgacagagcgttgtggtttgatgtagaaatgagataagaagcaaaatgagataagaagctttggattcgtaaccactggattcatggtcggagcgatggggatgttcttggtttggcaatagcatttcacgatgatatggggttcatcgatgctggtagcctgtcagggatgattattgattcttatataagatatctgtttagattatagcagaatacaaacaatacatcagaccccaagtactatagcagggtcaatgttcagtttccggctgatctcccttccggtctccagtgaaggctcacccttgcctgtaattatctcactgagacgagccgtgcttagtccgagcatttccgcaagtttagtctgggtcagcccaatttcatacatgcggagcttgatggtctcaaccagcgtgggcgctgctataggatttagtatcatggaaaatgaaattacgcgcatattctgatttttgaggcaaagataaacataacattcggttttaccaaatatttttcggaaaacttaaacgaccgagtgactttgcagcaaaaaaaatgaggatgtgtcaaactcgacacatcctcgttctagttgcggaggcaggattcgaacgtgcgacctccaggttatgagcctggcgagctaccaactgctccactccgcgatttttcttaagcgggtgcaaaggtacgactttttttcgagatatccaaacaattgcgcattttttttataattttgcacttttgggaacattttccactctttttcttgcgtaattcaaaggaaaagtttaattttgcacactgtaattaccgtgtgcaatttttcaagataggaggaagataggtatgtcaatatccaagacgagacagaaattagttgatgtggcccgccagttgtttgccaaaaacgggctggagaacaccacgatgaacgacattgcccagcagtcgggcaaaggccgtcgtacgctttacacctattttaaatcaaaggatgaaatctactatgccgtcatcgaaggcgagttggagcgactgagtgacaagctcgatgaagtagcggcccgcaagatccgaccacaggacaagatcatcgagctcatttacacccatctgagcatgatacgtgagacggtcgtgagaaacggtaacctgcgcgcagagttcttccggaatatctggatggtggagaaggtacgcaagcactttgacgacgcagagatcgaacttttccgcaaggtctataccgagggtaaggaagacggagagttcgacatcgacaatgtggatctggtggccgatatcacccactactgtatcaagggacttgaggtaccttatatctatgggcgcatcgcgcacggtatgaaggaggaagacaccaagccgcaggtggcaaaggttgtctatggtgcattaggaaaatttcaacgtaaataacaacaaacaaagaacaacaaattatgggattattagaaggtaagacagctctgattacaggtgctgcacgcggtatcggtaaagctatcgcactgaagttcgccgaggaaggcgcaaacatcgcattcaccgacctcgaagtgaatgaggagacagaaaaggaaatcgccgccaagggcgtgaaagccaagagctacgcttcgaacgctgccgacttcgcacagaccgaagaggtggtaaaggccgtgaaggaagagttcggaagcattgacattctggtaaacaatgccggtattaccaaggacggtctgatgctgcgcatgactgagcagcagtgggatgctgtgattgcagtaaacctgaagtcagccttcaacttcatccatgcctgtgtgcccgttatgatgcgccagcgtggtggtagcatcatcaacatggcttccgtagtaggtgtgcacggcaatgctggtcaggccaactacgctgcttcaaaggctggtcttatcgcactcgccaagagtatcggtcaggagatgggtccgaagggtatccgtgctaacgccattgccccaggcttcatcgacacagcaatgacacaggctctgcccgatgatatccgcaaggagtggatcaacaagattcctctgcgccgcggcggtcaggtcgaggatattgccaacgtggcaaccttcttggcttcagacatgtcgagctatgtcagcggccaggtgattcaggtcgatggcggtatgaatatgtagagcctcatcccctctccaaaaggaaaggggctaatgaattatgaaagtcatctacgaggataaccatattatcatcgtcaataaacagagcggggagatcgtacagggagacaagactggcgatcgtcccctctctgatattgtaaagcagtatatcaaagagaagtaccagaagcccggcgaagtgtttctcggcgtggtgcatcggctggaccgacccgttagcgggctcgtcgtctttgcccgaacctccaaggcactcacccgactgaacaagatgtttgccgagggagaggtacacaagacctattgggctatcgtgaaaaacacgcctgagcagcctgagggaacattgacccactggctcgtgcgcaacgagaaacagaacaagtcgtatgcctatacgacggaaaaaccgaatgctaagaaggccatcctgaaatacaaggtcatcggccgttccgacaactacacactgctggaagtcaacctgatgacgggacgtcaccaccagatacgttgccaattggcagcgatgggctgtcctatcaagggcgacctgaaatacggtgcgccccgcagcaatcccgatggaagtatctcgctgatgtctcgacacgttgagttcacgcatccagtatcgaaactgcagattgccgtcgaagccccactgccagaagattcgctatggcagtcgttccagacaagcctgcacctataacaaaaacaccagcaagaaccattctccgagcaggaaactgatggcgttgcagagaaaactgtacgcaacggcccgatgtaggtcacgcatcagccaccagtatcccagtgcctctaccagcatcaccaacatctcaccgacacccgccatcgtcaaccccgcaccgacatagacagcgtagaggttcaacggaacgttggtcagtatattcaatccaacagaaccccacaacacccgccttctccgttcacgcaagaagagcaatacaccaagttcgatgacgatggttgccagaagtggtatcaccagtttcagtatcatatccctatcctcctatccatagaccgccagccaccagcccggtatcaatgcagcagcaagcagtccgaaagccaaaccttcacgttgtttcaacacctcattagccaaatagagcgtgacaggcattgtgcagttcatcaggaacactcctaaaagaaggacggtcacatagtcgcctctgaaaaggaagcacaaggccacgccagccagtatataagccaacgtacggaagatacctaaacgacaagcaatccacccaccagccatcttacccaacatcgacgtagcaccgataacgagtatcaacaactgactcttcgaaatgcccttcgagaatagttcgccagcaaacgagcggtaagccacaaacaacatcagcaacacgacgaccatccacaacgaaagcagaggcagaccttgcagccatagtcttgcgcgttgtgggaggacagggacagagcggtcagcctcatctctatcaccatccagcggttgcgtatcatatcgtacataagccacagacaaaaagactacagccagcaagaaaacatacaacaatgtccatgaacaacataccagtccaacggcaagaccgaaggcacccgttgacacaaacacgcccaacgcacggatatcatttccaaccttgacgaccgtctgtttgccgccccaaacatgaaaaagcgagttacctatccccagcaagacagccaccagcgaaagaccaaaaggcacacggccagacaaactagcaagagccacagccagcgataacagtaccaccgacgagagcagcagccaatgacgatgctgcatcctatcggccaacatgcccgtaaacggctgcgacataaacgctatgacgttataggtaaggaaagcactcaaagtgagctctgcagcataggccggagccaacagatacatgcagcaaatacagaggccgtcgaccaggaaatgctgcacgctactaatccccaggagtatttgtttttggttcataacggggcaaagataccaaaaatctaccattgagccaaatgattatctgaaaaaacatttgcagataccacataatttcgtatctttgcagtcgaaacgtttcaaaacgaaggacatgatgcataagacggtctgtgctatttctttctttttctgtctggcagcttcagcctgtcaggctcaaggtttcaagttgaagaaagaacatgacagtctctactggctgaacgactggcggataacctaccccgtgtatcagttccagacaggcgatgttgacggcgacggcagtgaagacgcgatggtcggtgtgataaaatccacacgattctaccctgagaaagcacgaagactctttatcttcaagcaagtgaacggcaaggcacgtccgatgtggctcggttcgaaactcggcggcatccttgaggacttccgcttcatcgacggtaagatcagggcattggaatcgacgaccgattcactctatgcagtatcagactaccaatggagcggtttcggcatgaagttcgaccattttattataaaaggagttgataaacagacagcattaaaaacctttagccaatgaaaaagttactaacggcggcttgcatggtagcactgatatgcgcctgcaaccaaaaacagaatgttgtatcggtacctgtcactcagattgatgtagagaaactcatcgacagtatcgattacgacatggacgtgagtggcctctcgctggccgacgtgcgcacactgagttatgcgcccacagccaagtggggtttccccttcaaggatgcctacatcagaggcatctatagcaccacaacctggtatgactcgttgatgtggaaactcgacagcgacctgccttgggacaaatacccatcgaaggaggatgagaactgggaggaccattattatcgagtcatcaaggaatccggctacatgaagcttaccgagcaggaacaggccttcatcaagcgcatggaggagcgcgagaaagaactgcagaagcagaacttcgaggtgccgactggcctgcgggtcaacatgcagaacctcgccaatccccgacaactcgctgacttcgactcactgctggcgcaacgactcggtgaagacggctttgccatcgtgccctcaaacaatgatcagctgttcaatatctatgagcagaacgactatcaggaattccccaatttcgtgactaccgacctcttccttcagctctatcacctctacttcgacagcatgctgaaggaactggagatgtatcagatctacgcgctgatgacagactacaattacggtatgctcaaggcggtgaagaagatttaccagcaggcagaacaaggtacagcccttgagcgcgcctcagcccacagcatcaggttcttcaccatagccgactgcctgttcagaaacagcaccttcgatgcagataccgacccgctgattgccgaggaagtagaaaaagcaaagaatgctcagaacggtccaagtaacttcatggccgactatcaagacatcacattcccctacagtctgttccgcccccgtggtcactacacccgcaaccatgtactgcaggaatacttccgaggcatgatgtggttgcagaccgtgcccttcggcatgaggcacgacgacgaggtaaatgctgccgttgtgattgcctatgcgatgatgaacaacccagagttgcagggaatgtacgacaagttggaccagctgctcacctatctgatgggcaagcccgacaacctcagtatcccacaggtgattaccgaagtgaagaagaccggtaagccgatggaagatctgctcaatgataagcaggctatgagtcagctgaagaagaacctcgaggaaatcggcaacaagcagacacgcatccgtccgaagttcgaaaagaccagtcataacaagatctgtctgatgccacagcgctaccaacccgatgccgaagtgctgcaagagatggtcgacaatgacaataagcccacgaagcgtgccacgccgaaggggctggacttcatggctgcgatgggtgtttcggctgccgagcagattctgatgggagagcagacggagtggaaggacttcggaaaaaacctaaaagcgatgaagcaacgcatgggtgagattaactgggacgagaccatcgccacccaatggatgcacacgctgaaggtgctcaataccccagaaaaagaccacctaccctacttcatgctgaatccggaatggtcgaagaaagacctgaatgcagcccttgcctcatgggcagaactaaagcacgatgccatcctctatgccaagcagccggcgggtgccgagtgtggcggtggcggtcccccagaccccaccgtaaagggctacgtagaaccaaatgtcggtttctggaagaaagccattgaactgcttgacaatacggaaaaactgctgaaagagcacgatatgctgacagagaaagtcagttcggccaccagtcgcatcaaggaagaagctagcttcctgctccgcataagtgagaaagaactggcaggagagcagttgactgacgaggaatacaatcagatagagatcatcggttcgaccttcgagaatatcagcctcgacctggtgcgcgaacccaatcagtatctgacgggatggagtgatgtgcaaggtgctgaccgcaaggtggctctcgtagccgatgtctatacagccaactctgacaacaacccgaacaagtcgattctcttcgaggctgtgggcgatgccgatgagatctacgtagtggtagagattgacggttatctgtatctgacacgcggtgccgtactgagctatcgcgagttcatacaacccatcgaccagccacgcctgacggatgaggaatggcaacagcagctggaaaagaatcctcgcaagggtgtgcccgagtggatgaagcgcatcatcgtaccactgaagaatgagccgaaaccgaatgaggagttcttctatagctctggttgttagtttgttattcagcgtaccagtgcttagtgctgatacgctgaatatcgtctttacaggcgacattctattggatcgcggggtgcgccgcgtgatagagcatcacggagtcgaccgtttgttttcagacggtattgactccgtgtttcgtagtgcgcaactggtcgttggcaatctggagtgtcctgccacaaagattgagtctcccgtcttcaagcgttacatcttccgaggtgagcccgaatggctcgacaccttgcgacagcacggcatcacccacttgaatctggccaacaatcacgctatcgatcaagggcgcgagggactgatggatacgcgacagaacattctccatgcaggcatgatacctattggtgcaggtgccaacatgcaggaagcctcagaaccgatactgctggcctctgagccccgacctgtgtggtttttgccatccctgcgtctcgcacttgaaaattatgcctatctgacggataagccctgcgtgagtcaggaaccgatggactcactgctgcaacatgtattccgtctgcgccaagccgactctacagccgttattatcgtttcgctccactggggaggcgagcacacactcgaacccgtctccttgcaacgtcatgaagcccaccagctgatactcgctggggccgatatcctcatctgccaccacacgcatacactccaaaccatcgagacattcagagataagcagatctactacagcatcggcaattttattttcgaccagcaaaaggtgctgaataggaatgcctgcatcgtaaggttacagattaccgacaacgacctaaagaccgaaacgattcctattgaaatccgccaatgtacgccttatattaccgatagctatcgaaaaaaatgataaccgccgtttttttctgctaaattcttttgcctttcgtgtgattttgtgtatttttgcagtcgttatgggcttctccttggcagaagacaccccaaatgaacatgatatataagattgcagacaacataacatcgcccatagggcgaaccacagaggagaactaccaggctgtgaagaagggacaaacggcattggcttactacgatggccaatggtgtattcccgagcctttcacagctgcggtcttcagcgatatggagaacgaagagctgtcacaggcaggacttacccgttttgagtcgttggtcttcacctcagtccaaaaagcactggaaggcacttctgtgaatgtctccaacgatcatgttgtctttatcctcagcaccaccaagggaaatgttgagttgctaggtgagcaggatatctctccagccatcctgcatccaggtgagagtgcccgacgcatctctaagacattgggtatcaagagccagcctatcgtagtctgcaacgcctgcatatccggtctctctgctattattctggcagaacggctgttagagcagcatcaatacgactacgctattgtgtgtggggcggatgtattaagccgattcgtgatttcaggttttcagtccttcaagtcaatggatgcccacgaatgccgcccatacgacatcgagcgtctgggcatgaaccttggtgaagcagcggcgacgatgattctaacggcctcagcacagacgggaactacggcttggacaatctcaaaaggcgttatccgaaatgatgccttccatatcagtactccatcgaacaaagccgaaggtgcttggcgctgtctggaggcggtcatgagcggagagcagcctgaagaactggcggtagtcaacgctcacggtacagctacgatgttcatggatcaaatggagtcggttgctgtcgagcgggcaggtcttaacagccttcccgtgaatagttataagggatattacggtcatacgctgggggctgctggtgtactg

SEQ ID NO: 1652 - DNA, 23633 bp, synthetic construct
  misc_feature 1..23633: note = Synthetic
  source 1..23633: mol_type = other DNA
cgtgctgcccatctacttaggcatagcgctggtgatgggcgagaacatcggcacgacggccacggccaacctcgtggcgctcggtgccaacacgcaggcccgccgggctgcactggcccacctgctgttcaatgtctttggcgtcttgtgggtgctcatcgtgttctatccttttgtcaacatggtgtgcaacatcgtgggctacgacccgtcgatgagcggacagaccgccaagctgcccgtggtgctggccatgttccacacctgtttcaacgtcatcaatacggccatcctcatctggtttgtgccgcagttggagcgcacggtgtgctggctgctgccagagaaacaagtggccaagaagaaagaggaggagttccgcctgaagtatatccagtcgaacctggtgcagacgcccgagattgccgtcctgcaggcgcagaaggagacggccgccttcgcccagcgcgtcggcgagatgttcggactggtgcgcaagctgttctatgagaccgacccgaaagatttctccgagctgtataagcagatagagcacgaggaggacacgaccgacaagatggagattgagatagcccgctacctggagcaggtgagcgacggccatctgagcgacgagacgaagcagaagattcgccagatgatgcgcgaaatcagcgaactggagtccatcggcgatgcctgctacaagctggcgcgcacgctcgaccgcaagcaggagtcgggcaaggcctttactgctcaccagaccgagcagctgcaggccctcatgctgctctgcgaccatgccctcacgcagatgcagaccgtgatgcatggccaccgcgccgaccacgacatccgcgagaccttccgcatagagaacgacatcaaccagctgcgccagcaactgaaaactgagaacgtccgtgccgtcaacgaccatgaatacgactatgcggtaggtacgctctatgtggatatgatcaacgaactggagaaactcggcgactacgtcgtcaatgtcgtcgaggcacgcttcggccgataaagaacgttttgttgaggggatttggtaatcccaggggaattctgtaactttgcaaccgaatatggaacaaaaacagatattggtcgttgacgacgagcgcgatttgtgcgatatcctgctgttcaacctacgttcggcaggctatcaggctgaggcggtgtactcggcagaagagactctgcaacaaatagacaatcgtaaatcgtcaaatagtaacttgttcgatttgctgctgctcgacgtgatgatgccgggcatgtcgggcttcgaactggccaggcgactgaaggaggatgaacaggccaggcaaatccctattatttttattacggccaaggacactgaggacgatacccttcgggggtttggacttggtgctgacgactatgtgaccaagccgttctctgtgcgcgaagtggtggcgagggtgaaggctgtgctaaacagaagacccgtccgtagtccctcagcatgggaggggaacttgcgcttcgaggggctcgctatcaatgccgctaacaagaccgccagcgtcgatggcgaccctatcgccctcacccgcacggagtatgaactgctgcatctgctgctcagccatcgcggacaggtgttcagccggcagcagttgctcgataaggtttggccacaggacgtcatcgtcaccgagcggacggtggacgtgaacatggcccggctgcgaaagaaactgggccgctttgccgcctgcctggtatctcgcacgggatatggctacgtttttgaagtgaagagtgaaaagtgaagatttttcttgccgtgcaagcgtcgcaaagcgctgaacggttgccgcctatgaaaaagaaactttctgaaggacgaaagatgtggctcagcgtcatggccgtgttcctggtctatgccaccatctttatacttttcgaggactacgaccgcaagttcatcatgccgttcaacgaggtcagcgactggcatctgctgctcttctcgctcatcgtcatggcggggctgggcttcctgctgttccgctatgcccatcggatggatgagcgcatcagccgcgagcaggccgagaaggagaaccgcatgcgacgcgaactgacgcagaacatcgcccacgaactgaagacgcccgtggccagcatcctcggctacacggacaccatcctcgacagcccggacatggcggacaacgtgaagcagcagttcatcgtgcgcaccaatgcccaggcccgtcggctgacgaccttgctgcaggacatctcgaccctgaaccgcatggactatgcccgcgacatgattacgatggagcgcgtcaatatctccgttctctttgccgacatcgcacaggagaccgcctttgccctgcagagccggcaaatgacgctacacaactatctgccagaggacatcatcatccatggcaattactctctgttatatagcattttccgcaacctgatggacaacgccatcaactatgccggacagggaaccaccgtggaagtctctgccgaacagcggcctgactgctggcgcttcacgttcaaggacgatggcgtcggcatcccggcaaggcacctgccccgcatctttgagcgcttctatcgcatagacaaaggccgcagccgcgagatgggcggaacgggccttggcctctctattgtcaagaatgcagtgatgttgcacggtggtaatatcaccgtcagttcccccagtactggcggtctggaatttgcgtttacgattagttcatcgaacctggcagcaaatcagtagatgattaaccaatgcgctacatagccccatagaactcctcggggggcggcaccgcgttatgccgcaggctgtccgcgaaaatccgccacggcggattctcttgtccatggctggggatgagaatccgcagcgggtggatttccgcgtactataggaggtcgatggcctcctgcaggctgtgaatctcgaaggtgacgggcttcggggcagggtaggccgggaagcggttgaagaacatggtgtcgaggccgtaatccagggcaccgcacatgtcgctgtcccagctgtcgccgagcatgagcgtggtctgtggctgtgctcctgacagggcgaaggcatagtcgaaaaaggcccgtgccggcttgttcacgccggcgtcctcgctgagcacgacggtgtcgaagcagccgtcgaagccgcaggagtgaatctttcggtactgcacctcgtggaagccgttcgagcagaggtgcagccggtagcctcgccgccgtagatggtccaccagctcgtgggctccctccaccacgccgggcttctcggcgcaatggtccaggaagcggtcgctcatctgtaggcagagctgctccgtgacgtcgaggccgtgcccccggctcagcgggcggcggaagcgctccacgatgagaaacggccgtgaaatctcgccccgtccgtagcgtcgccacaggtcgatgttggcctcccagtaggcggtgaagaacacgtcggggtcgtagaaatagtgctccaggcggaagtcgctgaacacttcgcgcagagccagctgcgcattgccgtgggtgtcgcagagcgtgtcgtcgaagtcgacgaacaggtcggtatagggtcgttctattgtcataagcagctgcaaaattacgaataagaagagaaaagacaaaggaaaatagtcaaaaagtttagatggaaaatcaaattgtcatggtgctgagcgtgatattttcgtaattttgcaaccaaatcttactaacttactaaaacctaacatggaacaaagcaaaaaatacttcttcgccgtcgacctgggggccaccagtggccgcaccatcatcggcagcatcaatgacggtcgcttcgacctggaggaggtgacgcgcttccctaataacctcattgagcagggtggacactattactgggacatctacgcactctacttcgaaatcatccgcggactgaaggaggtgacccgtcgcggtctggaaatcacctccatcggcatcgacacctggggcgtcgacttcgtgttcatcggcgaagacggcgccatactgaggaatccgcgtgcttaccgcgaccccgtcaccttcgacgccatggacgactacctgaagcacgtcatctcgcggaaagaggtctacgacgtgacgggcatccagttcatgaacttcaacagcatcttccagctctacgccatgcgccgtgagcagaactccgccctggagaacgcccggaagattctcttcgtgcccgacgccctgagctggatgctcactggcaacgaggtgtgcgagtacaccatcgcctccacctcgcagcttctcgacccccgcaccaagcagctcgacgagcgcctgctgcagtcgctgggcctcagccgctcgaagttcggcaagatggtgcagcccggcaccgtcatcggcgtgctcaccgacgaggtgcagcgccttaccggactgggtgccgtgcccgtcattgccgtcgctggccacgacaccggctcggccgtggccgccgtgcccgccaaggacgagcagttcgcctacctgtcgagcggcacgtggagcctcatgggcatcgagacgaaggacgccatcatcaacgacctctcctacgaacgcaacttcaccaacgagggtggcatcgagggcaccacgcgcttcctgaagaacatctgcggcatgtggctctatgagcgctgccgtctggagtggcccgacgaggtgcgccagctctcccatcccgagctgcaagggcaggccatgaccgtggagcccttccgctcgctcatcaaccccgacgaccctgtcttcgccgccccgtcgagcatgattggcgccattcagaagtactgccgcgagaccaaccagcacgtgcccgaaacgccggccgaaatctgccgctgcatcttcgactcgctggccctgcgctatcgtcaggtctttacctggctgcaggagttcgccccgttccgcctcgacgtgctccacatcatcggcggcggctcgctcaacaagtatctcaaccagttcaccgccaactccaccggcgccaccgtgctggctgggccgcaggagtgcaccgccatcggcaacatcatgctgcaggccaaggccgcccgcctcgttggcgacatctgggagatgcgccagattattgccaacagcatcgacctcgtgaagtacgagcccgaggacaagcaggtgtgggatgaggcctaccggaaatacctgaatatcgtcaaataaggaaacccccaaagagaacctcgtcagcaccatccatgaagcgcttcctcctcaccgccatcatcgccctcggcacgctcaccatgtcggccagttatcggacaacgcccgatggccgcgagctcatgtggtacaacggccacgaccccgtgacctatcaggtgcagggccgggtgtcgccggtggtggagcaggccttgcagatgttcatcgacgacatggagctggtgacgacccacaaggccgtggaggccaaggacgccagcattcgcatcgtgcagggcaagggcgacgacgacggcttctgcatcagcgtgaaggacggtcaggtggtggtagaagggcacaacgcccgtggcaccgcctatggtatcctggaattgagccgcatggccgaggtgtcgccgtgggtgtggtggggcgatgtgcggccatatagtcgcttccagcccatcgcactgcccgacacgttccgctacgagcacacccccagcgtggcctatcgcggcctgttcatcaacgacgaggactggagcctgcgccgatggtcgaaggacaacatggggccgcagacctacaagcggctgttccagctgatgctccgcctgagggccaacacgctctggcccgccatgcacgatgtgtcgccgggcttcttcaccgtcgctggcaacaaggagatggccgactccttcggcatcgtcatcggcaccagccactgcgagcccctgctgcgcaataacgtagctgagtggaacgtcaaggtgcgcggcccatataactacatcaccaaccgcagcgccgttcagcagtattggatagaacggctgaaggaggtgcgcggcagcgaggagctcttcaccatcggcatgcgcggcatccacgacggctcgatggagggcgtgaagaccaaggaggaaaagctcaacgggctgcagcaggtcatcgacgaccagcgacggctcctacgcaagtattattataaagatgtggagaaggtgccccaggtcttcatcccctacaaggaggtgctggagattatggagagcggcctccgcgtgcccgacgacgtgacgctcatgtggtgcgacgacaactatggctatctcacccgcctgcccgatgccgagcagcagcggcgaaagggtgggggaggcgtctactatcacctcagctactggggccggccccacgactacctgtggctcagcaccacgcagccgggactcatctaccacgagatgaaggccgcctacgaccacaactgccgccggctctggatagccaacgtgcacgacccgaaggtggccgcctaccagctggagctgttcctcgacatggcgtgggacatcgattgcctttccaccgacccatcgctgcaaggcaggagatggaccgtcggcaccccaggaccgctcacgctcgaagagcacctcgagcgctggctcatgtgccagtttggcggccaggtggggcgtgccgtattccccgccatgcgcgagttctaccgcctctgcgccatccgccggcccgagttcatgggctggacgcaggtggagctcgacaagaagaaatatcccggcggcaagtcggtgcccggccagaccggtttctcgctacaggagggctaccagcgcatggaggctttcgcccgcatcgaggccaccgtcgacacctggcaacctctggtgatggatgcccgccaggatgcctatttcgcccatgtgctctatcccgtccatgccgcagccgccatgtcgcgcaagatgctctccaccgaagccgggagcaacagcgcctacgaagagatacagcagctgacggcgcactacaacgcgatgaacagtggcaagtggagcggcctcatgtcggcagcaccacgcgacctgcccgtcttcggccaggtgcgcaccagctatccgcagcacccctccgtcggtcgcctcgtctccgcaaacgcctgcgactacacctccgtcccgtcctctctctctgctgctgtatcacagcagcccccccgcatcatccccatgctcggccactccatgcaggccgtggccctgcccaagggcaccacgctgacctacgagttcgtcagcccgcaggagggcaaggccacgctctacaccgccatgattcccacgcagcccagcgaccgaggcgacctgcgctaccaggtggccatcgacggccaggagcccgtcgtcatctcgctgaagaccccctaccgctccgagcagtggaagcagagcgtcctgcgagggcaggccctcatgaagacccccgtcagcctgacgaagggaccccacaagctccacgtcaaggctctcgacgaccacatcgtcatcgaccagtggatgattgacttctgccccgaccgccagttctacgtcatccccatcaaggaataactattcaactcatattcaaaacaaacctatttacatccatttatgaaagcaaatctcattgaacaggcttacgccgtagccaaagagcgctacgcagccatcggcgtcgacaccgacgcagtactcgaccagctgcagaagcagcaaatctccctccactgctggcagaccgacgacgtcgtaggcttcgagcgcaacgaggccctcagcggcggcatccagaccaccggcaactatcccggacgtgcacgcaccatcgacgaggtgcgccaggacatcgagttcgtcaagaccctcatcagcggcaaccaccgcctgaacctccacgagatctacggcgacttcggcggcaagttcgtcgaccgcgaccagtgcggcgtggagcacttccagagctggattgactgggccaaggagaacaacatgaagctcgacttcaactccacctccttctcccaccccaagagcggcgacctcaccctcgccaaccccgacaaggccatccgcgacttctggattgagcacaccaagcgctgccgccgcatcgccgacgccatgggtaaggctcagggcgacccctgcatcatgaacatctgggtgcacgacggcatgaaggacatccccgtgcagcgtaagaagtaccgtgaaatcctcgccgcatcgctcgacgagatcatggaggagaagctcgacggcgtgaagaactgcttcgaggccaagctcttcggcatcggactcgagagctacaccgtgggctcacacgacttctacaccgcctactgcgccacacgcaagcagatgtacaccctcgacaccggccactacgagcccaccgagaacgtctccgacttcgtatccaccctcctcatgtacgtgcccgagctgatgctccacgtcagccgtcccgtccgctgggactccgaccacgtgaccatcatgaacgaccagaccctcgacctcttcaaggagctggtgcgcagcgacgccctcgaccgcgctcacgtcggcctcgactacttcgacgcctccatcaaccgcatcggagcctacatcatcggcacccgtgccacccagaagtgcatcctccaggcactcctcgagccgaagcagaagctccgcgagtacgaggacaacggccagtacttcgagcgcctcgccctcatggaagaggccaagtcgatgcccttcggcgccgtcttcgactatttcaacctgaagaacaacgtgcccgtcggcgaggagttcatcgccgccatccagcagtacgagaaggacgtcacctcgaaacgctgctaaggcataattgccatcatctcttgcctgcggcgctacacgaatgcgcatgaatggcccacgaatgattcatgaataatatttacgagtcatttatggacattcacgttgcgccgcaggcaagaatattcatgagtcattcgtgtcttattcatggatattatatgttgcgccgcaggcaatataataacatggaaatctgcctgaaaagaagcgttattttttttgaaagatattgacaaaatgcccatttttggcctccatatttcaaaaattctccacgaaaaaacttttggacgaaaaaacgccagtttttcgagagtttgccaaatggttgattgtcagtaagttgacttaattttggcgaaaaaaggcgttcgttgagaaaaaaaagtcaacgccgcagaaaaatttggcgttgacttttgaaaatttggcgtgcttacagaaacgcgaaaagcagcaaaatttgagcaaaaaacgtgcacaaaagtaggacttgtgtgcaaattttggccttttgcgccccgttttttcactggtcgagggttggaggatggcccgaaacgcccatttttcactccagaatgcttcgtcgccgtgaacaaaaaattttgtgaaagattttgacaaattgctccgtttttaaggtcggaaacggaaacaaatcatggcgtttttatgtgcctccttgacttgagaaatctctacggcgtgcacggttggtaatagccgttgcatagcaattcttccgcaataggttgaagttcatcaaggttttatacaaataaaaaatgccctccgaagagggcatataggataaaatccttcggcatatagccttattgtgataagatgtagaaaatcttactgggtgcaaagatagcaaatgttgtcgaaacaaccaaattatttgctcaaaaatttgtttctttcgttcatttttcgtacttttggctcttgaaacccaaaaacctaaaataatggaaaaaagaatacttggtatagacactggaacgaatagccttggctgggctgttgtcgataaacttgaagacggaacttattctttagttagtaaaggcagcctcatctttcaagagggtgtgaaggtggaaaagggaatagagtcatctaaagctgctgacagaacgacccatcgggctcttcggaagcagtatttccgtagaaggctcagaaagatagaagtcctaaaggttcttattgaatttggctggtgcccatatctgtcgccagaagctcttcatcaatggcatgtgaagaaagtctatcctatggatgaagcgtttatatcatggcaacgaactaatgataacttcgacgaaaatccctattactacaggcatagatgtttgcatgaacagttagacctaagcgacacagccgacagatacgtgctggggcgtgccatgtatcacttagcacagcgacgaggcttccttagcaatcgtcttgaacagggggatgatgatgaaacgggcaaggtgaaagagggcatcacctcattgaccaagagtatggctgatgctggatgcgaatatcttggcgactacttctataagatatataaggagaaaggtaatacggaaagaatacgtacacgctatactgaccgcgaggagcattataagaaagagttttatgctatatgcaggcagcagaatctttccgaagtggaagtgtcgaaattggagaaagccttgtatttccaacgtccgctgaaaagccagcggcagggcgtgggcaagtgtacttttgagccaaagaaagcccgtgtggctgactctcatcctgcatttgaactattcagaatgctgtcgtttgtgaacaacatcaaggtgaaaggtccacgtgatgttgagctacgcccgctcactaccgaagagtatgaaaaggccaaaccgatgttctttagaaagagtaagccccagttcgactttgaagacatagccaaagccattgccggaaaaggcaagtaccagcacatcaaagagattggcgacaagccctacaagttcaactaccgaatgacgcagggcgtcacgggctgtccaacgatagccagcctgatgtctgtctttggcgacgactacgaaacagctatagcagaacgatataccctctctgatggcaagtctccaaagcagatggtcaacgatgtctggaacgtgctttacagcttcagcgacaaagataaattgaagctatggggaatggagaaactgcaattgagcgaagaggaggccgagaagttttcaaagataaaactcacccacgctttcgcatcactcagtttggctgccgtcaacaagattctaccgtggttagaacaaggacttatttatcctcatgcagtattgatggcaaaggtgcccgacattgttggtgaaggagtgtggaagagccgtggcgagtccattacccaggaactgttgtcgctgatttccaatttcaatcccaaggatgtcacgatgacgggtacactcgacttctgcatcaaagacattctgaaggatatttgcgatttggcgccaggagcagcagaacgactctaccatccgtcgatgatagacacctatcctgatgccaggaagaatgcgcaaggcttctatcagttaggctctccgcgtacaaacgctatacgcaacccgatggccatgcgctcgcttcaccagttgcgaaaggtcatcaacgccttgttgcgcgaaggcaccatcgacagccagacggaagttcacattgagtatgctcgtgaactgaacgatgccaataagcgaaaggccatagcccagtggaataaggacagagagacgaaacgaaagaaatatgccgaagacatacgcacactctaccggcaggaatgtggaaaagacattgcgcctacggatgatgacattgtgaagttccagctttgggaggagcaaaaccatatctgtctgtatactggcgaatcgattggtatcacggagttcataggccccaatccaagctatgacatcgagcatactgttccccgtagtgctggcggcgacagtacgcttgaaaacatgacgctatgctccagcaagttcaatcgtgaagtgaagaaggccaagctgcccacgcagctggctgactatgaggccatcatggacaggcttgaagggtggcgcgagaagattggaaaactgcgcaaggatgtggaccatgtgaagacgcattctggaatggacaaggccctgaaggaccgcttgatacaaaagcgccatcagttgaaactggagctcgactattgggtaggtaaatacaggcgtttccagatggaagaagttccagaggggtttgctcgcagacaaggggcaggtatcggtcttgtaggcaaatatgccgggctgtatctgaagtcattgttccataagccagatgacagaaacaagagcaatgtgcgagtcgtaaagggggccaccacagccgaatacaggaagatgtggggcattcaggatgaatacgaaaagaagtcgcgcgacaatcacgtacatcactgtatcgatgccattacgattgcatgtattgagccgggggaatacaatgccactgccagatattatcagcagttggaggagtatgagcgagccgaggcggcaaagccgtcgttccccaagccttgggccacgttcaccgaggacatcaaggctattgcgcaggaaatactggttgtgcatagcacaccagacaatatgccaaaacatgcccgcaaatatgttcagacggccaacggcaggaaactggctaagggtgactctgcacgtggctcattgcataacgatacctattatggagctatcgaacgggatggcgagataaggtatgtggttcgcaaagcattgggcagtctcaaggaaaacgatgttgataacattgtggatgatgcagtaagcgaaagagtgaagcaagttgttgcggcaaaaggtttcaaggaagcaatggctggtgacatctttatgaatgaggcaaagggtatcaagataaaaaaagtaaggtgctacaccccaaccgtcaccaatcctttgcatattcgtgcgcatagagacgagtcgcaaaaggagtataagcgtcagttccatgtcactttggatggtaactattgcatggctatctatgagggtgaggtgaaaggaaaaatgaagcggacttatgaagtagtaaacatgattgatgctgctaattattttaaggaaagtgcaggactgacaacacaatatcctattgctcctgagaataaaaatggacttaaactcaaatgtacggtacgcactggtacacaaatcatacttttgcaatctgacaatgaagagattaacctcaatgataaggaagacttggcaaggcggttctattatgtggctgtcatgatgggagatggtagaatcgttctgcgctatagccaagaagcaagagatgcaaaaactattaataaagaatgtagagctggtgcctataaaaaaggtgaaatgtatagagcaagtattcgcatgtctctatccgacttccatgctctggttgaaggagttgatttcaaaatcaacgtgcttggtgaaattgttttgctaaaatagaattatgctaaagcgtacacttgtcttttccagtccaatggttctttcactgaagaaccagcagttggtgatggcctataaagattcaacagaagaaaagcgcactgtgcctattgaggacattggcgtggttcttctggagaatcagcaaatcagcatcaccatgccattactaaatgctttggcagagaatgaggtgcaggtcgttatatgcaacagcaaggggatgccaagtgcaatgcttcaaagtatgaacagcaacaatttgcaaggtgaaacactgcggaagcagattgattgtggcgaagtcataaagaaacaactatggaaacaggtggttgaagcgaaaataaggaaccaggcctccttgctgaatagcataggagaagatggcaatgtgctaaaaccgttatatatgaatgtcagaagtggtgatgtggataaccgcgagggcatagcagcacgcatctatttccagcatctgtttggtgaagcctttacgcgaaaccgagacgagccgggagtcaatgccttgctaaactatgggtatgctattctgagggctgcaacgtgcagggcaatcgtgtcatccggattgttgccagctatcggcatacaccatcacaacaggagtaatgcatatccattagccgatgacttgatggaaccattcagaccgtttgtcgatggggtggtgtacgattttgcaatgcgtggagagatggaactgtctaaagatgtaaaaggcgaactaatcagcgtgttgtatgctgataccatgtatgagaagacaaagcgaccgcttagtgttgggctgtcaatgactactgcaagcatggttaaatgtctctcaaaagaactaaacacaattagtatgccggcatttccatgacattcgaaagactaaacgcctatcacgtcatgtggctgtttgtgatgtttgatttgcctgttctaaccaagaaggagcgaaaggatgctgcctcgttccgcaaaaacttggagaaagacggctttaccatgcaccagtttagcgtttacattaggtactgcggttcattggaaagtgcacaggttcatataaagagagttaagagttttacccctgaaaaggggcatataagcgttctttcaattactgataaacaatactcaaacatcatccatatatggggggctgtagagaaaaaaacaaagccaaccccattgcagttggaatttttttagtatttttgcaaagtcagaagggctactctgccacttcgtatatatgtgacatattgaaagtcgttggaaataagtgtgttgtatggtatacgttgtggtttgatgtagaaaagagatataaagccatccttcacgccaagcatgtcctgcggaatctgttgtggtttgatgtagaaaagagatataaagccataggcaggggggagacctgaacaaagtcggagttgtggtttgatgtagaaaagagatataaagccattcttaattctttgatgagtactttcaaggagttgtggtttgatgtagaaaagagatataaagccatgcgaggctgtgaagcgttgcgccgcctccagttgtggtttgatgtagaaaagagatataaagccatctcccgctccgccaaaagcacctacgccagttgtggtttgatgtagaaaagagatataaagccatatatggcacatgattattatcataagtaagttgtggtttgatgtagaaaagagatataaagccatagcaaggctttcacgttcctgaatattcagttgtggtttgatgtagaaaagagatataaagccatattgtgcgcaagtgcatgatgacagccacagttgtggtttgatgtagaaaagagatataaagccatcggccaacggagaggagggcgcatagatggttgtggtttgatgtagaaaagagatataaagccatctgatgcgtttctcgtgggaggaggaaacagttgtggtttgatgtagaaaagagatataaagccattctgaaattcttctgtaggttttccttttgttgtggtttgatgtagaaaagagatataaagccattcactcatctttttgaagattagcaacgtgttgtggtttgatgtagaaaagagatataaagccatgattagtctgagcatcagacttcatcttaggttgtggtttgatgtagaaaagagatataaagccatccgtcagcgtctcaaactcttttgcgtagagttgtggtttgatgtagaaaagagatataaagccatagaagaagtatcaattagtgataattcacggttgtggtttgatgtagaaaagagatataaagccataaggatgctgaggacatgctggaatggatggttgtggtttgatgtagaaaagagatataaagccattgatacgagcataacgtaactcataaggagttgtggtttgatgtagaaaagagatataaagccatggtttggatatcacttggcagggatgttggttgtggtttgatgtagaaaagagatataaagccattttcaataaaacgtgaggaatcaccaaacagttgtggtttgatgtagaaaagagatataaagccatacaagaaagctctgtgtcacctcggaatagttgtggtttgatgtagaaaagagatataaagccatttcaacgtggcctcgaaataccagaatgtgttgtggtttgatgtagaaaagagatataaagccattcgattgctatgacagtccctgccaacacgttgtggtttgatgtagaaaagagatataaagccattttattaggtattggttatgatagttggaagttgtggtttgatgtagaaaagagatataaagccattaagaacaacatcctggctctttggaatcagttgtggtttgatgtagaaaagagatataaagccatgcgtcgggtagtggaaacaccccggaggcgttgtggtttgatgtagaaaagagatataaagccatatcatttacgaagaagaacaaaagtaatagttgtggtttgatgtagaaaagagatataaagccatacctaaaacaaaacacaacacaaaaatgagttgtggtttgatgtagaaaagagatataaagccatctacgaggtggatgtggtgagcaccagcaagttgtggtttgatgtagaaaagagatataaagccatttagtttggtttcgcttaaaccacgtgcgggttgtggtttgatgtagaaaagagatataaagccatctgagcagcgtcgcattagccacattgtcagttgtggtttgatgtagaaaagagatataaagccataacatgctgaactgcttgcacatgtcttcagttgtggtttgatgtagaaaagagatataaagccatgaactgctatcgctggagtatcgctctactgttgtggtttgatgtagaaaagaggtataaagccatcctcaatgcaaaaaacattatggtcttcacgttgtggtttgatgtagaaaagaggtataaagccataaaaccttcatcagcagaagaaagcatgaagttgtggtttgatgtagaaaagaggtataaagccataaaaactggggaacataagaactgcaattagttgtggtttgatgtagaaaagaggtataaagccatagataggaatggatgccgacgaactgctggttgtggtttgatgtagaaaagaggtataaagccatgcagcgtcaaaagcgtttccttcaatacagttgtggtttgatgtagaaaagaggtataaagccatacacgaaatgattatggaagaaatgattggttgtggtttgatgtagaaaagaggtataaagcaatcggacgaaaggtcgttggtccgtactcaagttatggtttgatgtggaaaaatacccgctacgtcttcaataaatggcaactcgcaatttgaaatggcaaggtggtataggctatatgattattaaaatatatgtaatttgtagcgttttctgcatcgttctcacgaagtttttgaaattttgcaaaaaatattacgctaatttcccaattatgaaacaaatctggaatacgttttgcgaagacataagcaagaacaaaggtgtaagagaaatgacctttgaaaaagatattgtgaagggtttcctgcaagcactggggtggtcgcgctataaccgcaatcttgaagaacaatatggcttgtatagccgaaagtggataccagatttcgttttctatttgaataacgacaataatgccaaggaaattatcttggaattgaagaagcctgatcataaacaacgtaaggtagatattgaacagattgaagcgtatatgaaactgacagattgtcgtttcggcctctattttggcgaaaaactggaagttttctatttggaagaaagagacggcaagcgttcggcagtgtctatcactaccattgactggacaataaataatgaggcaggagtaaatctgattgaattgctcgatttcaagaattacgacaagaagaagttggagcaattctgtttggaccacctttgcttgaactccttactctgtcagtgggaaactcaacgaggccaaaaacaactatatgattgcataataaagcattttaagctacctccgtcaatggccagcagcttgcaatctcgcttaaaatttactgttctgtcgaaccctgagcatgaagaccaacttgttttgtttgtcccctctgtacaccctcctcagttaccaagctctattcaaagaaatgtctggttgatttgctatgacagccattatttcaatgtagaagattgttttaagaagtatggtcaggtgtattggatgcataaggctgggattcagaatgtgcaaaagggcgatgttgcttacctttacggctcaagtccagagagtgctgttcgtttcaaggtagaggttgtcgagagtcagttgccatactcgccagaaatggatgtagagaatgaatttttgaagtcagattcgggggatgtggaaaataaggacagaacttacttccttgtgcgtcccatttctgagactcacagcccagcactgaaacatgcggctatgatgaatgcgggagtgataggcaagcgcccttctgccactaagctttccaaacaggtattcaagacgctgaaagattacattgagcagcatttcgacgatgcaactcccgcagaggagatagcaatctctgtccagaagcaaaaagcaaaacctaagaagcagaaggaaaaaactgaccgtcgaccgaattttaagttttcgatgattggcttgaaaccgggagacgtggtgacatttgaacatgataatataaaggttaaggtggcttcggacaataccgttgagtatatgggtgaaatctatactctttcccgtttttgcaaacactttatgcctggcgaaggtagtgagaacagggagtaccaaggtcctgctcattttcgttataatggcaggacattagatgaaatcaggaaagagaaagacatgtaatgatagctatcaaatcaaggcttttattatcatcattctaccgcataacaattatctggcaatggcgaaaaagcgtgagataagaaacagtacggcggagttccttatcttccaagcggaaggaaaggagcagggcattgaagtaatgtatgccgatgaaactatctggtgtacacaagatgctatagcagcattgtttgacaagggacgctcaacaattgcggaacacctgcaaaatgctttcagtactggagaactgacaaaggattcagtttgtcggaaattccgacgaactgcaacggacggtaaggaatacaacactcaatactacaatcttgacgcagttatcagtgtaggctaccgcgtgaacagcgtccgggccacccagttccggcagtgggctacgagcgtgctgcgccaatacgccatccgtggctacgtgctcgaccgtaaacggatggagaacggcacctttttgggcgaggactactttgagcacttactggccgagattcgtgagattcgccttacctgggaactctcccctttgaaggggatgactctggattgtagggcgtgagcttgtctaacgccgcacacatcgcgccatgcactcagagcggaattattcaaggtaattccctacaacggggtgggaagccctctatggcatatatggtggaaaacggcccagcgtaattatccaaccgtataggtcgaaaatgtttttcaatggtccaggtggatattttttgcctttcctgcgtgcaattcgggaaaaatgcgtatctttgtagcgcattataagataagcaaacttaacaaattaaactattaaaacattatggaaattgtcattggacttttaatcatcgccatcggtgcgttctgccagagttcgtgctacgtgcctatcaacaagattaaggactggtcgtgggagtcgtactggattgtgcagggcgtcttcgcctggctcgtcctgccgttcctgggcctgctgctggccgtgcccagtggtcactcgttcaccgagctgtttgccaatgctccgtcgttcaacatctggatgaccatcctcttcggcgtgctgtggggcgtgggcggcctgacgttcggcctgtcgatgcgctacctgggtgtggccctcggtcagtcgatagccctgggcacctgcgccggactgggcaccatcatgggcccggtgctgctgaacatcttcttccccgagctgaacgcgctcgagagcctcacgttcgccgtcatccttggcgtggtggtctgcctggcaggtatcgccatcattggcgtggccggcggcatgaagtcggcggcgctctctgaagaggagaagaaggaggcggtgaaggacttcaacttccccaagggtctggccatcgccctgctggcgggcttcatgagcggctgcttcaacgtgggtctggagttcggcaaggacatccacttcgccgagacgcaggacatgttcaagacgctgcctgccacgttcctggtgacgctgggcggctttgtgaccaacgctgtctactgcttctaccagaaccagaagaaccagacgtggggcgactacaagaagaagggcgtatggggcaacaacctgctgttctgcctgctggccggtgcgctgtggtactcgcagttcttcggcctctcgctgggtaagagcttctttgagccgggcagcagcatgatgacgctggccttctgcatcctcatggccttcaacgtcatcttctccaacgtctggggcatcatcctgaaggagtggaagggctgttcgacgaagaccatcgccgtgctcgtcgtcggcctggtggtgctcatcttctccaccttcctaccgaagatgatggagtaggggagtgctaaatgaaaaatgagaaatgaggaatgagaaatggatagacccaagggcggaaaacctgcgcgatgagtctatccatttctcatttttcatttctcatttctcaattctcatttaaggatattgacgtcgacgcggttgaaggggaacatgaatccgcgctccttcagctcctggtagacggtctcgttgatgtagaaatagacggtccagtagtcggcacccttgcaccacgtgcgggtgttcaccaccacgccgctgtcggccagcttcgtcacgccaatccacggcgcggccaccacggggctgtccttcaccgggccctggagcaccagcgggttgcgctgctgaatctcctggatggccttcttcacttcgttgaggtcggagccgtaggcaaactggaagtcgaggtcaacgcggcggtagggctctgtcgagtagttcttcatcgagccggtggagagtccgccgttggggatgatgatggtctgtgcatcgttggtgcgcaggatggtgttgaagatctggatttccttcaccgtgcctgcgtagccctgagcctcgatgtagtcgcccaccttgaagggcttgaacagcagaatcatcacgccgccggcgaagttctgcagcgtgccgctgagggccatgccgatggcgacgcctgccgaggcgaagagggcgatgaacgacgacgtctcgatgccgaggatggagatgatgatgatgatgagcgtgaaccacagcaccacgttgacgatgctggccaggaaggagtagagcgacttgtcgaccttgctcttctccagcatcttaatgacgagcttgcgggcccacttgatgagccaggcgcccacgatgtagacgatgattgccacgagaaggttcttacagaaccccagagcccactgacccagcatgctgtaggtctcgggcgaaaagattttgtccatcatgatgattaacgatttagtgatttagtaataaattgagtcttgcttaaacaacgtctttttataacaacgaatttatacgaattttacgaatttcacgaatttcacgagcaattcgtgtcattcgttcaattcgttgtccatataaaataaaagtgtccatttgctatccgttcagcttctcgtcgatttcgcggctgctgatgcccagtgctgccagcagcgaatagcccagcagctcgtggcggaaggctccgccctgcacgggctgcatggtgaacacggtggtgcggcggtcgtcgctgtcgaggcgccgcagcagctgcctgacggcgtccatcatcgagtcgggcacggccagcatgagccgtctgacgccctcctgctggcacaccatctctatcgtgtcgagcagcagctgctccttcggggccagctcctcggtctgcacggcggtgatggtgaactcgcccagacggcccctgaaagccttgccgttcagctcctcttggtagttgccaggggcgaaacactgcatccggtcgttctgccgttcgtgaatgagcaccacctgcacctcgtggtcgccctccttcagtccgccgtcgagcgccatgcactcggcccattgcgccaggtcggccttcggtatgcgtcggcccagcatccgctcgaagttcaccgtcaggtcgaaggccacgctgtccacgtagtcagcatcggccagaatgacgttctctgtccattttttttcgctcataatggtgcaaaggtacggaaaagttaggagttaggagttaggagttaggagtttttttgcggcgagataataaataatgttaacatggagcacaataactcctcgctcctaacccctaactcctaactatttagtacctttgtcggcaagaactaattaaaacaacaaaagaaatggcaagaatactgatgattggcgccggaggcgtcgctacggttgcggcattcaagattgtgcagaatgccgatgtgtttactgagttcatgattgccagccgccgcaaggccaagtgcgacgcgctggtggaggccatccaccagaagggctacaccatgcccatagagacggcacaggtggacgccgacgacgtggagcagctgaaggccctcttcacgagctacaagcccgacctggtggtgaacctggccctgccctatcaggacctcaccatcatggatgcctgtctggcttgtggatgcagctatctcgacacggccaactacgagccgaaggacgaggctcactttgagtactcctggcagtgggcctaccgcgaccgcttccgcgaggctggcctcaccgccatcctgggctgcggcttcgacccaggcgtcaccagcatcttcaccgcctacgccgccaagcaccacttcaaggagatgcactacttagacatcgtggactgcaacgccggcgaccaccacaaggccttcgccaccaacttcaaccccgaaatcaacatccgcgaaatcacccagaagggactctactgggagaacggacagtgggtggagaccgagccattggagattcacaaagacctgacctaccccgagataggcccgcgcgacagctacctgctgcaccacgaggagattga

SEQ ID NO: 1653 - DNA, 23633 bp, synthetic construct
  source 1..23633: mol_type = other DNA
  misc_feature 1..23633: note = Synthetic
gatacattgggacggttgtggagaacgcggtccaccgtgcctaccgacacgccagccctggcggcgatatccttgattctgattttatcgttcatgagaacagaaagtggccaatttaattatgtgatattgttttgaaaatgcaaaaatagcaatatttgttgaattgtgcgaaagcacagtgccataaatgcaaaaaaaaacatattttttgatattttatttcgttagtagcggaaaattgactatttttgtgctcgcatacagttttcaaagacttaaggtgcaattcttttataagacaccttggcataaataatcaatttctataatctataaaatcaaaatcaaaaaaatggcaaaagttgtaacattgggcgaaattatgcttcgcttgtcttcaccaggacagaagagatttattcaaagtgattttttcgatgtcgtctatggcggcggcgaggcaaatgtggctgttagtgctgctaattatggccacgaggcatatttcgtcacaaaacttcctaagcatgaaatcggacagtgcgctgttaacgcattgagacgatatggggtcaacaccgagtttatcgcaaggggcggtaacagagtaggtatctatttccttgagactggagcttcgatgaggccatcgaaggttatctacgacagagctggtagttccatcgctgaggctgatcccgaggacttcgacttcgacaaaatcatggagggcgcacagtggttccactggagtggcattaccccagccatcagcgacaaggctgcagaactgacacgcttggcttgtgaggctgctaaaagacatggcgtcaccgtgagttgtgacctcaacttccgcaaaaaactatggacatctgagaaagcacaaagcattatgaaacctcttatgaagtatgtggatgtatgcatcggcaacgaggaagacgcacagctctgtctcggattcaagccagaggctgatgtcgagggtggcaaaaccgacgctgagggatattatggcatcttcaaaggaatgatggaaactttcggattcaagtatgtggtgagcacactccgcgaatcgttctcggcatcccataatggatggaaagcccttatctataacggaaaggatttctatcagagcaagcgttatgatatcatgcctatcattgaccgtgtaggtggtggcgactctttctctggtggtctcatccatggactgctcacctatcctgaagaccaaggcaaggcattggagtttgcagtggctgcatcagcacttaagcataccattcctggcgatttcaaccttgtttccaaagaggaagtagaaaacctcgctggtggtgatgcctcaggaagagtacaaagatagtaaaaactaaaaacagacaattaaaaaatggctcgatttaataaagttcaagttataacagcaatgaaggagactggcatggtgccggttttctatgacaaagatgctgaaatcgtgaaaaatgtcgtaaaggcatgctacgatggaggcgttagagtgttcgaattcaccaaccgtggtgactttgcccacgaggtctttaatgaggtcaataaatgggtcatcgataactgtcccgatatgattatgggtgtcggtaccgtggttgaccctgccacagcagccctgtatctgcaattgggtgccaacttcatcgttggtccaaacttcaaccccgctatctgcgaagtgtgcaacagaaggctcgtgccttatagccctggatgtggttcggtgagcgagatcaacaatgcacaggctatgggatgtgatgtcaccaaggtgttccctgccggaaacgtgggtggaccatcgttcgtcaagaatgttatggcgccactgagatggtccaacatcatggttacaggtggtgtggctcccgacgaggagaacctcaccaactggattaaggctggtgtgctctgcgtgggcatgggctccaaactcttccccaaagaagtggtggctgccggcaactggcaggctgtcacagacaagtgcatcgaggctcttggttatatagccaaggcaagaggataatttgtgaagttattcagcacagagacacaaaggtacagagaatttctctttttcttctctgtttctccgtgtctctgtgttgattttcaaaggttttgtttttaattcttcttcgtgtctctgtgttttttcgtagatagttgagttaagtaggtgattaaaattagatgatagtattataaaagactatacgacacctacaagaatgatagttgcagataattttgattacctatttttaatcaaggtacgccaatatgaataattgtatgcgacgtatggtaatggggcttttgcttacgcctctcttttttatgttcacggcatgcaatatgtcggacaggcaaaagaccgaccattacaatgaattggcatacaatttccattacagaaatctcgactctactctttattatgccaatcgctccatgcaattggcgggaaactatgacgctggcgaggcagaggcactcaacaataaagcttttgttagtttggcaagaatgcagtatgaacttgccgacagacaacttgattctgtggctgagacgactgataatcaggtggaactgcttattgccgacattcagaaaatgcgtctttgccaacgtgtgtcgcgcaacaaagacttttatacttacagggaaaaggcactgctaaaactccgtaggatagaggaggagaaagacatgctcaacgcccatcagaaaaagagaatgatctacgcccgttctgagttcaaaatcgtcacttccacctattattattatgtaggactcatcgaacggtcgagtagtgaaatgatggatatcaagaccgatggcgagatacagagcgatactgcacaatggcttaattatttatataatgtgggagctggtggcgtcctaacgaaagggtcacagcacgacatcaatatttctgagatggaccacctgcttaggtgctacaacatgtccattcaatacggatacccattctggacggcaaactcgttgcaggctatgagcgagcatctccaaggaccggggtattggcagtattttgccgaggaaagtctctatgctctcaaatttctgaatatagataatgtgcccgacagccttctggctggaaatcttgcagagaggtctttggctatcttccaggattatggtgatgtctatcagatatctggagcatatcgtacgatggcacaatgctattggaccataaacgactatgaggcttcgatggactgccttaataaggcactcgccgacagtgctgtgattttccaggctcccgacctcgtggcttccatacatgagcagcaaagtgtgctctatgctgctatggataatacagatgccagctatgctaagagggaagactacctggaaaaacaagagcagactcgtcaggacaggtatttagagtcgagagctgaacagctccggcagtcggtcagtatgttgaatatgatgatttgggcgattgtcatattgatgttggttgccatactactatctttcttctatgcctatatgagaagaagaaggacaagaggaagctccattgaacaacttttggtgcctttgcaacagtggcagggggagaacgagcagcgaaaccagctactcgacgaacaatacgaggagacgctcgaacagcaacaggtcacggagcggaggatggaaaatagtaagcgcatctacctggaacaacgagcaaaagtggcattggtcaatagtgtaacaccgttgatagacagaatgttgcacgaaatcaaccgtttggcgaatcatactgaggacgagcagctcagaaaggaaaggtatgcctacatcgccgaactaactgaaaaaatcaatgagtataatgccatgctcacacaatggattcaacttcgtcaaggcgacttgagactgcatatagagagctttcccttgcaagaactcttcgatattgtggcacatgcgcaaatggcattccaactcaagaatatacaactctctatacagccgacacagcagtgggtgaaagccgacaaagtgcttacactctttatgattaacaccatcgccgacaacgcccggaaatttacgcccgaaggagggagtgtgagtgtcagtgctcgagaagctgataaatatgtggaagtgtcggtggaagatacaggtgagggcatgaccgaggaacaggtggctgctgccttcagtgtggagaaaaaggcaattgccgacgaagccttggtggcaacggggcatccggcaaaaaccgagaccagccatggattcggactggttaattgcaaaggtatcatcgaaaaatacaaaaagacgagttcgctctttggtgtatgctctatcggggtggagagtgagaaaggaaaaggaagccgtttctatttccgacttccaaaaggagtgatgagagccctgctcacaatgaccttaatcacagcgacggcatgggcaccggcaatggcagccaacatcgaggataataccgccttggaacagaaagcaagtgaatatgctgagcacctcactgtttctaatcagaatggaaggtatgaggagacattgcaatatgctgattcagctatcagtagtctcaacacaatttatagggcgaattaccctcagaaaaccgacacgatgatgcctgtaagtgctaactcagtagcacttcctgaaatcaattggtatcatgatagcataccagctaactatcaattgatactcaccatcaggaatgagtcggctatagcatcattggcactgcatgattgggcacgatacagatataataataaggtatatactaccttgttcaaggaaatgtcggcagacaacactttgggcgagtattgtcgtgttatgcaaaaatcacaggccaacaaatatgtggctattatcatcctcgtcattctcgcattgctcatcctattggcctattttatgctttactacaggcacatggtatattataggttttgcgtcgaacgtgtaaggaatataaacgatattcttttgtcggacaaaaaagacgaagaaaaactcaaccaaatcaacaaacttgttgaaggtaacgacaaattaccgcaggcgttacaggaaatcgttgccaaaatccttgattccctccataagagcatagacacctacggggagagaatgaagatgattggacatgccgaggacggactccgacgactacagtatgaagacggtcgtctgcatgtgtgcaacagtgtgctcgacaactgcctcagcacgttgaaacacgagacgatgtattatccgtcgcggattaggaatttaatagacgatggcgatggcagtatccagaatatcaatgaattggctgtctattacaaggaaatctataccttgctcagtgcacaggccatgcgccaggtgacaagtgttaaaccagaatgcacgcctatatggttgaacgaattgttgggtgataaaacaccacaagaatttgcaaaggcttctgtcttgggagacaagaccatgctggcatatatgatggaaatacttagaaaacaaaatgggggtaagacacccattccctctgtcgaagaaaagggaaaaggatatatgctcattcgattctggatggaacaaatgaaattctcggagtctgaatgtcaggagttgtttaatcctcagatgcataacttgccatttctgctatgtaggcaaatcatacgagataccggcgaggtgacgaatgccagaggatgtggaatcgtcgctgaggtaaaccaacgtggaggtactgatgtcatcgtcacgctcgcaaaagcaaataaacggcaataacctatcattgctttgccccttcaaccccatttagagaaaatcaaatacaccaatatatatggaaaatttcaaaattattattgtcgaagatgtgccactcgaactgaaaggcacagagggtatcatacgcaacgacatccctgaagcacaaatcatagggacagctgaaagtgagactgcttactggaaactgcttaaacaggaaatgcccgacctcgtcttgctcgatctcggactcggtggttccaccactgtgggagtggaaatctgccgacagaccaaggagatgcacccaaaggtaaaggtgctcattttcactggtgaaatactcaatgagaagctttgggtggatgtgctcgatgctggtgccgatggcgttattctcaagacgggagaactgctcacacgtggtgatgtcttcagtgtgatgagtggcaaaaggttggtgttcaatcagcctattttggagaaaatcgtcgataggttcaaatacagtgttgggagccaactgatgaggcaggaggctttggtggattatgagattgacgagtatgatgagcgattcctccgccacctggcattgggctacacaaaggagcaaattaccaacctcaggggaatgcctttcggcgtgaaaagtctggagaaacggcagaacgaactcgtgcagaaactcttcccgggaggaaacggaggggtaggggtgaatgccacacgactcgtggtaagagcccttgaattgagaatcctcgatatcgacaacctgcatccagatgaaggttaaaactatttatatacgacggttttttgcttacctcacagcagcggtgttgcttttgcaagtgctgctgtttgtggtgtcgtggctcattgctgcggcaatgcccgacaatacggtgcgctcattgcttggtaatgagggcatcagatggttttttggctctttcgtcagcaatgtggcaacaaaacccttagtgtggatgcttgtggtggcaatggcatggggaacaattgctgaaagtggcataacaagggcatttctgaaaagaactaaacctttggcatatagacagcgttttgcgctaagggctgtgattgtcgaactgcttattgccgtggtgatcatcttgctgttggctttcgttcctaatgcgccattgagaagtgtcaccggacaactctttcctagcagtttcagtagaagccttatacccatattggcattttgcactattgtaatggctgccacatacggactgttaagtggtgccatgcgtggggtagttgatgtcttcaatgcactggtggaaggtatccgtcgtttcattccactttttatcctctatgtcgccgtcgtacaattgttcttctctatcatctacgtcttccaactttaacgtctaacctctactctgaaatctcaactcttcactttataatcttaatcctcaatcctcaatctttatcctcaatctttatcctcaatctttatcctcaatctttatcctcaatcttcaatccccatcttcaatcctcaatcttcaatcttcaatcttcaatcttcaatcttcaaacctcaatcctcaaacctcaatcctcaatcttcaattggtaatgtccctttaactcccttttaactcccctttaactactttttaactccccttcaatcttcgtcatgttcctcaaaaaaacgtttctattcctcagtctaattctttcaactgcattgtatgcagctgataaagcagatagtttgcgtgtgcctgttgtcacttgggacagtcatagtcttatgtttgatggcaagagggttgttcctgccatgggtgaaatacattattctcgcataccagcagaagaatggcaattggaagtgcagaagatgaaagatggtggtattactatcatcgcctgttatgtgttctggaatcatatcgaggagattgaaggacaatacgactggagtggacagcgcaacttgaggcgttttcttgaaatatgtaaacaagaaggattacccgtagtattaagacttggacctttctgccatggcgaagtgcgtaatggaggaattcccgactgggtgttcacgaagggatgcaagtcaaggtcggaggacccgttgtttttggaatatgtacagaaactctatcgacagattttcacgcaggttcaggggttgcaatggaaggatggtggtcccgtaataggtgcacagtttgacaatgagtttcgtggacacggctcctacctgatgagactgaagcaaatagcgcaggaaataggttacgacttgccgttttatacccgcacaggatggccagaactgcgaactcctgtgccttatggtgagatgattccgctttatggcgattatgccgatggattctgggacaggaatatcgatgaagctacgggaaactactacaaggcattcaatttcagggcgttccgtgtctctgatgccatcgccaccgaacaactgtcttatgctgatgatggaatggtgaaaaaagctaaggaggagtatccgtattttacatgcgaattgggcggcggcatgatgacggcctatcatcggcgcgtctatctctaccctgaggatgcatacgctatggcggtggtgaaattgggaagcggttccaatctcttgggatactacatgtaccatggtggaacaaatcctgatggcaagttaaactacctgaatgagacacaacgcacaccagcgaccaattacaatgatatgcctgtgaaaacttacgatttccaggctccgctgaatgaatttggacagaaaaatccgcattactatttgttgcggaaattgcatctcttcatgaaagactatggtgagacattggcagagatggaggctgtcttcccttgtgaacaagagataccacagggtgatgactcgcatttgcgttggtcatatcgccagaaagatggccatggcttcatctttatcaataattatgagcgattgaaaaacctgaccgacaaacggaatgtgcaggtggaggcatgcggtatcaaatttcctaaaatcactatacctgcaggtgtgagctgtattttccccgtcaatatcgatggcatacaatatgccacggcacaaatcattgctcgacgtgatggtaatatttatctcgaacaaatcaaaggtgttcccaccgtgattgccgttgatggaaaagtcctcaaaaatgtaaaggctcgaggactctcaaaaccagtctataaaaacatctacctgctggattcagagacggcaggcaaacttttcctcaacgatgatgtgtcatatactgtaggtggggaggtcgctttccgtaagattcaggaggctggaactgctcatgaaatcaccatcggtgcgcaaaaagtggcagaggaacccgaggataaggattttgaacaggctgctgtctataccattgacatccctcaacagcgtgatggattactctgcatcaactattatggagatgtggcacgcttatacgatggtgaccgtctccttgatgataatttctacaacggacgtgaatttcagtatgctctttggagactccctgagaattgcacccaattacaactacgcattcttcccctccaacccaccatgcccatctacttcccacgcgaggcacaagtaaaggaacctggcgaaaaactaaatcgtgtgtatctgctcaataagagataaggatagttggtaattagaagtaaggggtaagaaagtcatataagtcataaaattatagacgggagcgctactctcggtaagaaattgatatacaatggtctggtgaaagaccttattaaagttggctgaacgtctttgaaatcgctccgtgttttctgtagaggaatggtactatgtgagtgtagaagagatatgatacaaaaatgccctccgaagagggcatataggattaaatccttcggcatatagccttattgtgataagatgtagaatatcttactgtgtgcaaaggtagtaaaaaacttcgaattattaaaataattatcaaaaaatttttttcaatctatattattgtgattttcaatttactaaaaacctaagtatatgaaaaagagaatattaggtatagacacaggaacaaatagccttggttgggctgttgtagataaaaacgatgatggttcctatactttgattaataaaggtagccttatttttcaagaaggtgtgaaagttgaaaagggaatagaatcatctaaagcagcagacaggacatctcatcgagctctcagaaagcagtattttcgaagaaggcttagaaaaatagaagtacttaaggtgcttatagaattagattggtgtccatacctgtctcctgaagctcttcatcagtggcatgtaatgaaaaaatatcctatggatgatgcctttatttcatggcagcgcaccaatgacaattttgaggaaaatccatactattataggcatttatgtttgcatgagaaattagatcttaaagagaaggctgataggtatgtcttgggaagagcaatgtatcatctggctcagagaagaggtttcctcagtaatcgtcttgaacaaggcgatgatgatgaaactggtaaggtaaaggaagctatttcttctttgtcaaagagaatgtctgatgcaggatgtgaatttcttggagattacttttacaagatatataaagagaaaggtaatactgaaagaatacggacacactatacagaccgtgaggggcattataaaaaggaattttatgcaatatgtaagcgacaggatcttaccgaaaatcagataaatgttttagaaagagccctatatttccaacgtccgttgaagagtcagcgacaaggagttggcaaatgtactttcgaacctaaaaaacctcgcgttgctgattctcatcctgcgttcgagctttttaggatgttgtcgtttgtaaataatatcaaaataaaaggcccttatgatgttgagcttcgtcctctctctgcagaagaatatgagaaggcaaagccaatgttcttcagaaagagcaagcctcaatttgattttgaagatatagcaaaagcaattgctggaaaaggaaaatatcagcatatcaaagaggatggtgacaaagagtataaattcaactacagaatgtcgcaaagtgttacaggttgtcctactatcgccagtctgatgtctgttttcggtgatgattatgctactgctattgctgaacgatacacactatctaatggtaagtctgtaaagcaaatggtcaatgatgtttggaatgtgctatatagttttagtgacaaagacaaggttaaacaatggggaaaggataaacttcaacttagtgatgatgaatccgacaaattctcaaaaattaggcttactcatagctttgcatcactcagcttagcagcagttaataagattcttccatggctggagggtggactcatttatcctcatgccgtgttaatggcaaaagtcccagatattgtaggagaagatgtttggaaaagtcgtggggaagctattacgaatgaattgctttctttgatagcaaactttaatcctaaagatgttactttgacaggaacattggatttctgtattaaagaccttctgaaggatttatgtgatataatgccaggagcgatagaaaaactgtatcatccttcaatgatagaaacctatcctgatgcgaagaaaaattcacaaggtgtttatcaattaggttcgccaagaacaaatgctgtacgcaatccaatggcaatgcgttcgcttcatcagttgagaaaagtcataaacacattgttgtgtgaaggtactatcgacaatcagacagaggtacacatagaatatgcacgtgaactgaacgatgccaacaaacgtaaggctatagctcaatggaataaaacgagggagactctacataagaaatatgccgatgacataagagccctatataaaaaagattgtggaaaagatattgaaccgacagaaatagatatagtcaaattccaactgtgggaagaacaaaaacatatttgtatttatacaggcaattcaatcggtatcactgagttcattggtccaaatccaagctatgacattgaacatactattcctcgtagtgttggcggtgatagcacacttgagaatatgacattatgttcaagtaaatttaatcgtgaagtgaaaattgccaaactacccacacaattgtcaaaccacaaggccatcatggaaagactcgaagagtggcgtaaaaagatagataaactccgtaaagatttggatcgtgtgaagacacattctggaatggataaggatgtgaaagaccgacaaattcaaaaacgtcatttactaaaaatagaacttgactattggcttgggaaatataagcgtttccaaatggaagaagttccagaaggatttgccagaaggcagggtgttggtattggattggtaggaaaatatgcaggattgtatcttaggtctttgttccataagactgatgatagaactaagagcaatgtgcgtgttgtcaaaggtgctactactgctgagtataggaaaatgtggggaatacaagatgaatatgaaaagaaatcacgtgataatcatgttcatcattgtattgatgcaattactattgcctgcattgagccaggagagtataatgaaacggcgcgatattatcaacagttggaggaatatgagagaaccaaggctgcaaaaccatctttccccaaaccttggacaacttttacagaggacataaaggctattgcgcaggaaatgttggtggttcatagtacacccgataacatgccaaagtatgctcgaaaatatgttcgaacatccaatggcaaaaagcttgctaaaggggattccgcacgtggttctttgcacaatgattcctattatggagccatagaacgtgacggtgagattaaatacgttattcgtaaatcattgagtagcatcaaagaaaacgatatcgaaaatattgttgatgtaactgtaaaggagataataaaacaggctattgctgaaaagggatttaaggaagctatggcaggagatatctttatgaacaaagaaaaaggtatcaagataaaaaaagtgagatgtttcacaccatctgtcacaaatcccttacacattcgcaaacaacgagatgtatctcgaaaggaatacaaacgccaattccatgttactttggatggcaactattgtatggccatctatgaaggagaagtgaagggaaagatgaaacggacctatgaaataataaacatgattgatgctgcagcctactttaagaaaagtgcaggacttacaaaactatatccaattgctccagaaagcaaaaacggtctaaaatttagatgtacagttcgtacaggtacgcagattattcttttgcaatctgataatgaagagataaatctggcgaataaggaagatattgcaagacgattctactttgttgctattatgcaaaaagatggacgaatagttttgcgctataatcaagatgcacgggatgctacgacattaaaaaaggaacgcaaatctggtgcatataaagttggtgagcaatataggtcagaaattatgttatcgctttcagactttcatgccttggttgagggagttgatttcaaaatcaatgtgcttggtgacattattatgttaaaatagaacgtcgtatgttaaaacgtgcacttgtgttttcaaatccaatgattctttcactgaagaatcaacaactggttattgcatataaagattcggcagatgaaaaattgacagtgccaattgaggatgttggagttgttttgttagagaatcaacagaccaacataacacttcctttgttaaatgctctagtagaaaatgaggtacaggttgttatatgcaatagtaagggaatgccaagtgcaatggtccaaagtatgaattgcaatcaattacaaggtgaaaccctaagaaaacagatgtcctgcggcgaagtgcttaagaaacagctatggaaacaaatagttgaagctaaaattagaaatcaggcatctatgttgaatagaataggagaagatggcaatgtcctaaaacctttttatgccaatgttcgaagtggtgacactgacaatagagagggaatagctgctcgtatatatttccaacatctatttggtgatagttttgttcgcaatagagacgaacttggaataaataccttgttaaactatggatattctattcttagggcagctacatgtagagcaatcgtatcatctgggttattgcctgcaataggaattcaccatcataatagaagcaatgcttatcctttggcggatgacttgatggagcctttcagaccatttgttgatggagttgtttacgatttagtattacatggagagagtgaactatctaaggatgcaaaaggggcgttaataagtgtattgtattcagatactgtgtttaaaaaggttagacatccccttagtataggtttatccatgactactgcaagtatggtgaaatgtctctctaaagaacagaatattattagtgtgccagcattcccatgacgtttgaaagactaaacgcatatcacattatgtggctatttgtgatgtttgatttgcctgttatgactaagaaagaacgaaaggatgcagcattgttccgtaaaaacttggagaaagatgggtttattatgcatcaattcagtgtttatataaggcactgtggctcgttagaaagtgctcaagtacatataaaaagagttaagggttttacacctgaaaaggggcatgtgagcattctttcaataaccgataaacaatattcaggcattattcatatttggggggcgatagagaaaaaaataaagccaaccccattgcagttggaatttttttagtatttttgctgaaatgaacttaatttggaccacttcatatatatatataacatatagtaagtgcttgtaaataagtagaatacattgtatatgttgtggtttgatgtagaacaaaggtataattcaatgaactggtagtcgagcggcaccatgtcgtggttgtggtttgatgtagaacaaaggtataattcaatattgagacgcgcctgcactcccaccttgccgttgtggtttgatgtagaacaaaggtataattcaatacggtgatgttgccgtagaagccgcggaggttgtggtttgatgtagaacaaaggtataattcaatgatgcgggggttttgggtcatggcggtctggttgtggtttgatgtagaacaaaggtataattcaatttctgccgtggccctaatccgtcacctcgtgttgtggtttgatgtagaacaaaggtataattcaatatactcctactatgcaagctcctttgtcttgttgtggtttgatgtagaacaaaggtataattcaatagaacctccgtaagcatttttaaacaacagttgtggtttgatgtagaacaaaggtataattcaatacattccacgccagcgcgacgaccgagaagttgtggtttgatgtagaacaaaggtataattcaatataaccagaacctgaatgaagcgataggcagttgtggtttgatgtagaacaaaggtataattcaattgacaaagaaaaggcactaaagcaccaaagttgtggtttgatgtagaacaaaggtataattcaataagtgtgcggtcggggtgagcatattgtgtgttgtggtttgatgtagaacaaaggtataattcaattgaaaactattaatgcactcaacgagttagttgtggtttgatgtagaacaaaggtataattcaatcttgtgcccagctgtaagtcgaaatagcaggttgtggtttgatgtagaacaaaggtataattcaattttcggccaactctgctgcgcggatgagtagttgtggtttgatgtagaacaaaggtataattcaatagaggaaggtctaacaacaaaaggtttaccgttgtggtttgatgtagaacaaaggtataattcaattaccagtttaagatggatgttcctgatagtttttcactgaatataaaggctaaggtgctatgactgggcaacagaaatgtgcattagtgaggattgcgtggtcagcggctcctctgcgtacagcttttctctcctcactcattgacagcagacttaacacctgtatggactgtcgttatatacataactcatgatgtgagcaaacagattattgtaaagattataaagaaatagaggcgttgagtatttatagaagagaggtaaaaacataaaaaagtttaaatcagcattttattgctggaaaattttgtcatacccaaaaaaatgtgtaattttgcaccctgtttggaataggtatcaaaatttgaaaacaaaaaatttagatagaaatgtcgaagatttgtcagattacgggaaaaaaggccatggttggcaacaatgtttcccactcaaagcaccgcacaaagcggtcttttgacgtcaatttgtttaggaagaaattctattatgtggaggaggattgctggattagtctcaagattagtgccgcaggactcagaattattaacagagtcggacttgacgctgccctcaaacaggctgtggctaaaggttattgcgactggaaggacattaaagttataggagattaagctgtatggcatctaagaaagcaaaaggtaacagagtacaggttgtgctcgagtgtactgagatgaagaatagtggactccccggcacaagccgctacattaccactaagaaccgcaagaacactcccgagagaatggagcttaagaagtataatcccatccttaagaagatgacagttcataaggaaattaaataattttttgacacatggcaaagaaaacggttgctaccctccatgaaggttcaaaggacggtcgcgcatattcaaaggttattaaaatggtgaaaagccccaagacaggagcatacgtcttcgacgagcagatggtcctgaacgaggaggtacaagatttcttcaagaagtaatttcttctcacaatacgattaaaagtgtgccgtaaaatgcaaatttttggcgcactttttttgcatttaagttgttaatactttattatttcactcgcatgggattattcggtatatttggtaagaaaaagaaggaaacgctcgataaaggactggagcgttccaagcagagtatctttggtaagatttccaaagccatcgcaggtaagtcgaaagtggacgatgaggtgctcgacgacctcgaggaagtgctcatcacatcggatgttggtgtggacaccaccatcaaaatcattcagcgcattgaagagcgtgtggcaagagataagtatgtctcaacatcagaactgaatcgaatccttcgggaggaaatcgccgccctgttggcagagaacaattctgaagataacgaaaattgggatctcccagctgaccataaaccatacgtcatactcgtagtgggtgtcaatggtgtggggaaaactaccactattggaaaattggcttatcagtttaagaatgccggtaagaaggtgtatctcggtgccgctgatacgttccgtgcagctgctgtagatcagttatgtatctggggcgaaagggtaggtgtgcccgtcatcaaacagcagatgggtgccgatccggcttctgtggctttcgatacactcagttcggcaaaagccaatgacgccgatgtggtcatcatcgatacagccggacgtctgcacaacaaggtgggattgatgaacgagctgaagaaaatcaaggatgtgatgaagaaagtgctgccacaggctcccgacgaggtgatgctcgtgctcgatggaagtactggtcagaatgcttttgaacaggcaaagcagttcgccgcagtcacacaaatcaccagcatggctatcactaaacttgatggaactgcaaagggtggggtggtcatcggtatcagcgaccaattgaaggtgcccgtaaaatatatcggactgggagagggcatggaggatctccaactgttcaataaaaagcagtttgttgactccctttttagttaaacttagaagtgtgaaacttggtgatgttataggatttgtctatactcccaaactcttatactcccaaactccaaaacccacagccttttatgattaaaaatcaggttgacatcattactatgggttgctcgaagaatctcattgacagtgagattctgatgaagcaattcgaagaaaacggatacaaatgtgttcacgacagcgctcatcccaaaggtgagattgtagtcgtgaatacatgtggttttatacaagatgccaaggaggaaagcatcaataccatcctcgaactggcgcaggcaaaggaggagggcagaatcaaaaaactctttgtaatgggctgtctctcacagaggtatcgtgaggagttgcagaaagaaatccctgttgtagataaatactatggtaaattcgattataagcaactcatctccgaccttggatgtcgtctcattgacacctgtaatgggagaaggcatgtcacaacaccacggcattacgcctatctgaaaataagtgaaggatgcgaccgccactgcgcttattgcgctatacccattataactggaaagcatgtgagccgccccatggaggatatcctcgaggaagctcagcaattggttgatgggggtgtgagggaactgttggttatcgctcaggaacttaccttctatggactcgacctctatgggacgcgtaaaattgctgaattagtcacccgtctggcagagattaagaaactgagatggatacggttgcattatgcttatcccacagatttccccatggaactgctcgatgtgatgcgtgagcaaaagaaggtgtgcaaatatatggacatcgcattgcaacatatctcagaccgtatgcttgaaaggatgcaccgacacattaccagtcaacagacttatcaactcattcaggatatgcgggaaaaagtgcctggaatagcactgaggacgacaatgatggtgggattccccggagagacagaggaggacttccaacaattattggatttcgtcagatgggcaaggtttgagcgcttaggtgctttcgcctattccgaggaggatggtacatacggagctatccattataaggatgatgtgccagaggaagtgaaacaagaacgactttcacgactgatggctttacagcaggaaatcagtgctgagattgaggctgaggcaattgggaaaaagatgttggtggtcgtcgatcaaaaacagggcgattactatgtggggcgcactcaatatagttcgccagaggttgacaccgaggtgcttattcccgccgacgaacgccgtttacgcacaggatgtttctatgaggcaacaatcaccggcgcagaagagttcgacctgtatgcagaggtcggttcttagttgttagtagaaaagaggaatttccaattttagcttcgatgttttttgtcacgacttggcatagttcaaacaagttcaactctgccctcgctgctccaaaaaatcaatctttaattttaatcttcaatcttcaattttcaatattcagagttatgactcataaagaatttatctcccaaatggccaaagaccttgacaaatctcataaggatatggagatgatggccgatactgtcgtcgcgactatagcacaaaatttagaggaagggagtgtcgtacggatacctgagtttggaaaattcgaggcaagaaagcattatgaacgaataatcgccaatcctgagacaggaacgagaaaactcgtgccgccaagattatcaatcgcttttacaccagcatttgccgttttggaacaaccatcaagggaggaattgtaagatgaatgtcatagctatagaagaactggcaaaagtcattgccaataagcatcatctctcacagcaagaggctgatgctttcatcaacgcttttttcaaaaacatacgcaatgccttggctactgagaaattggtgaaaatcaagggcttaggtacctttgcagttgcggtgatgaaatctaccgaatatccagggcgaaaatgcaaggtgatgaccttctcaccagagcccaagctctccaaacaaatcaataagccttttgctcaattcgaggtggttacacttgccgatggtgtcacttttgatgatgtcacggaggagactggcaacgacagcctaatcaagactgtagcaaaagatgaaatctcggtcgatgatttgccgatggtcgattcatgggtgatggtggaaatggctgatactccagatttggtggaagaacaattgcctgccatgtcggatgatgaacattctgatgcttcagagacagcagaaaccgctcctgatgattcgattgccgatggtgaatctactcatatagaaggtgaaaaagattctccagttcgcgttgaaatgtctgataatcatgacgctgagagtcaaggacatgttacttctcgaagtggttggtggaaatgggcggtcggtgttgctattgcagcatgcttgctcatcggtttcttcttgctgagaccttctaatattgcctcacagagtagtaccacatcatccgaagtggcacagaaagaatccgaagatagcaaggataatttacctgtaacatctgataactcttccgtccaaaatcctgaagaccaatatgctgaggagaatgaacgttgtaaatatggtgcctacaaaatcgtgggtttggataccatcatcactgtaactcctggtatggacttgcagcgcattgctactatcttccttggttctgaaatgcagatgtaccttactgccatgaacgatggcaacgacaatccacaagtcggcgagcaatacaaaatccccaagattgagctgaaataataatatcggttgtaacacagtgggggcagactttggtctgcccccactgtgttatttgcacaattttttacaatactttatggatttcttcctgtatgtgtattgctttctttttcatcggtttggtctatagaacttagaagcatcatccgacatttgccgtttaagaaaaaacaacgtttgaagaaaatgtcgaaaggcttgccgttactattcaggtagatatgtcctcttatctcctcagcgccccattcagaatcataatccccccagtagcgaatgtcggttatggtgatatcattccagtcgatacctttttttacaccttcgcttttaaaattattaaaaacatccgtaaaggcttgtttgtcgcttaatgtttttgcccaaccttctgcagcttgggaattcataaataacagggatgtctcttctggctttagcaaattgaaatggctaatacttccgtgagcggcgtcgtatatcatatcggttgcggctttcacgatttctttatactcgtcgtcgttttgtgcatttgcagtcaggcatcctatcatcattaggacgataacaattaaattcttcattacattatgtagtttattcgttagaagattgatataaagtacgataacatagatgaaatgttaagattcttctcccgttttcaagataatgcttgtggcaccgatggtgaacagactgccatcctctatcacccgacgttcacggtcgcccaagataacattatcgacgaaggtgccagtattgctgggaccatcacggagtgtgtatttcaaccgtccatttttgtcgcgcgatacattgatgacgcagtgcagcatgtccacactggggtcaacggtttcgatgggaatgttggtcttactgcctttcatatagcgaccaatggtgttgtcacccatgtggagaggtaacacctgcttgaaatggaaaacgttctctatcacgacgatagagccacaactgttctcctcaacttgttcctcgggacgttcctcgcgctggaggttacgcaatttggatacccccatacgaatgccgaactgctttccgcagttcggacattgaaagacaagggactgaccttgttcgtatcttgtctcatcaaaagtgatgaattggtcacatttcggacaacgtactctcttcatcctatttcatttgcataatccaaccgctggcagcattcttgttggcaagcaactcctgaagagctacgttggcttcctcgtgggttttatagctgccatagacaatcacattctgagatttgtagtcgattaagacagctttcttggcaccctgtgcatgaagttggtcgaggaacgattgtacattttcactggggatgctatagccaagtacaacggtgaagtcgccgacactggggggaacacccacttcttcctcttggttgagacgatcggagacagcttccataaaactgataatgctgcggggagaagtagttgcggcggttgtctcttctgcttcttctacagtagaggtgggaagtacgctggcttcggtggcgccagactctatggcattcatctcatcagggcctacgggacgggcaaaaaggaacaatgccgcagcggctactgctgtgacggcaaggttgcgaagcacgctgaccttgatgctgatggttttctcttctctttcgggggcgttgtctaattgtgacatgattgttgcaagacttggtttgtgagaacgggaagacgagtgctcgtcttcgggactgctgaccaccaccatcctgcctggaagggggaggggggtggactgctgctgggcttggagacgatagaactcataggcatcgagaccatagagccatggcgtgagcacaccggcttcgcaaggttcaaactcgtagttgccctcagcgttcagcgacagacggccaatgccgtacaggttataactgccgttcttttcaatttgatacttgagctggcgaacatcctgtgagatacgctccacagcttcggagatacttatgccatagcaatcagcatacgactgggcaagaagcgtgtcattcatcgtcaactgtgaattgaagcccaaagtgcgaagagggggaagaaatatcttctctctctcatcgtaacgggcgcatacatgatgcgtcataaaaccgcccaggccaggcactatcacgcagtcgttgctaagcaataatacttcaatgtgtctttctaatttcatcatgctgcaaaattaccattttttttctaattccacaacaatttaagattaaaataactcaacttttgtatgttccagctttgtctggccatgaggtcatggggttgcttttcttgcagctcctatggtctgcccatccgtttcttggcatcgttgtaggctgccacccagtcggtgtcgagtgaaaaacgtgtcagatagccttgattggtaatgtaggcaaggacatactccttgttggggtcatggaatttgggatgtgccaaactgatacctgtaaagaggtccatgatatctgtacgctctttcttggcacaagtcaacaggctattggtgtatagattgataaactgatacagggcgagtgcctgattgtcgagcatggtgacactgctgtcgggcatctgcttgtatgcctgcgaacccaaatagtagagggcttcacgcttgaaagctgcaattttgcgctcttccaagtt

SEQ ID NO: 1654 - DNA, 23633 bp, synthetic construct
  misc_feature 1..23633: note = Synthetic
  source 1..23633: mol_type = other DNA
cgagctctttagactgcttgttaccgtgagtggagtgggggcgaatacggcaaggatgattttgtcggcatcgtcgcccgcagagctatgcaacatcattgccaatggcgacgaacgtatgttgaaaaacgtgaaaggtattggcttgaaaacggctcaacgcatcatcgtagacttgcgcgacaagatagtgtcgagtggtattgccaatgaattgcacgttagcgagcaacccctctccatggtcaacaatagcgtgaaagacgaggcggtgcaagcacttacgatgttgggattctcacctgcaccatctgccaaggcggtgatagccattttgaaggaacaacccaatctccccgtagagcaggtgataaagttggcattgaagcaaattaagtaagtaatttaaaataagaaagttataacgttgaaaacgaagtcgaagataagcgtggtagtgataggcttgctggtgatgggattcgtcaccagttatgccatttccatgcccttcatggtgggaggcgcaagaaaggatgtgcgcgaagaaccgccacaagacattcaacgtagacaacgaaacaaccaacaacgggagaacaatggcaatgcgaagcccgaagataaggataaggaaaacaagcctgacatcatcgctcagcctatcttggaaaccgaggactcgattcccgattctctcttgcatccccgttggaaaatccaacgcacaatccccgtaacgtacgacgacttacagcagtcgccgatggacctaaagcgtcctgacaacctgaaacaagaggtgcaatacaacgatacgctcaacacctatctctttggtaataagttgggtaatacgtggttgaacaccccaattaccatgactccagaggaatatctgaattggagtaccaagcaaaacttgctcaaatacttccgtagcaagaacgacgaaatctacaaggcgaaaggcaaggagaagtttgactttaccgatatgcacttcgacttaggacctgccgagaagatattcggtcctggcggcgtgagaatcaagacacaaggaacggctgaattgaaatttggcgcaaccttgaagaatatcgacaatccttcgcttcccgtgcgtaacaggaaaaccacgtcgatggactttgacgagaaaatcaacttgaacgtgaacggtaaggtgggcgataaggtgaacttaaacttgaactacaacaccgatgccaccttcgacttcgactcacaaaacatgaagttgaagtttgacggcaaggaagacgagattatcaagctcgtagaagcaggaaacatctcgttcccgtcgaattcttccctcatcaagggagccagttcgctcttcggcttgcgtaccgacctgcaattcggaaagttgaaattgcaactcgccgtgtcgcaaaagaagtcgaatacgcaaagtgtgagttcgaagggcggcgttcagctaactccctttgaaatcgatgctgccaactatgaagaaaaccgtcacttcttcctttcgcactatttccgcgagagatatgatagagccatgacaaccttacccaacctcaccacgggtatcaagattaatcgcgtggaagtatgggtgaccaataagacgggaaccaccaacaacacccgtaatatcattgcgttgacagacttgggtgagggtagtagggtaatccatactgattggggcggtagcggtgacgtagttccatcaaattccgccaatggcgaatatgcagccatggtaaaccagtacgtgaatgcgcgtaacatcgaccaaacctcgtctacgcttgatgccatcagtcaattcgagggtggagccgactatgagaaattggagagtgcccgattgctgaatagttctgaatatacgataaatagcgcattgggatatatcagcttgaagtcgacattgcaacccgaccaagtacttgccgttgcgtttgagtacacctacggaggaacaacctaccaagtgggagagtttgcgagcgacattaccgacgtgacaaaggcgcttttcgtgaaatccctcaagaataccagtagcaatcctatgcaaggcaactgggacttgatgatgaagaacgtgtataacctgggttctacttccgttcagaaagaccgattccgccttgacgtgaagttccaaagcgatacgacaggtgtctatctcacctatatccccgagtcacaagtgaaagaactccccttgataagattgttgggagctgaccgcttggacaataacaacaaggcacatcccaatggttatttcgacttcgtggaaggatacaccgtcagcaatggacgcgtgtttttccctgccgctgaaccctttggcgaatacctgtataaatatttggttgcaaaaggcgttagcgcagcaaaagccgaacaatatgcctttaccgaactctacgattctaccaagacaattgccaaacaaattgccgagaaagataagtatgtcttgatgggtgaatatcgcggaacgagtgccaacgtcatctccttgggtgctactaacgttccacaaggttcggtggaagtaagggctggaggaatcacgttgacggaaggttccgactataccgtagactatagtgcgggcgaggtaaccatcttgaaccaaagcatcatcgatgcgggtacgtcggttagcgtttctttggagagcaacaccgattatggtcaaaaccgaaagaccatggtgggaatgaactggcaatacgatttcaccaagaactttcagttgggcggaacgttgcaacatctttctgaacaaccacttaccaccaaggtggctatgggaagcgaacctctgaacaataccctatggggattgaacatgacatggaagaaagaaagccaatggttgactaacgtattgaataaggtgccgttcttgcacgttacccaaccgtcgaatatctcgtttacgggagagtttgcgcacttaatcgcaggacaaagtcacggaacgcaagacaatgcctcgtatcttgacgacttcgagaatgcggagtgggagctcgatgtgtctacccctactgcttggtcgctttccagcgtaccgtcaaccattgccaattacaacgacaagaattcgctcttaagcggatacgaccgaagtcagtttgcctggtactcgatagaccgtttgttcacgaatcgttcttcctcgcttacccctggtcatatcaagagcgacctcgaccaattatcaaaccattacattcgtgaggtgtatgttcgcgaattgttccccaatagagaccaaagcagctataacggttctacgaatacgctacaagtattgaatctcgctttctatcccgaagaacgcggaccgtacaacttcaatcccaacctcaacgcccaaggtaagtttgacaatccccaagacaagtggggtggtatgatgcgtaagttggaaaccagcgatttcgaagccgccaacatcgaataccttgaattctggatgctcgacccgtttatctacacccgtgagaagggtgtggcttccgactatggaggcgacttctatattaacttaggtgaggtgagcgaagacatcttgcgcgatggaaagaagttctacgaaagcggaatgcccgttgacggtagtagcaacttcaccttcacgcaatggggaaagattcccgtgcagtctaccgttacttacgcctttgccacgagtagtggttcgcgtacgttgcaagacgtgggtcttaacggtttgaacgacgccgaagaacgaacattcgagacttatcaagatttcttgaccgccattcaaggtaaggtgtctgccgccgtttgggactctatctataacgaccctgccaacgacaactatcattatttccgtggtggcgacttagatcaaatgcaagccgacattctccgtcgctataagtacatcaacaatccacaaggcaactctcccgacaacgatatgcgtaccgagaactacgatacatcgtacaagacaatgcctgacgtggaagacatcaaccaagactatacgctcaacgaatatgagaaatactatcaataccatgtctccattcgccctgaagatttggtcgttggacaaaactatatcgttgacaagagagattacgaacccaagttgcgcaacggaaacacggagagggtaacatggtatcagttccgcattcccgtcagacaatttgaacgcgcctatggtggaatcaacgatttcagttccatccgtttcatgcgtatgttcatgaaaggcttcaagcaccccatcgtcttgcgtttcggaacgttgagccttatgcgcggcgaatggcgtacctaccagcagaacttagacaatgccgcatcgcattcaggcatcatgagcgttagttcggtgaacatcgaggaaaacaacgataagattcccgtaaactatgtattgcctcctggaatacgtcgtgcactcgacccacaaaacccgcaattggtggagagcaacgagcaagccctcgacatcgtggtgagcaacttgagcaatggcgagtctaaagccgtctataagaacaccatgcaagacttgagacaatacaagcgtttgcaaatgttcgttcacgccaatgcattagagcagaacaccaccaacctcaccgataaccaattagccgtgtttattcgtttgggaagcgactacaagagcaattattacgaatacgaaatcccattgaaactcacgcctccaggacgttacgatacctattcgttgtcaggttgtcaagccgtatggccagcagagaatatgttggatattccactcgaagtgtttacccgactcaagaaagagcgcaatcgtgcgaagtcggctggtgcggcttcttataatcgcgtcttcacggcctacgatagtgacaaaccacaaaacaagattagcatcatgggtaacccgtcgttgggcgaggtgaaaaccatgattatcggtgtgcgcaacctcagtagcgatatcaagagtggtgaggtttgggtgaacgaattgcgcttgcaagaatataataacgaaggtggatgggctgcacaaggcaacttaaacgtgcaattctccgacttcggtacggtgaacgtacagggtagatatatcaccgagggcttcggaggattggaagaaggcgtgatgcaacgctcgatggaagaccagaagtcgtatagcgtgaccaccagctttgagttgggtaagttcttccctgacaaggcgaaggtcaccgcacctatttattattctgtcaccaaggagtcgaacagtcctaagtacacgccgttggatactgatatgcgattgaaagacgccttggatgcgctggagacgaagagagagcgcgactcgttggagaacattgccgtttccaagtctaccacaaccaacttctctttgtcgaacgtgcgcgtgggaatccaaaacaagcgtcatcctacgcctatcgaccccgccaacttctccctttcgtatagtcattcgcatcgttataccagcggagagaccaccgtttacgagaaagaagaccaatggcgtggcgcgttggcttacaactggactcccgtcttcaagcccttggaacctttcaagaaaatcaagagtaagtcgaagtattacgacatcttgaagaaattcggcttgaattggttgccgcagagcgtagctttcaacaccgagatttcccgtatctactccgagcagcagaaacgagacatggaagacttgggcggttctaagttgccattgatattcaatcagcaattcttgtggaatcgtgagttctccttgcgttgggacttgacgaagaatctccacatgtctttcaatagtgctactcatgccgagatagaggaaccttacacgcctgtcaacaaagacctttatccagagcgataccaagcatggaaagactccgtgaaaatgagtcttcgcaatttcggtagaccgcttacctataaccagagtttccaagcctcctataaggtgcctatcgaactcattccgattttcgattgggtatcgaccgatgcggcttataattccacttataattggcaacgcggaacggatttggacgatggcacgtcgttgggtaatacgattgccacccaccgtacgttgaaaatcaatggtgggttcaacttggaaaaactctatagtcatgtgcccttcttaaagaaagccaatgaccgattgaacaaggaaccgagtcgttcgcaaatagataaggagcgcaaggatcgtcaggcgaagaaacaagccgccaagcaaaagaaggaagaagcggctcagaatggcgagggcgacaatgctcaagacaagaatgccaagaatgcgaaagatgcaaaggacagcaaggacaacaagaagaaggagctgcccaagaacaagaagggattcgagaaggaaatcactttgttgcctgataccaccatcgaggtcaaccacggcaagaagaccaaacgactgattgtctctgccaagacggaagatggaaaagcctaccccgtgaagttcaagaaagtagacgacaacaagataaagattaccagtcgcgtggattctgccttgaagttgaaggttaccgtcacgcctaaagacccgttggaagacaaaggatggtatcgcaccgccgagtgcatcgcccgtgtgttgatgatggtcagaaacgtcaatttctcgtatcaaaacaactattcgttgtcgttgccaggcttccttccaaacatcggaaaggcgttcggacaaaccaacaagaccagcgtattgtcgcctggattggattatgctttcggtttcgtaggtgattcatatatcgaacgtgcgcgcgagaacaattggttgttacataacgagtcggtagctacccctgccacgtcgagcaagaccgaggatttgcagatgcgcatgacattggagcccgtgaagaatttcaagattgacctgaatgctgcgcgcaccatgaccacttcaaagagcgtgcaatacatgtatgagggcaaccccacgacgcagaacggaacgttcaccatgaccaccctgtcgctcaagagtgctttcgagggaatgggaaatgccaacaatgggtataagagcaacagcttcctgaagttctgcaattcgttgagcgagttccgtgagcgtgtggaagcacaatataccaattccgtctatcccaaggggaccacgttggctggaaagacgttcaaccccgagaatggcggtgtcaacatgtatagtgccgacgtgatgattcctgcattcctcgcatcctatacgggcatgggcggtaagtcgctcagcatcttcccgtcgttgtctaagttgcttcccaactggaccattcgctatagcggattgagcaagttgccttggttgcgcgagcatttcaagagcgtcaacctcaaccattcctacaagagcatctacgccgttggctcgtatacttcctatagcacgttcatggaatatatgaacggattgggattcatcaaggatgcaaccacgggcaaccccgtacctaattccatgttcaatgtctctaccgtcagcatcaacgaggccttctcgcccttgttgggtatcgacgtgacgatgcacaacaacatgacgtgtaagcttgagtatcgctctacgcgcgtcttgacgttgagcatgacgagtattcagatttccgaggcggtgagtcacgactgggtgattggcatgggatataagattaacaacttcaacttcttcggaatgaccaaccatcgtgccgtgaaggggaagaagaagggcaatggacaagacgacgagaagcagaacgccaacagcaaggccacgcaacgaggaaagacgcaagtgaaccacgacttgaacctgcgcctcgacttcagcttcaggaaacaagctgccattacgcgcgacatcgccagcatgaccagttcggcttccagtggcaactccgcattgaagttgtcgttcatggccgactataccttgtcgcgtctgctcaccatgagcttctatttcgaccgccagactaacacgccgttgctctcaagcagcagttatcccaccaccacgcaagatttcggattgagcatcaagttgtcgttgaccaggtaaaccactcgtccgaaaaccaaaatagggatttttctcgctattatagggaaaatcccttgtcataccccacaaaatgtatgtatttttgcaccacgaaatcatttaatgtgtaacgatatgaaaaataattcgattatctcagcagccctcatcgcattgggcatcgtcatcttaggatggtgtgtgaagtctggtattgacaactttgccaacaaagaccgtaaggtgaacgtgaagggattggcagaacaggaagtggaagccgacaaggtgacatggcctatcgtgtcaaaggaattgggaaacgaccttcccgaactttacaataggataggggccacccagtctaaaatcaaggcattcctcttgcgtagtggcatcaaggaaaacgagttgaccgtgaacgccccgcaggtgattgaccttaatgcggagcaatacagcaacaacaccaagccttatcgctacatcatcacgtcggttatcaccgtcacctctaataatgtcaagcaggtgcgcgccattatcgctcgccaaggcgatttgctcaaggaaggtgttgccatcgtcgatggcggctacgacaaccccatcaagtacgaattcgtgtcgtttaaggaaatgaaacccaagatgatgcaagaggcgatagagaatgccgaaaagaccgctcagcaatttgcggagaacagccactccaaattgaacaagattgtcagcgccgaccaaggtcagttctccatcgacgaccgcgattcaaataccccatacatcaagaaggtacgcgtggttaccaccgtcacctattccttgaaagactaaatatataaaaagagggtccttaacctaaactggtttaagggcccttctcttttatgttgagcgcgaagcactcagggtttctcagaggaaaaccctttttttgtgtggaaaagaagttgataagttaaataggtttttgtgtcttttccaatcttcaaattttcctttttcttgttttacgctaagacctcccgtcgttttccgtaaattcttaagtattaaggagttgtaaaatggaaaaacatgaaagacctcccgtaagacctcccgtaagacctcccgtaagacctcccatagacctcccataagacctcccgttggtgtttgtgtaagttagcaataaaaatgattgatgaagcaataccctgatacacttgaaatgagagcgcggaaatagattcaactgaaaactaagtcggtaagacgggaggtcttacgggaggtctatgggaggtcttacgggaggtcttaggtgaggtcttgaaaaatctaattcgttgataataatgtgtttagatgaaaataggggaggtcttggcaaaaacaagaaatctcatgttttacagaaaatatacaaatgctatttagattatcatttagatggttgggtagtagtatttcctcggtcagtaaatagaagattgaggtaaacgatagctttatatgccataaaccattcgtctgtaacgcacaaatcaatggtttgtagcatataaagctatggcttttgacctaatgatcagctgtttttcattttctaatcatccatttgcagttcctcatgggtgagttgcatagttggctactttcatttgctgtctacgacatctaaaaacaattatgccctccgaagagggcatataggataaaatccttcggcatatagccttattgtgataagatgtagaatatcttattgcttgcaaagatagtaaaaagcatcgaaacaaaaaaataattagcatttatttttttagttattatttttttattaattttgtttattactaattacctaaatatatgaaaaagagaattcttggtatagacactggtacaaatagccttggatgggctgttgtagataaaatggaaaatggtaacttttcattaataaataaaggtagccttatctttcaagagggtgtcaaggtggaaaagggtattgaatcgtcaaaagctgctgacagaacttcccatcgtgcactacgtaaacagtacttccgtagaaggcttagaaagatagaagtacttaaagtacttgttgatttcgattggtgcccttatttgtctgatgaagctcttcatctttggcatgtaaagaaggaatatcctatggatgaggcatttatctcatggcagcgtacaaatgacaattttgacgaaaatccgtactattacaggcatatttgtttgcatgagcagttaaacttagacaaaaaagcagataggtacgtgttaggtagggcaatgtatcatttggcacaaagaaggggttttctcagtaatcgacttgaacaaagtaatgatgaagaagcaggcaaagtaaaagagggaatttcttcgttgtcaaaaagtatgtctgatgcaggatgtgattatcttggtgactacttttataaaatatataaggagaaaggaaatacggaaagaatacgtacgcgctatactgatcgcgaagagcattataagaaagagttttatgcaatctgcaagcaacaaaatctttccgaaaagcaaatatccacattagagaaagccctatatttccaacgtccgttgaaaagtcagcgacaaggtgttggcaagtgtacttttgaaccaaagaaagcccgtgtggcagattcacatcctgcatttgaactattcagaatgctgtcgtttgtgaacaacatcaaggtaaaaggtccttatgacattgaattacgcccacttacgacagaagaatttgaaaaggcaaagcctatgttcttaagaaaaagtaagcctcaatttgactttgaagatattgccaaggctgttgctggaaaaggtaaatatcaacatgtcaaggaagcaggggataaaccctataagttcaactatagaatgacgcaaagcgtaactggttgccctactatcgctaatctcatttccgtctttggtgaagattacgatacagctatagctgaacgatacattctttctgatggcaaaagcccagagcaaatggtcaatgatgtgtggaatgtgttatatagttttcaagacaaggaaaaggtaaaacaatgggggatggagaaacttcagttgagcgatgaggaatccgagaagttttcaaagattaaactcacccataactttgcatcactcagccttgcagctattaaaaagattctcccatggttagagcaaggactaatttatccacatgctgtgttgatggcaaaggtacctgatatagttggagaggatgtgtggaagagtcgaggtgaatctatcaccagagaattgttatcatttatttctaatttcaatcctaaggatgtaacgatgacgggtacacttgatttctgtatcaaagatatactaaaggatatttgtgatttggaaccaggtgcaacagaaaagctttatcatccatcaatgatagatacctatcctgatgccaagaagaattcgcaaggtatttatcaattaggatctccaaggacaaatgctatacgcaatcctatggcgatgcgctcacttcaccagttgcggaaggtggtcaatgctttacttctaaatggcactatcgatagtcaaacagaggtgcacatagagtatgctcgtgagttgaacgatgcaaataagcgtaaagccatatcccaatggaataaagaaagggaaaatctgagaaagaaatacgctgaggatatacgtacattgtataaacaagaatgcggtaaggatattgtgcctacagatgatgatatcgtgaagtttcaattgtggaaggaacaaaaccacatttgtctttatactggcaattctataggtattaccgattttgttggcccaaatccaaagtatgacattgagcatacgattccaagaagcgtaggtggcgatagtacacttgagaacatgacattatgctctaacaaatttaatcgggatgtaaaaaaagccaaactacctactcaactatcaaaccatgatgaaatcatgctgagacttgaagagtggcgcaataaaatcgatagacttcgtaaggacgttgaccgcgtaaagacctattcaagtatggaaaaggcagtcaaagatcgtctaattcaaaaacgtcatttgctgaaattggaacttgattattgggtgggaaaatacaaacgattccaaatggaagatgtaccagatggatttgctcgtaggcaaggagctggcattggacttgttggcaaatatgctgggttgtacttgaagtctttgttccataaggctgatgatagaaccaagagtaatgtgcgagtagtaaagggagcaactactgctgaatataggaaaatgtggggtatacaagatgaatatgaaaagaaatcacgcgacaatcatgtccatcattgtattgatgccattaccatcgcttgtatagaaactggtgagtacaatgccacggcaagttattatcaacaattggaggagtatgagagaacaaagaaaaacaaaccttctttcccaaagccttggcctacctttacagaggatatcaaggctattgcacaggaaatgttggttgttcatagtaccccagacaatatgccaaagcatgctcgtaagtatgtgcagactgctaacggccgaaagcttgccaaaggcgactctgcccgtggttctttgcataatgatacttattatggagctatagaacgtgacggtgtaataaaatatgtggttcgcaaagaactgggtagtctcaaggaaagcgatgtagataacatcgttgatgaagccgtaaaggagaaggtaaagcaagctattgctgaaaaaggttttaaagaagcaatggcaggtgtcatatttatgaacgaagagaaaggcattaggataaagaaggtaagatgcttcacgccttctgtcacaaatcctttacatattcgtgcccatagagataagtctcgaaaagaatacaagtgtcaattccatgttaccttagatggtaactattgtatggctatctatgaaggagaagtaaaaggaaaaatgaagcggacttatgagattgttaacatgatagacgcggcagcctatttcaaggaaagcgctggtttgacaaagttgtatcccattgctccagaaagtaaaaacggattaaaattcaggtgtacagttcgtaccggaacgcaaatattacttttgcaatcagacgatgaagagatagactttgcgaacaaggatgatatggccagaagattctacttcgtagcagtgatgcgtagtgatggacgaatcgttttgcgatataatcaagatgcacgagacgcaacgacgttgaaaaaagaaagaaagtctggtgcatacaaagtaaatgaaaagtatagatctgaaataatgttgtccctatcagattttcatgccttggttgagggagttgattttaaaatcaatgtgcttggtgaaatcgttttgctaaaatagtaaggactatgttgaagcgcacgcttgttttttcaagtccgatgattctaacgctgaagaatcagcagttagtgattgcctataaggactctccagatgaatcacgaactgttccaattgaagatgttggggtggtattgctggagaatcaacaaacttttataactctgcctttgttgaatgctttagtggagaacgaagtgcaggttgttctttgtaatagcaaaggtatgccaagcgcaataatccagagtatgaatagcaataacttgcaaggtgaaactcttaggaatcagatagcatgtggtgaggttcttaagaagcaactatggaagcaagttgtcgaagctaaaattaagaatcaagcatctttactgaatagtattggtgaaaagggtaatatactaaagcctttctatactaatgtcagaagtggtgacttagacaatcgtgagggcatagcagctcgtatatatttccagcacctatttggtgataactttattcgtgatagagaccttcctggaataaatgctatgcttaattacgggtattccattcttagagctgcaacatgcagggcaatcgtttcatctggactactaccagcaataggtattcaccaccataatagaagtaatgcttaccctttggcagatgatttgatggagccatttagaccttttgtcgatggagtggtgtatgatttgttaatgcgtggagagatagaactttcaaagaatgtcaagggcgaattaattagcgtgttgtatgctgataccatgtatgagaaaattaagcgtcctctctgtgttggtttgtcaatgactacagcaagtgtggtgaaatgtctctcgaaagaattaaatactattagtttgccatcatttccatgacatttgaaagattaaacgcctatcacattatgtggctgtttgtgatgtttgatttgccagttcagaccaagaaggaacgaaaagatgcaactttatttcgtaagaacttggagaaagatggttttaccatgcatcaatttagtgtctatataaggtactgcggttcacaagaaagtgcaaaggtgcatattaaaagagttaagagttttaccccagtaaaggggcatataagcgttctttcaattactgataaacaattttcaaacatcattcatatttggggagctatagaaaataaatcaaaacctacaccattgcaattggaattttattagtatttttgcttagtgtaagtctattttgaatcacttcatacatatgttgtgtatcgtatataattgaaaataagtgagttatgaagtgtatgttgtggtttgatgtagaataaaggtataagacaatcaagaggaggttgtttactgcagaggaggagttgtggtttgatgtagaataaaggtataagacaatttgcataccgaccgaaccgtagtcaataaggttgtggtttgatgtagaataaaggtataagacaataatccgatttgtattttgacgatttcgcagttgtggtttgatgtagaataaaggtataagacaataattgcagcatctaacaagattttgtcgttgttgtggtttgatgtagaataaaggtataagacaataatctgcgtatcggcaccgatgaagattttgttgtggtttgatgtagaataaaggtataagacaattgcaagtattgaatggtattcagattttaggttgtggtttgatgtagaataaaggtataagacaatattgatttctacgccgtggacccatccactgttgtggtttgatgtagaataaaggtataagacaataaggcgagccgaaaggcgatgcagacaatagttgtggtttgatgtagaataaaggtataagacaattatcacctcaccagcctggttacgcataatgttgtggtttgatgtagaataaaggtataagacaatattaataatagtagtggaataatcccagagttgtggtttgatgtagaataaaggtataagacaataaccgtatcgccgaagtgggtggcatcttcgttgtggtttgatgtagaataaaggtataagacaatcgttcgccatctcgcgaatgcaagtgaaagttgtggtttgatgtagaataaaggtataagacaatccatcggcggaacttcttccaagccgattcgttgtggtttgatgtagaataaaggtataagacaattggttctgatacatctattagaataatgaagttgtggtttgatgtagaataaaggtataagacaatttgagcattattacgtcccacctcagaatagttgtggtttgatgtagaataaaggtataagacaatcgcccgtctttatccctattcacgctgacggttgtggcttgatgtagaataaaggtataagacaatggattacccgaaaggaacaacggcaatatggttgtggtttgatgtagaataaaggtataagacaatgtcacgagcaaaaatacttgcagtattattgttgtggtttgatgtagaataaaggtataagacaattgaggaacaatatccgcaagcacatcatcgttgtggtttgatgtagaataaaggtataagacaatacgcaggaagatatactaacaccgagagcggttgtggtttgatgtagaataaaggtataagacaattgaacatagaacttaaaccaatgtaacatgttgtggtttgatgtagaataaaggtataagacaatcatggctaattcgtgccagttcttttcaaagttgtggtttgatgtagaataaaggtataagacaatgcacgtataagagtatatgccaatgacaacgttgtggtttgatgtagaataaaggtataagacaatagagcttttggagtattgaatagaaccctacgaaccattaacgaacgttaaaattttgggttggatgaaagggaaaggcataaaaaagtggggaagatttgaataatatgagattattgtttatttttgtgtacaatttaacgtagacaattatgaggattcttttgatagggggaacgggtacgattagtagtgccattacccgacaattggctgagattggacatgaggtgtggttgattaacaggggaaacagaccgcaagacgtacctgatggggtgcgcgtgatggttgctgacatcaacgacgaggagacggtggcaagtaagattgccgacatgcagtttgatgcggtgtgcgacttcatcgcgtttgttcctgagcaggtgaagcgcgactatcgtctcttcgcagggcatacgcgccaatatgtctatatcagttcggcttctgcctatcacaagcccgtgagaaactatatcatcaatgagggtacgacgttggccaatccttattggcagtattcgagggataagatagcgtgtgaggacttattgatgtcttactatagagagaaactatttcccgtgacgatagtgagaccgagccatacgtattgcgaacggagtgtacctactggtcttcatggcacgaaggggagttggcaggtgctgaagcgtatgatggaaggcaagcccgtattggtgcatggcgatggcagttcgttgtggacgatgacatggaacgaggatttcgcgcgtggtttcgtgggattgttgggtaatccgtatgcgataggcgaggcattccagataatgtctgacgagtcgctgacatggaatcagatatatgccatcatcgccaaggtgttgggcgtaacgtttaagccctatttcgtatcgtcgtcgttcttggcggaagtggcaccagccgaatacgacgtagagggcaacctgttaggcgacaaggctgctacggtggtgtttgactgcacgaaaatcaagcgtaccgttccaggcttccttgccaccacgtcgtttgagcatggcgtaaggaagtgcgtggagtatatgaaaaatcatcccgaatgtcaacaggatgatccagagttcgaccgttggtgcgatagagtaattgaagtgttggaaaccgccaagcgcagtttctaacactcgaagatatgcggtgtagaggagttcaggagttgcaggagttcaggagtaacagacaataccattgattcttagaaatctatgaaacggaactttcataactaatgtctgaactcctgaactcctgtaactccgacaagtatgtcttagagggctgctttcaaaccgcgaatgacggcagaggtgaagccagcgtgttccatctcgttgagtccgcggatggtaacgccgccaggcgttgtcaccttgtcgatggcagcctctgggtgttcgcccgtagcttgcaagagttctacggctcccttgacggtttgcaagacaatcttctcagagtcttttgccttgaatcccagttctacaccaccttccacggcagcgcgaacatagcgcatggcgtaagcgatgccgcatgaggcgagtgtggtgccagcaccgagcaatcgctcttcggtgatgatgctttcgcccatgttgtcgaagatttgcttgatggtgttgcattgtgcggaggtggctcctacgggcacgatgaaagtcatggattgcagttcggcaatggcgatgttaggaatgacgagatagaagggtagggtgccctcttcacctttgttcatccatgcgatgacctgttctgacttaatgccagcggcaacgagaaccagttgttggcaactataatccaacgaatctttgatgtctttgagcacgttttccacgagccacggtttcaccaccaccatcacgatgtcagccccttcggctgcaacatgattgtcggaagtaacactcacgcctttctgcgcaaacttgtcgaggatgggcgcgtatgggtcggcaacggtaatatctgccgtcttgtattcatttgtcttgagcaatccttctacaatggcaccacccattgctcctgctccaattactgatattttcatgataaaactatttaattcacaattaataattcacaattaataattcacaattggactattctcttgcttctatattttttaatgaagaatgaagaatcttttgaacattgagcattgagcattgaagattatgctattctcttgcttcttgcttctaactttttacttcttacttcttactatctataaaacttccccttaattctccctctccttgggagagggttggggagaggcctaaaatttacttagtgtcttcttgaacttctcgatgaatgcgtcggcctcttgttgagttaggcatagtgggggaagaagacggagcgtgttggttcccgtgcaacccgtaaagcaatattccttgtagatgagatgttggcgcacgtctttctgagggatgtctaagtcgattccgataatcaatccctttccgcgtacgtcggtgatatggctattgggttcgtctttcatctcgttgagtttcttcatcaagtaattgccaacacggtcggcattctcgatgagattttcctcttccatcacgtcgagcacggccagagctgccgcacatgcaaggtgattgcctccgaaggtagtacctaattgtccgtattcaggcttgaattcgggtgaaatcaagacaccgcccatcgggaatccgttgccaatgccctttgccattgaaatcaagtcgggcttgatgcctaaccactggtgtgcaaagaacttaccgctacgaccatagccgcattgtatctcgtcgcaaatcaatacggtaccatatttcttacatgctgcttgcagaccttgcgcaaactcaggcgtggccatgcgaatgccaccgacaccttgaatgcattccaagataacggcacacacatcacccttcgccaattccttttcccatgcctctaagtcgttgagcggcagataagtaacatgattgttggcattgataggtgcgatgattttgggattattagtcacttccacggctaacgaagtacgaccgtggaaagccttctcagccgaaagcacgcgcgtgcgcccattgtggaaagatgccaacttgagacaattctcgttggcttcagctccgctattgatgagaaaaagttggtagtcgtcgtatccgcaaatgtagcccaatcgctcagcgagacgtatttggagggaattgatgacagaattgctatagaatcccaacttttccagttggtttcccacctgttcgatatagtgagggtgagaatggccgatgctaatcacggcatgtccaccgtagaggtcgaggtattcgttgcctttatcgtcccagacatggcacccctttcccttgacgatgtttacgttgaataatggatatacgtcgaataacttcatgcgaaatgtttgtgtttaagtaatcaaaatgcgcttggtttgagtttcaatccctcggtctcgtcgatgccaaacatgatgttcatgttttgcgtggcttgtcctacggcacctttcaggaggttgtcgatgcaactggtgatgagaatctttccgtcgaatacatccacgtgaacgagacacttgttggtgttcaccacttgcttgaggtcgatggccttgtctacgtaatgcgtgaaggcagcatcgcgatagaaatccttgtaggcttggatgatttcgtcagcgctcaacgagcaatctttagggagtttcaccaccgaagtggcgaagatgccacgtgcgaagtcgccacgatagggaatgaagtcgatagcagcatctaagtaaccctgcacttgttggaggctctgtcggatttcaggcacatgctggtgcttgaatgccttgtagatgctcatgttgcccatgcgccaagagaagtgtgtagtagcgctcggcttttgtcctgctcccgtagaccccgtgatggcgtttacggctacgtcatcgttgatgagatgtaggcttgcggcaggaaggagtcccaactggatacatgtagcgaaacaccctggattggcgacatgcgacgagtgagcaatgacttccttgttgatttcgggcaagccataaacatagtcatggcaatcgggcgtgggatgattcacgaaagaatcgtgacaagccacggaagaatgcaagcggaagtcttgcgctaagtcgatgattttcacgtttgaaggaacgtcatgttcgcgaaggaaggcttcgcttttaccatgaccgaagcagaaaaacaatacgtctacttcgttgaagggcatctcgtcggtgaaacgcaagtcggtttcgccatataagccctcgtgaatgtcggtgatgagattgccggcattgctctcactattaataaatacaatgtttgcgtgtggatggttgagcagcaggcgaatgagttcacctgccgtataaccagctccaccgagaattccaatattaatcattttagatttatgatttgggcggtattactatccaaagcaagagatagagcagaacgcctgagaatgcggtgcaaacggtaagcaacgcatatccgatacgaaatatcgtagcatcgatatccaagtaatcagcgattcctgcacaaacaccaccaatgatgcgatcgtttgaacgataaatttttctacctgttgacatattttcttgcatttttatgtttcacttacatccattagacgaaatgaatggaatgaaagttgcaaatgcgataaattttaagaggtgagaggtgagagaaatgaagaatcttaaaaatgaagaatgaagaatgaagaatcttttgagcattgaactttcagcattttagattatgctattctcttgcttcttgcttctcatttcttgcttcttatttcttgcttctcacttctcactatcaataaacttccccttaattctccctctccttgggagagggtcggggagaggctctcctttttacctcttctcctccttatgaataccatagtagacgcggagaggagtgctggaaaccttgatgaatcccttggcttcatcagcggtccatcccgtttgcgtctcaccatattctcccaacttcgacttcgtcaagtcgtcattagagtctacacctacggtttcgaatccgtaaggacggagttttaagatagccgttccgttaacgttgcgttgcgaactggtcagcatagcctcaatatcaggcattacgggctcgagatattgactctcgtgcaagaacattccgtaccaattggcaacctggtccttccaatattgttgccacttgctgagcgtggatttctccaacagacggtgagcctcgatgatgagtttcggagctgcggcttcaaaacctacgcgtcccttgataccgatgatagtatcgccaacattgcaatcgcgaccgatagcgtaagatgcgccaatctcctcaatcttttggatggctttcaccttgtcgtcaaacttctcgccatttacggcagctatctcgcctttctcaaacgtaatcttgagtgtggcttcaggttctttggcagtaacatgcttgagataagcctcttcggggagcccttgcgtggggtcgagcaattcacctccacagatgctggtgccccagatacccacgttatacgaatatttcaatttcgtgaaatcagcgaagaatccgtgttcgttcaagtaatccacctcttccttacgagtgagtttcttatcgcgcgtgagggtgataatctccactccaggagccattaccaagaaggtcatatcgaaacggatttggtcgttgcccgcaccagtagaaccgtgagcgatggcatctgctccgatttcctttgcgtaacgggcaatggcaatggcttggaaaatacgttcgctactcaccgaaatgggatagcaattattgcggagcacattaccgaaaaccatgtatttcaacgacttctcgtaatactcatgcgtcacgtctaatgtcacgtattttaccgcgcccagcttataggcgttttcctcgttcttcttgagttgttcctcactgaaaccgcccgtattggcacaagcggcatatacttcatacccgtcgttggtgagtttcatcaccgtatatgaggtgtcgagacctccagagaatgcaactactacttttttcttcatttctttttatctattgtttttattctttctatcacttcttgtggcaacttggcgggcaaatggtcttcggggtcgaagagcatggcggtgcaaatgcaatatttgcggttggtgcggtgaagtacgtcaacgttgatgcaaccttcacaaccgcgccagaaagcctcgtcgtcggttaagtcgccgaaagttacgggcttatagcccaactgagagttcatcgtcatcacggccgctccactggtgagactgaaaatcttggcgtgaggccaacgaattctcgccaacgtaaacgtaacgttcttgattttctttgaaatgcccatgcctctgaaatcgggatggacaatcaaaccagaggtggtgacgtacgacttgtttccccacgtttcgatatagctaaatccagcaaacttgtcgccttgcaatgcaatgacggccttcgcctcacgcatcttggtagccagatactcatgggtacgcttggcaatacctgtgccacgaacttttgcggcatcttcaatggtcttaagtatggtatcgacatatttttcgtgcgatgggtcagccaccataacttttacttcttccattatgtcttaaatctttgtaaaatgtattggcttgataatgtgaatattatttctctttgacggttgggataatctcacccaaggccttgataatctggtcgggatgagtgccgtctttgatgacgataaatatggtatcgtcgcccgctatcgttcccaatatttcgggcacaaccatgctatcgatgttataggcaatggcacttgcatagccagggcgagtctttattacacccatgttaccagagaaattcagggagatataccctggggtttccaacatgtccttggcggtggtgtgctt

SEQ ID NO: 1655 - DNA, 23630 bp, synthetic construct
  misc_feature 1..23630: note = Synthetic
  source 1..23630: mol_type = other DNA
tcaatcacttcgatggtcttggtgacatacttgggagctgctttcttatgaccgaaacggaagttcacacccagcatagcggtgaacatccagtcgtcagagttgttggttttcgagttgaaacgatcgttcagcgagttggcgttgacttccagagaaagaccaaggggcttagcctgattggtctccaagcgcagaccggcacgcaggttgtggctcaagcggttcttgtcccatgccagcggagtcacatcggcaggtatattcaaatccttcagctcgtcattatcccaagcgtagttcaaacctacaccacccagcaggatgacgttcaggaaattgtcagagccctcgctgaacatattggtcagattcagcatcagatccaaatcgggcgtaatatatttccatttgtaatacttgtcaatagagttgaaaccactctttgcctgccatgcgttgacatgcagacgggcaccaacgacgggcgagaaataatggccgaacgaaagggctgccgtaggagtgattaacttgtccatgggggcattggttgaggttagctgaacaccaccctgtgcttcaacataggaatacgatgtccaagagtttgtttgtgcctgtgcagcacctgccatcagcaacatagcggctgcagcagtcaataggtttttgcttttcattactctagaggtttttaaaaaatccgattttctgcgtgcaaagataataatttttcttgaaatgacaagaaaagttgctaaaaatcctttttttatgttgacatatcacgaaaaattgctacctttgtacattgattataaaaaacaataacaacatattgcaacaatgtctcctatcgaaattaaacgtgtgaccgacaagcgcggcctcgacgcgttcattcagttacattatgatttgtatcgtggaaaccaattcgatgcacctaatctgtacaaagatgaactcaggacactgagccgtgacaagaactctgccttcgatttctgcgatgccgagtatttcctggcctatcgtgacggaaaggtggtgggtcgtgtggctgccatcgtcaactatcgttacaacgagcagtggcagcgcccctgcgtacgtttcggctggctcgacctgattgacgatgcagaggtgatgcgtgccttgctcgctgctgtagaggattacggtcgcgagaagggtatgaaggaaatcatcggtccccttggtttcaccgatatggatcccgagggtatgctcaccaagggcttcgaccagcttggaaccatggccaccctctacaaccatccctactaccccgtgctcatggagcagatggagggctacgagaaggacaacgactacgtggagtataaggtcttcgtgccagagagcggtatgcccgagaagatgaagcgtgtggcagagctcaccatggagcgctataacctgcatgtcaagaaactgaagaaatcagaaatctatggtcccgagaaatacggacaccgcgtcttcgacgtcatcaacaagaccttcggccacctctatggctattcggagatgtcagagaagcagatggacgagtacgtggatatgtacttcaaattcattgacctggagctgctctgtatcattgaggactggaacacccccgaccacgactgcgtgggtgtgggcatcaccatcccctcgctcaccaaggccctgcagaaatgccgtaacggtcgtctgtggcccttcggctggtggcatatcatgaaggcgttgaagttcaagaagaccgatgtcgttgactgtctgctcatcggcgtattgcccgaataccgcgccaagggtgccaacgccctcctcttctacgacctcatccccatctaccagaagtacggcttcaagtggggcgagacccatgtggagatggagaccaatggcaaggtgcagagccagtggatgtacttcgatcacgaacaacataaacgccgccgctgttacaagaaaagcctataaagccccctccgtctgagggagggtgtttgtaatcccgctcggccagagcgggattattattagttgggttctactcattaggtaggcattgaacatattattcaaaataggagccacttaacaagctttccttgtgcatcgaaatagaactcaccgtacttggcatcgttgcgtgcgacgtatttgtaatcggtacgtgagggattatagcgttttgtggtgcttaggccatagagggtgtacactttcatgttaccgctgttgtgggtgtacttgaagttacccatgccaccctttgcccattctgcctgtacgtccttaaccagcatcccctttttcaaaaatgacattgtctgctcggcatcgcctgcgtttacaatgactgtccatttaccctcggtgtcttttgccaagacaccacatgaggtagactcattattgcgtgcaacaatcagcccctggacaccatcttgagaaaaaggcataagtttgacatccggaccagaccaagaaaagttttttacatagcgcttacctgcttccgtaaattcaatggtcatgatgatggtattgcctttagtgccgaagttgatgacttcaagtgtggccgtcgaggtgttgggattttccacaagagtcatctggccgttgccgaattttgctttggcgaaatttctcgtcaccttatagttgtggtcaacatactttgtacctgctgccagtctctgtgcgtcggcgatgacaggatcttccttgatgttattgacgcgctcagcttctgctgcttttgcggctgcctgcatttcccgttcctctttagtagataggcatttcccatttttgaaaacgccgtatttgttctgtgaggcatatacctcaaatgagctttgggtaccattgttctccatatagggtagcagtttctctttaatctgtttatcaacctctttgcttggagtgttactctggatgttattaattgatatagcgctaaaggcttttggtgccaacataaactcttcacattcccataattcggcgatatttcttttatgtgagaagaatgatatattagccaaccttacattagcattgtattttttttcgtcgtatttgacagtaacgacggcaccgtttttgtaatgctttttccaaccgcctatctggtaatcaatgtcattttgagacattgacggttgtttaccccagagatagtcgccatttaaaaaggttactttaaattctttttgtattatatcttgactggtcattacatcttttgacatacttatcgaataggtccaagtgcgtccctttttgtcgctacatgttgtttgactggacgaattggttacttggggtatttgctttttgtaacggttccctccaacttccaaatacacttccttcatttgagcttgcaaataatatggcaaaccttcaggaatatcgagtttctggatgtcatatttcataatgcgcaaaaggttggctatttctttcgagaaatcgccttggggaatcttcagaccaaaatctatgaaaccatcagcatcaacgacaatatcccttgtcagcgtttcggtcgatttctgaatttcattatttttgttgtatgagtattgattttggataggaatgccgctttgagatatacggaatgaggtttggttacaattctttcctatgtaccaccttgtaaatgagccaccagcctttagtcttattttatctgactcgtcgtaggtaatggttccgttgaatgtgttgttaagtggagtaccgtcttttatttttactattgcgtcagtaacagtacggtcggcgaatgtgccttcaatggttagacccttcaccgtcagctctccaagaccttctggaattttctgtttgtttactttaccattataggtgtgaccgagatattcaatcttctttgccgcagtatcctgaggtacggtcaacatagtgctaaacagcacagctgccaaaagcgtgatgtatttctttgttttcataatgttgattgttttttgttattagtaaagttgatttcttccgcaaagatatgacttttcagcaaaagagattctgtccattccagcccattcttactgtccgcatcagtccatttcagcccatttatactaattgctgacttatttcttgtcattaaaccttgtcttctgacggaaaatgtgtaactttgcgttatgattatcaccaaacaacacattgcagccctacggcaggctatcgaggaaagtacagggcaacggccccagactcccaaagatttcgaccagcttagtgaatctatctataatagagtgggcgagatgctgagtcgtaatacgctgcgacgcatctgggggcgtctgcccgataagcgggagccccgccacagtacgctctccatcttagcacacttcatcggctatgccaatttggaggcttttgtaactaacagcacagtgcctaacgacgatcagccaagcatattgtctctaggtcgtcaactgagcgtcattgacggactgacacgcggcgattgcctgcgactgatgtggcgcccaggacgtgtgtgcgacgtggagtacaacggcgacctgcattttcgtgttatagcgtccaagaacacaagactttccactggcgacaccttcctctgttcactcatcatcgagggacagccgctttatctcgaccaattgaagcaaggtagcaaccctccaacagcatatatctgcggaaagcagggaggcgtaatgtttgaacttctgcactgattaacgtaacaatctatggaagaagaatattcctgctatatttccgaaattacaacagagcctgtcagcaagcagttttcagacttgactattgagtacacatcaggctttaacgtgatcgcacgcgcacagcgctatggccgttggtatatgctgaagggactgaacgatgcaaaccgtgacaaagcgatgccccgccaaatgcttcgaaaagagtttgacatactcatacgtatgcagcatcccaatgttgtgcagaccataggaatggagcaagtggaagggctgggcacctgcatcgtgatggaatatgttgagggaataacgctgaaagagtggttgcaaacaaaaagcaaaacgaaaaagggaacgggtgggaaggatgccgacgcactccgcatcatggacgaactgttgcaggccgttgcatacgttcactcgctcggaatagcacatcgcgacctgaaaccacagaatatcatgctcaccagacagggacttcacgtaaagctgatagacttcggtcagtctgacaccgatgactatgccgtactgaaacagccagcaggtactgtcagctatatgtcgcccgaacagatgacaatgcagatacctgacatccgtaacgatatttactcaatcggtgtcgtgatgaggcagatgcctctacccagttattataagcgtgttggaaatcgatgtctgctccccatcgaggaacgctatcagagtattgaggaaatggagaaagacatcatcacacaaagatcacaaaccaaacaactgatgcgctggggaggagttatcgttgtgggattatttctaaccgttatgggattcttggtgtggcatgtgcagcggctcgacaatgaactgaaccgtgtgtcctacgccaaagagaaagctatcgaggcacttcatattgagatggagcgcacccaactggaacagcatactgacacgctgacaagatgggaataccgttggcatgacttcatgcaacggataatgacagtcaatcaattctgttacgactataccgaccgacttgatgagcgtttcacagataacgaccgcgaccgtattcgtgaagcgctgcttaacgagtggcagctctggcagcaacgcatctgtaccctcagtacagccaaagtggcggcaaagcggcgaaaggctcatcggtcaaaatctggtatggagtagcgaaacatattccatacaaaggcattgtgataggcttcggcactggtagcaggtactacaagtgttgcaaagcgcaacgtgtgctcgtcaaacacatcgttataggagtcgggaggcatgatagccctcacctctatgcgctgcagtttagtacatccgcggaaggcatagggccagatgtatttcgtaccgcaaggcactacaatagaacgtagtgaactgcagttcataaacgactggtccccaatatcgtgaatggtgttgggtagcacaacgtcagtcaaccgacggcaattggccaaagcgtggcgtgaaatacaggtaacacggaatatctgtccgtcaggggctgtcactttctcgggtacctcaatacaaccagtgagagttgtatcaatagcggtcttaaaataactctcatagcccaaagacacttcagttggaatacttcttataatatagttcgcatctaccttttttccgttgcaatagacaaaagcacgaaggcaatcgcctttgtgccaattgtgctggctccaagtcgtaagcgacagtaaacagcaaagcaatatggtaatatagcgtatcttcatctatgattcacgtattcctatcgcaaaagtaatatttttattcaaaatctccaaaatataataaaagaaaaatgggtaacggttttcatacttcgttttttttgcgtatatttgcagccgaaatacactttattataaaggatagatggaaagtattaattacactgacgacaacatccgaaccctctcgggtaccgagcatatccgcctgcgccctggtatgtatatcggccgactgggtgacggctccttggccgaagacggtatctacgtgctgctgaaggaagtcattgacaactctatcgatgagttcaagatgaaggccggcgaccgcattgagatcaatgtggacgacaacctgcgtgtctccgtgcgcgactatggacgcggcatcccgcagggcaagatgatcgaggccgtcagcgtgttgaacacaggtggtaagtacgactctaaggccttcaagaagtctatcggtctgaatggtgtcggcgtgaaagccgtcaacgccttgagcagtcatttcgaggttcattcctatcgcgacggaaacgtgcgcaaggccaccttcgagaaaggaaagctggtgagcgacaccaccgagccctctgacgacgagaacggcacctatatctatttcgagcccgacaatacgctgttcgtcaactataagttccatgacgatatcgtggagacgatgctccgcaactatacctatctgaacacgggactggccatcatgtacaacggccgacgcatcctctcgcgccgcggactggaggatctgctcaaagaccgcatgagcgccgatgccctctaccctatcatccacctgcagggcgaggatatcgagatagccttcacccatgccaaccagtatggcgaggagtattactcctttgtcaacggacagcataccacgcagggcggtacccatcagagcgccttcaaggagcatatcgccaagaccatcaaggagttctaccagaagaacttcgagtatggcgacatccgcacaggtatcgtggcagccatcgccctgaacgtagaagagccgatgttcgagagccagaccaagatcaagctcggctcgctcaccatggctcctatgcccactcaggtagatgccgatcaccccatgccgccttccatcaataaatatgtaggcgacttcatcaagaccgaggtagacaactacctgcacaagaatcccgatgtggccgatgtgatgcttcagaagattcaggagagcgagaaagagcgcaaggcaatggctggcgtcaccaaactggcacgtgagcgcgccaagaaggccaacctgcacaaccgcaagctgcgcgactgccgcatccactatagcgatgccaagaacgaccgcaaggaggagtcctgcatctttatcaccgagggcgactcggccagcggctccatcaccaagagccgcgacgtaaacacgcaggccgtcttctcattaaggggaaaacccctgaacaccttcgggcttaccaagaaggtggtctatgaaaacgaggagttcaacctcctgcaggccgcccttgatatcgaggaaggcatggacaccctaagatataataaggtgatagtggccaccgatgccgatgttgacggtatgcatatccgcctcctgatcatcaccttcttcctgcagttcttccccgaactgatccgcgagggccacgtctatgtgctgcagacacccctgttccgcgtgcgcaaccgtcgcaccaagattcgcaacaaacaagtgctggccgatgaagactcgaaaagagccaacacccagcacccatcacctaagagcgacttcatcgtgcgctattgctatagcgaggaagagcgcgtgaatgccatccgcgacttaggtcccgatcctgagatcacccgattcaaaggtcttggcgagatctcgcccgaggagtttgcaggcttcatcggtcccgacatccgtctggagcaagtcaccctgcataagaccgaccaggtgcagaagctcctggaatactacatgggcaagaacaccatggagcgccagaacttcatcatcgacaacctggtcatcgaggaagaccgaccagaggaagaggaagaactgtgaatcacgggggaatcaaaggcctgttgcagtgagtcatgtgtctccgtgattcatgattcctgcttaatttgcatattattctaataacgtatatagccatgagaagattctacttggttgcaatagccattttatggtcgttgatgattcacgcagttactgttgagattgacggcatcgcgtattatatcaatctgaagaccggcttaacggaagtaaccagtaatgctactcatccttatagtggtgacattgtcatagcagagaagattgtctatgaggaaactgaatatacggtgacagccataggtgaaagagctttctttcagaaaaaacatcacatctgtcacttttcctaagagcatcacaacaacaaagtcccacaaaggtcttgtcattatcaaatcaaaggacagaaacacaaggaaaaccgtcaaaggatcaaggtgataggtctgaagccaacctttaagtagtgtccatcttttgggggtcacttcagttgtaaaggagcctgaaacgcaacctaaacaagcagcaaacggattgtaaagaagcagcaaacggattgagaagtggcagtaaacgcaccgagatgtaggggttcgcgggtcaggatgtgccggttcgcgggtcgcgaaccggcacatctcgatccgtttgctgcttctttacaatcccaaacaagctatttggcatcctcattcatgctgtttcagtatcaaaaacaggccatttcgcaaaaaatgagcaacacctaacattttagatgtaaactactgataataaataagttaaccctggtatgtgttgctcaaacacctaccaaagacctaccatacacctaacctaacacctaccataaatgtaaaacggacatattgagatcttatataactatggtaggtgtatggtaggtgtttggccaacacctaccatgcctcaaaccctttatacatcagggtttcaaccctattatggtaggtggttaggtgtttttgcgatgtcttacctaaaaaacgtaagcgtatctgctttccctttcaatctatcccagtgcctctatgagtcaaaggcctgtcaccatgattcattgctcgcataataaaaatgccctccgaagagggcatataggataaaatccttcggcatatagccttattgtgataagatgtagaaaatcttacgcggcaaaggtagataattataacgaaacaacaaaatttttttgtgataataattgtttttcatcactatttttgtatttttgtgcttgaaatctaaaaactataaatatgaagaaaagaattctcggtatagatactggtactaatagccttggttgggcagttgtagataagaatgaagacgggtcttattccttaattcgtaaaggtagccttatctttcaagaaggtgtaaagatagaaaagggaatagaatcatcaaaggctgccgataggacgtcccatcgtgccctcagaaagcagtattttcgtagaaggctcagaaaaattgaggttctcaaagtgcttgtggaattgggttggtgtccgtatttgtctcccgaagctctacatcagtggcatgtaaagaagacatatccaatggatgaggcatttatatcttggcaacggactaatgataattttgaagagaatccctattattatagacatttatgcctgcatgagaagttagactttagtaaagaggcaggcagatatatacttggaagagctatgtatcaccttgctcagcgaagaggttttcttagcaatcgtttggatcagggcaatgatgacgaaacgggtaaggtgaaggaagccatatcctcattatcaaagagtatggcagatgcaggatgtgagtatctgggtgactacttctataagatatacaaggagaagggcaataccgaaagaatacgaacgcattatactgatcgtgaggaacactataagaaggagttttatgccatctgccaccagcagaacctttctgacgagcagatagaaaccctagaaaaagcgttgtacttccagcgtccattgaagagtcagcgacagagtgtgggtaaatgtactttcgagcccaagaaacctcgtgtgtcagattctcatcccgcttttgagatgttcaggatgctgcattttgtgaacaacattaaaataaaaggccctcatgatgtggaacttcgccccctctcacaagaggaatatgagaaggcaaagcctatgttctttaggaaaaccaagccccagttcgattttgaagatatagcaaaagccatagctggcaagggtaaatatcaatatataaaagatgcaggcgacaaggcgtataagtttaactatcgaatgacgcatggcgtaacaggttgtcctactatcgcaagcctcatgtctgtttttggcgatgattatgtctcggctatcgcagagcgatatacgttatcggctgacaaaacaccaagccaaatggtcaatgatgtttggaatgttctctatagcttcagcgacaaggaaaaggttaggcaatggggcaaggagaaacttcagttggacgatgaggaggctgaaaagttctcaaagatcaaactcacccatagctttgcgtcgctcagcttgtcggcagtcaacaaaatactcccttggctggaacaaggtcttatctattctcatgctgtgctaatggccaaggtgcccgatatagtaggagagaacgtatggaaaaatagaggtgaatccatcacgaaggaacttctttcattgattgctagtttcaatcccaaagataccaccatgcagggaacgcttgatttctgtattaaggacatcctgaaggatatgtgtgaactggtgccgggtgctgccgaaaagctataccatccctctatgatagaaacctatccagatgccaagaagaacgatcaaggcgtttatcagttgggatcaccaagaacgaatgctgtacgcaatcccatggccatgcgctcgctccatcaattaagaaaggtgattaacacattgctccgcgaaggcaccatcgacagtcagacggaagtacacattgagtatgctcgtgagttgaacgatgccaacaagcgcaaggcgatagcccaatggaacaaggaccgagagaatcagcgaaagaaatatgcagaggatattcgcaaactatataagcaagaatgcaaaaaggatatcaacccaacggatgacgatatcataaagttccaactctgggaggagcaaaaccacatttgtctttatacgggtgattccataggaatctgcgagtttatcgggcccaatcccagttatgacattgaacataccatcccacgtagtgtgggtggtgacagcacacttgagaacatgacgctatgctccagcaagttcaatcgcaaggtgaaaaaagcaaagctgcccactcaattgtcaaactatgaggaaatcatgtctaggcttgacgaatggcgcaagaagatagataagttgcgtaaagatgcggatcacgttaagacccattcgggcatggacaaggctattaaagaccgccagatacaaaaacgtcatctgctgaagttggagctcgactattgggttggaaaatacaagcgtttccaaatggaggaagttcctgaaggttttgcgcgcagacagggcgcaggcataggacttgttggtaaatatgcgggattgtatctgaaatccctgttccataaggccgacgacagaagtaagagcaatgtgcgtgtagtaaaaggagccaccacggcagaatatagaaagatgtggggcatacaagatgaatatgaaaaaaagtctcgcgacaatcatgttcaccattgcatcgatgccattactatagcctgtattgagcctggagaatataatgccacagccaggtattatcagcaattagaggaatatgaaagaacgaatgtaaacaagccttcgttccccaaaccgtggtcaacctttactgaggatataaaggctatcgctcaggagatgctggttgttcacagtacaccagacaatatgcccaagcacgcccgtaaatatgttcagacctccaatggcaagaaactggctttgggcgactctgcccgtggctcgttgcataatgacacttattatggggcaatagaacgtgatggtcagataaaatacgttattcgcaaggaattaagtagcattaaagaaactgatattgagaatatcgttgatgatgttgttaaggagaaggtaaagcaagctattgcagaaaaaggctttaagaaagcaatggaggaagacatctttatgaatgaaaaaaaaggcataaagataaagaaggtgagatgctacactccgtctgtaacaaatcccttgcacattcgcacacatagagacaaatcacaaaaggagtacaagcgtcagttccatgtgacactggatggaaactattgtatggccatctatgagggagaaataaagggtaagatgaagcgaacttacgaagtagtcaacatgatagatgccgcctcctatttcaagaagagcgcagacctcacgaagtgttatccaatagctccagaaaacaagaacgggctgaattttagatgcatagtacgtactggtacacagattattcttctgcaatcagacgatgagcagatcaatctcacaaacagggaagatgtggcccgacgtttctactttgtagctgtaatgcgtagtgatggtcgtatagttttgcgttataaccaagatgcacgtgatgccacgacattgaagaaagaacgtaaatcgggcgcgtataaagtaggcgaatcatatagatcggaaatcatgctctccttgtcagacttccatgctttggtcgagggcgttgatttcaaaatcaatgttctcggcgaaatagaaatgctataatactgaacgatgctgaagcgtacacttgtcttttctagcccaatgattctttctctgaagaatcagcaattggtgcttgcatataaggattctcctgatgaaaagcagactgtacccattgaagatgttggtgtagtcttgttagaacatcagcaaacgtccgtcaccttacccttgcttaacgctttggcagaaaatgaggtgcaggtcgttatatgcaatgacaagggaatgccaaacgcaatggttcagagcatgaatagtaataacctgcaaggcgaaacactaagaaatcagattgcctgtggtgaagttcttaagaaacaactctggaaacaagtggttgaggctaaaattcgaaaccaagcatctcttttggatagtgttggtgaaaatggaaatgtcctcaaacctttctataccaatgtaagaagtggtgacgttgataatcgtgaaggtatagctgctcgtatatattttcagcatttatttggtgatagcttcattcgcaacagagatgagcctggaatcaatgtattgctaaactatggatattccattctaagagcagctacatgcagggcaattgtctcttcaggtctgttgcctgcaataggcatttttcatcataacagaagtaatgcttatccattagctgatgatttgatggaacccttcagaccctttgttgatggtgtagtgtatgatttggcaatgcgtgggaatacagagcttactaaagatgtaaaaggagagttgatacgtgtgttgtatactgataccttatatgaaaaggtaaagcgtcctcttagtgttggtttgtcgatgactacagcaagcatggtgaagtgtttttcaaaagagcttagttcactcagtttgccagcaatgccatgatatatgagagactaaatgcatatcacattatgtggttgttcgtgatgtttgatttgcctgtcttaaccaagaaggaacgtaaggatgcggctttgtttcgcaagaacttggaaaaagatggctttgctatgcatcagtttagtgtttatataaggtactgtggttcgttagaaagtgcacaagtgcatatcaagagagttaagagttttaccccggaaaaggggcatgtgagcgttctttcaattactgataaacaatactctaacatcattcatatatggggatccgtggagaaaaaatccaggccaaccccattataaatagaatttttttagtatttttgcagagaaaagatatctatttcaaccacttcgtgtatgcaggatatatagtaaatgcctgtaagtaagcaagataactagtacacgttgtggtttgatgtagaaaagagataaaagacaatagtttttgtatagtaatgccagcagaacacgttgtggtttgatgtagaaaagagataaaagacaatgaattgatgaaactttgcaggtgccccgccgttgtggtttgatgtagaaaagagataaaagacaatggctcgcctctatcagctatgcaaaccaagttgtggtttgatgtagaaaagagataaaagacaattcattccttcgccacctggatgctctcgcagttgtggtttgatgtagaaaagagataaaagacaatcaccctcgctaaaggtagcggcagaacctgttgtggtttgatgtagaaaagagataaaagacaatatagatatgtttggattggatgatcttgcgttgtggtttgatgtagaaaagagataaaagacaatagcggtgcccgctgataggcatcatccccagttgtggtttgatgtagaaaagagataaaagacaatagtgcaatcctgtttataggcactctgcaggttgtggtttgatgtagaaaagagataaaagacaatattagccacagcaggatgttcgccagatgtgttgtggtttgatgtagaaaagagataaaagacaatcaaaatctgtcctactaatccccctatcagttgtggtttgatgtagaaaagagataaaagacaatgtgtggttagactcctgccactgaaagaggttgtggtttgatgtagaaaagagataaaagacaatcagttcgatgatagtcttctgcgagttcttgttgtggtttgatgtagcatgaatcaaggtgacaggtgtttgatttcgtgcgactcataatagccatgttgtgtgaccagctaatttgtctcaacagtgttgagagtttttcttcggcgtccttatacgtttcgttttcagatgaatcaaggtgacaggtgtttgattcatcaaataataaaaggggttttgttacgttattaggatagaaatgatatgataaaactgagtcaaaggcctgtcaccatgattctagaggtgaagaaagacgaggttatcatgcattattccgattaacatatattaatagtcactggtgatattttattaagaaaatacttatctttgcacgcacatagttaaacctaaaacaattacgacaatgaaaaagaatatttggatggcagcattggtgttgacaagcctactgtcttttttttcatgcggtggaaacagcaagagtggcaatgaaactgatacaacagggaatgcgacattagacagcctcatagaagctcgtttagaacttctgaaggaagtgaatgttgaaaacattggccagttggttgcttttgacatgaaagtttatccgatgtacgaagagccaagtaagagttctgctcaggtggaaggctatcgtggtccagtaagcatctatggccctgcacttctgtcgtttgatgaacagaaagacggatggttcaaggtgggcgatcctctcaataatgctgtggggtgggtgcgtggtgacggcatacgtccagctcaaagcgaagttgtaacagcagaacaacttcaggctttatattacaactctggctggtgggaacacgtgtttgtcggcatcaatgaagaaacaggacttgccgtaggctaccgcttacatcgtggcacagaagcgtatgaagaggttatgttaggaaaggtggtggagaatgtgttcgtgttccactatttcatgcctgtcaaatgcgaatataccagtcagtatggacctgatttcatgcgtggttccatcaactcagatggagtggcagtgatacaatttggaaaagaccgcacttttaccccaggaatgagactggcgcttacgcttcctgatttaacaaaacttcctgcttttgagttagctgctctatttgaagaacaaattggccaggtcgatgactggaacttcaattcgtatttcttcgtgaacagcgaaatgttgaatagtcgttttgcacagaaaatttaacaacaaagaggatgtgccttcaaaactggcacatcctcttttctataatttaccaccttcccttcaacgggggtcatataccagttttttggaggtagggtcggcaatgctgtgggcccagtcggtgaacttggagtaggcgtctttgatgcaggtggtctctgtaggccactgccacctaccaggaataataaggattttcgcttcatagtcttatgatttattaccaggtcgtgtccgaagtataattactggtagtgttggtacttgtgttcatcgtgggctgatcgcgtagctgcgccaccttttcggccagctcgttttgcccgtcgtcagtcgcgcgttcacctctttcagtcgtgcgttcgtttctttcagtcgctctgcctcctctatcaggttggacttctcagaatctacataacgaccctgatagcgcctgaacgatttcaccgccatccatataataaaacctataatgatgaggctcaccacctggatgataaacaacactatacgactggaaatgatgccgttgtagatgtctatcgacagcagcgaaacgtcctccataggcacatcggcaaagaatacgcccaccgtggtgccagtctggtcgtgcacgggcatcacataggtacacataataatgtgggtgccgcccttatcgacgtaaggcttcgtccacaggctcttcccgttggcaatgggcttgttgaaccattcgcggtcggtatagtcaaacgggagaagggtagaggtcaccatcggctccacagtctttttcttcttcagcgttacgtcaggctgacggtcgtacacatagggtgcatagagccgccccttgccctgctttttgtagtagtcgggacggaaggccacgccagcgccaactatatgggggttgttgagcaccagtccgttgacaatgcggtaatatttattggggtcgtcaatacttgattccacctcgtctacaatattgcgcaaagccgattctacctcgcttttaacggcagccacccgcagactctgatccatgtcgcgtgaggctttgtcaagcagttcggcttcagtgccgtagatagccagaaaatactgtgctccgcccatcacctccagcagtatggcggccacaatcaccagtatcaaagaatattttctcattgtctatttgttttcttctatttaaaattcagttattgagtcaccagatgtgtattctatcctctggggcacgatagagcttgtcgccaggcttcacatcgaagagctcgtaccaggcatcgatgttggacacaatgccgtttacacgttcacggctcagcgagtgaacgtcgttatctttttgacactctgcgtattcatcgttgtatttattgcgccaatagttggcataggccacgaagaagttgcgctgctctttcttcaggttctcaccagtaagaccttgtttcctgagatgggtggtgagcgcctggaaagccagttccacgccacccagatcggcaatattctctgccagcgtcttctcaccatcggcaaaaatgcctggtgcaatctcgatggtgttgaaataatcgaccatgagttgtgctctgcgcttgaactcaacggcatcggcatcggatgccaaaatactgttcatatcgccaagcttatcccactcggcacccttggtgtcgaagccatgggtcatctcatgaccgaatactgtcatggccgcgtatctcactgctgttgatgacttctcactatagaggggctccataaggaatgccgggaagatgttcatggaattgaaattaggcgcataaaccgagttgacctccgtaatggttgtgataaatgctgccaatgagtggaaagagccctgctgcacattcatgccgtagagtttcttgatgaggttgaagtaggtcttacgtacctccatcacgtcctcgaagaaagacttggtctgactcaggtttatcagcccctccgccagccagtcgggttccgacacgttgactgccatggcattgagcttgtcgagcacgttggccttcgatgcatcactgagccaggtattggcagcaatacgctcacggaatgcctctttcagttctgcaatgtcggcctcgccgcgttttttcatctcaggtgtgcaacagtttttggcaaagatataacatagataatatttcatgtagttctgaccaacattatctatcaccttttctgcatcaaatgttgctccatgctgggcctcaagctgcgacaaggtctcagggtcacagaggggcaggttgtcaaggatataatcttctatcgtttcttgtagctcatcgtaatccatggcctgcagttcctcgagctgttccgttggctcgatatccagatcttctacggcaagctgatagaagtcttcgagcacgacgtatgcctgctggggatcaaagcccataccctggcacaccttaaccagcatcggccatttctcctgggcaacgctgcgagtggagttggttgtcagtataggctcaatggccctgcagtcataaccaccatcatcttcgaagttgaaatcatcgtcatcatcatcgtctttgccaaaagctgaagcgacatttttttccagcgatggggcgaacaccacgcccatcacgcctttgtgcgacagcgacaacaggccgaaaggcatctggaaaccctcggcagccagttgacccatcaacgtccacagctcttcacgggtctgtgcagcacgaaccaggtccaatgcatccgaaatccgtttctgatcggcctcggtattggtgaacaattctttagaatgatttctcatggttgtggcatgttcatcggcattatcaagggcttctaatttctgctgaaactttttacttacctcttcaaggaagaaataatggtcgtcatcttcaggtatttccgcgcgtttccaccatgagccgatgctgtacatatagaaattgtcgccagggctgaccgtctcgtcaatattgtcggcataggccacgacgatttctggttgcggagtaacggggtcgtctttctcagaacaagaattaaacaaaacgatgctacaaaatgccattgcaatcatgagcatccaaagtctgcactttttcattctaaatctattaggttattagaactattcatgatttccgccgcaaatttacaactatttttttataatcagctatttcggctccaaaaaacaagaaagaaggagaaaatcaaacggatatcaacgaaccaaatcgtcgatatccgtcattgaattgtagttggatatattagaagttgtgtttatctcttgataaccttttgacctccaacgatattcaagcccttcatcaagcgggctcgatggcggccctggaggtcgaagatgggtgaggggtgataggtgatgggttctgcctactttggcgggcaggtagttggcatactcacattctcttgctgtgcgctaacagacaaggcaaatgccgtcagcatcagcgaaataagttttttcatcgatacagttaattagtcacgcttgtcagtccttacttcaacaagtgataggtaccaccagccagcggtcgcaccactcctttcatctccatttggaagagcagggcggtgagctgaccaatggggatgtttgttctcacggaaagttggttgagttggaaatcgccgaattcatcgaggattctagctattttctgttcctcatcgctcagttcagggaagatgctccgctcgataccctctgcatgtgcctgccgcaattggacatcgttctgccaacctatggcattgacaaaatcctcggcacaggtgatgagtgaggcaccattgtcacgaatcagattattgcaaccctcgctatagggtgcacccacagcaccagggaaggcgaagacaaaacgattgtaatccatggcgatgctcgtagtgattagcccgccacctttggcggcactctccacaaggatggtggcatcgctcatgccagccacgatgcggttgcgcttcacgaagttcagtttgtcggcctttgtctcagtcatatattcggtgagcaatccgccctgtgtcagcatcttcttagccgtctcacgatgagccgtagggtaaatttcgtctagaccgtgagccagcacgcccaccgtctcgtaaccattttccaatgcttgccgatgggcacagacatccacgccataggccagtccactgacaatgagcacttccggacaaagtcgtttcaggtcgctgacaaaccgacgtatcaagtcctgtccgtagggggtacagtggcgggtgccgatgatattgatgacgcgccgctggttcaagtcggccgagcccatataatataataggataggtgcatcggggcattcgctgaggcgctggggatagtcatcgctgtcgagcaatagcggcaggatatggtgcttggtgatgaactccatctcctgagcggcacgtgccagggggagtgaccagtctttcaggctcgcagccagtcggtcggtgcagtcgggtatcacgtccttgatatcgttgcgatgctcatacacgacctgtccgccccccaactctctgtagagatgcaaggcggtctggaaattgaaccccgtcatgcgggtcaaagcaatggtatagtaaacctcctgctcgttcatgccttaataaacttctggaaggctgcgtcatagtcgggactgttgcccagacgaccactgataagacacaccagttctatctttccgcggaagcagagctgctcatcactggcgcggtagatgtcctgatggaacacatacttaataccctctttcgtgaggttcagacgtgagataaactcatcgtcaggtctcaggggcaccttatattgaagttgcatacgtgccaccacggcatccacacccttagcatgcatctcggcaaacgagaggccgcactcctttaagaagagatggcgcgtgtgctcacaatagtgtacgtactgggcattgttcacaatgccttcaatgtcgcattcatagtcgcgcacttccatgcgcgtttcaaagatatagttcattgtctgggctttgaaagatattcgtaacctatcctgcagcgcaggcagtccctgcggtcgcagtattcttttttcagttgaatcagggcctgactgtcgcctgccgtctgcacctcgagtccacactccttccacaaacggatgatatggttgtcctcagccttgagctgctctaacagatcgaaggcacggtcgcacagatcctctctctgccgatgtctgcccacggcaaagagcatgggtatggcagtgttgataatcatcagatttgccgatgaaaccgatgttttcttcgtgctcttcggactctcggcaccaaagagaaagtgggtctcccagtatggcgtgacgtgcgtctgcagtaactggcgcagctgttctatcgtctcacattccagcaaggcactgagacccgccttccgctcataatagaggttggccagttgtgagatgcggatatgggggaagttctgcggccgcagacgcaagaaccgccaaggtgcaaagtccatcggctgcaaagagaacttatgcgacaagtaaagatactcgttgcgcaacttggcaaaataaccctcattgagggctgccgcctgatagcgctcgggaatgctctccacctgcagcagtccggcctgccccatgaagatggcttctatctgaaacaggtcgtcgcggtgcttatcaacagcatgaaggggtacgttcttggcccacatctcgaatgcctcgccattgatgccaaagccgtagttgcgcgccagggtgacgaaataggcatcttcccacgacccgttgcactgctccacacgcttgcggatagcctccgtcttctgttccagccgttctgtctgcaaggctgccagccacgagtgcacctgcaggcgcatcaagtcgggtatgatcttatagcagggtggatactggtcgttgtggagcagttccttataattttcccttagtgagtcgggaatctgcagcaccatctgcggcaggtagttgccatcctgcgtcatcacatccatatcagcctcgctaacgacgtggagcaccacgttattataacgcacatcgcgatcgtgagcgtgatgataccagtcgctggccctgagatgaatctccacattgcccacccatagtgtgccgcctatcctcactttcgcattgaagaagtcgggcccagcattgcggttgagcaatcccgggtccaatatctcaacgacgcgcccgtcggtggtcagcagatcaccaagcggcagcatcttatgtctccatacgtagtgaagcagtcgttccatcgtgcagacttacttgatatacacctttttcgacgaaccgtcacgatgtctctctatgcagagtccctgaggtacgtctagtttgcgtccatgcaggtcgtaataggtcgtgacatcggccacttgtacctgcttctgttccttgatagccaaagctccctggtcaatcataaagatataggtattcagactgcgagcgggcatctctaccgttacctcgttggtaggttcctcaatggtgatagctttctgctgacacaga

SEQ ID NO: 1656 - DNA, 23361 bp, synthetic construct
  misc_feature 1..23361: note = Synthetic
  source 1..23361: mol_type = other DNA
gagcggtgcagatgactatatcaccaaaccgttcaacatcgacctgctgaccttacgaatgaataatctgctgaaatggaaacgcagcggcagaaccagtcgtttggaaccgcaggtgaaagagatagagatcacctctctggatgagaagctggtgaaggatgcaacggaatatgtggagcagaacatcagtgatgatgaattgtcggtagagacactgagctccgtcctgaacatgtcgcgtgtccatctgtataagaaactgctgtcgctgaccggtaacacaccttcggagttcatccgtcttatccgtcttcgtcgtgcagagcagttgttacgccagagtcagctgaatgttgcagaggtgtcgtatgccgtgggattcaataatccccgctatttctcgaagtacttccgtgagatgtatgggatgacaccctcgcaatataaggataaatacaaggagaattaacatctcatacattgttttgaaacatacgtgactttatatgtgcgtttttttccgtatctttgcatcgttaatttgatacattaaacaaaaaactaataaaataccaataaaaagaatgagaagcgcgaaattattcgtcccagccattctgctgtctgtatccaccgcggtacaggcagcaggatttgagaagaatggaaacagtattactgttcatgtaaacgacccggctaagaatggtgccaagatggtgcgactgcaagtgatgaacgatcggattatccgtgtacaggccacctgcgaggatgcgttccccaccaagaacagtctgatgattgtgccacagagcaacaaacaagtgagttttgatgtggcagagaaccaagatgaggtgagggtgaaagcgaagggtgtgcaggcggttgtcaacaagtcgtcgggcgccatcaccttcttcgacggtaatggtaaccagttactgaaggaggcgaaggatggtaagaccttcaaacatttcacggttcccgagcgggaatacggtcttaagggcggtcctgccatcacagaagagatgaaacacggtctgcagtggcagatgaagttcgacagtcctgccgatgaggctttctacggcctcggtcagcatcagtcggaagaattgaacatgaagggtaagaacgaagacctcttccagtataataccaaggtaagcattccgtttgtcctctccaacaagaactatggtatcttgtgggattcctattccttctgccgcttcggtaatcccgatgattatcttcagttgaaccgtgccttcaagctctatgacaagaatggcaaggaaggtcatcttacgggaacctatatcgacaggatgggaaagaaactggtgcgcgatgaggattctatctattatgaatatggttatcctgctgcatcggagattgctaatcaaaccgataacggaggtatcaagaacctgccgaagggattcagtctgcagggtgccaacgtggtgtatgagggctttatcgagcctgagtgctgtgggcggtgtgaaggcaaggaacaactctatcagttcatcctctactatgcagggtatatcaaggtgtatattgatggtaaggaggtggtggcagaacgctggcgtactgcttggaaccccaacacttataagttcagtacgatgctgaagaaaggaaagaaggcgcagcttcgcattgaatggcagccggatggtggagagagctattgcggactccgtgtgtctgcccctcgctctgaggaggaacgcggacaactgagcatctggagcgagatggcccgcgatatggactactactttattgccggtaataacttcgatgacattatctctggctaccgcaccctgacaggtaaggcgccggtctatccgaaatgggtgctgggtttctggcagagcagggaacgctataagacgcaggctgaggtggaagagaccctgaaagagttccgcaaccgtcagattcctattgataatatcgtgcaggactggaactactggaaggaagatcagtggggaagtcatcagttcgaggcttcacgtttccccgaccctcaggctatgctcgacaacgtacataagatgcacggtcgtttcatgatttccgtctggcccaagttctacgtgaataccgacaattacaaggaacttaattcaaatggatggatgtacacacaagctgtgaaagatgatatacacgactgggttggccgtggctatgtgggaggattctatgatgcctatgatgctggtgcccgaaaggtgttctggcgacagatggacgagaacctctataccaagtataagcatggtattgatgcatggtggatggatgcatctgagccgaatgtgcgcgactgtactccgatgtggtaccgtaaggctttgtgcggtcctactgccctcggcacatccacggagtatttcaacgcttattccacagtgaatgccgatgctatctacaacggtcagcgctctgtcttcaagggagccaacaacgaaccgcgtgtcttcctccttacccgtagtggctttgcaggagagcagcgttactctactgccacctggagcggtgatatcggtacccgttgggaggatatgcgagctcagatgactgccggactgaactattccatgagtggaataccgttctggggaatggatcaaggtggtttctgtgtggagaaccgttatgtgactgcccagcaggagtttgacaagacgggcgtggagaacagtgatctcaaggaatggcgtgaattacagacacggtggaaccagtttggatgcttcattcctttgtaccgtgctcatggacaatggccgttgcgtgaggtgtggaacatcgctccagagaatcatccggcttatcagaccatcgtatggtacgacaaactgcgctaccgactgatgccttatctctattccatggcaggctgggcgcatttcaaggactatacactgatgcgcggactagtgatggatttcaatggggatgagaacgtgttggatattcccgaccagtggatgttcggaccggcactgatggcttgtccggtaggctattacaaggctcgtaaccgcagtgtctatttcccgaagcagtgtggctggtatgatttctatacaggcgactatatcgaaggtggacagcgactggttgtggatgctccgtatgagaagattccggtgtttgtccgcgagggtagcatcatcccgttcggaccggctatgcagtacagtgacgagaaaccggctgaactcatcaacctctatgtttatgctggagccgatgccaccttccagctctatgaagacgagggtacgaactacaactatgagaagggcaagtatgctaccattgatatccgttatgaggaggcaaccaagaccgttactttcggaaagcggatgggctctttcaacggtatgctcaagaaccgtcgtttcaacatcgtgctgatcagcaaggatgctgctaaggcacttaacctcgacaatccggagggtaaaatggtgaactacagcggtaaggaagtgcgtgttgttctgtaacaatcaacaataaataaagaaaagactcatgtcaaacatcatgaaaacagcggtcgtattatgtgcagtcatgatgggactgaccgcccaagctcgagacagacaatgcttcgataacgactggcgattccaccttggtgattcagtccagatgtcgaaagtggagtataacgattcctggtggcgcaaacttgatgtgccgcacgactgggctatagaaggtgatttctatgccggtaatcccagtggcgcaggtggcggtgccttacctggtggcatcggctggtaccgtaagcatttcagaattgaagaatcaaatcataaagttcaaagttctttgcagagcaaagcggcagagccgagcgcaaagttcaaagttcaatattatttggagttcgatggtgtatatatgaactccacggtctatgtcaacggacagaaggtgggatatcgcccttatggctacagttcgttcgagtatgatatcacaccctacttgaaggaaggggagaatgtggtggctgtacgggtggacaactccgaccagcccaattcccgttggtatagcggctgcggcatctaccgtcatgtatggctcacgaagacggatcctatccatgtaaagcactggggtgtgcatgtggagacgcaggccgatggcagggtgtttgtggaggcagacattgagaatccctcaaaggccaaactgacagtctctcataccctttatgatcctgatggaaaaatagttgcccgtggcaatggtcaaagcgcaaagctcaaagttcaaagttcaaaggtgaaacggtggtcgtgtgagaccccctatatatataaggtacgtacagaagtgaagagtgggggtaaggtggtggatacctacgagaccactacgggtttccgcgattttaagttcgatccccaaacgggtttctggctcaatggtaagaactttaagatcaatggtgtatgcgaacatcatgactttggttgtctgggtgctgccctgaacgaggatgccctacatcgtaagctctccaagctgaaggcgatgggcgtgaactccatccgttcttcacataacccgccagcaccggagctgctgaacatgtgcgacaccatgggactgatcgtgatggatgagtcgtttgatatgtggcggcgcaagaagacacagaacgactatgcccgcttcttcgaggaatggcatgaaagagacctgtctgatctggtgttacgcgaccgtaaccatccttgtatcttgatgtggagcatcggtaatgaggtgttggaacagtggtcgagcaccgataatgatgagctgaccttggaacaagccaacctcctgctcaatgcgagtcgtgatgcttccacgctggccaaggacggggagttgagtccgaactccctgttgactatccatctggcggatatcatcaggaagtacgacaagtcgcgccccatcactgctggctgtaatgaaccagccccgaacaaccatctcttcaagagcggtgtgattgatatcattggttttaactaccaccatcagtgggtgaaggatgtcaggaagaacttccccgacaagcccttcatcttcagcgagagtgtgtcggccctgcagacaagagggtattataagatgccttctgatgtggttacctgggcacccgaggaatggtacctgccatataccgatccttcgtatatgtgctcgtcgtacgacaatatgcatgcatcgtggagctccacccatgaggagacatgggatgtggtgaaacataacgacttcgtaggaggacagtatatctggacgggctgggactacattggtgagcctacgccttacggattccctgctcgctcgtcgtatttcggaatcatcgacctggcgggcttccccaaggacagttattatatgtatcagagtgagtggacggacaaaccggtactgcacttgttcccgcactggaactggctgcctggtcagaccatcgatatgtggtgctactataacaatgccgacgaggtggaactgttcatcaacggtaagagtcagggtgttcgaaggaagactggagaacaacctgaaggacggtatgatatgcaccagaccaaggcgaagctgaatagtgaataccatgtgggatggcgcgtaaccttcgaaccgggtgaggtcaaggccgtggctcgtaaaaacggaaaggtggtgaacgaacaggttatcaagaccgctggctcacctgccagcatccgtctcatccctgattatcaaggtaagaccaccacgttcgtgaatgtagaagtggtggataaagacggtaacctctgtccgctggctgaggatcagatctatttctctgttgacggcggtgcggagatcatcggtaccgataatggttgtcagacctccatggagaacttcaaggcaccccaacgaaaagccttcttcggcaaatgtatggtggtggtcaagggtaagggaacactcaaagcgcagtcgcctgtactgggcaagagtgaattaaacattgtgcattaagcattatgaattatgaaaaggtacctgatagctttatcatttatcatttgtcatttgacatttagcagtgtagctgcacagatccagaccaacgcaggtgttcagtacctgcagtgtatgccgaaagatgtgtcaacagatttcagtgatctgtcgaacacttatttcctggctgattcactcacgagcttcgatgcggcaaagggagaaggattggtgcagtggaaacgttaccgtttgtcaccacgtcaggctttcaacctgaacggctattggcctgtgcgcatgcagatgctcgactttcctgatgcagcctatgtgaatgatcctgagttgaaaatcaaaatagcgttcatcacacccaggacagtcagaatcacgatgctgacaactcctgtggaaccgaaaaacaatgatcaggatgacgtgatgttctgtgaggcatttaagaagaggtctgcttctgctccttccatcaagaggggagaagatgaggggaagattacctatagtagtgcattcggttctgttgaggtgcagaagtatccctggcgcatcatagtcaaggatgctaaggggaaggtgcttacgcagacacgccatatcatcgataacgactcttcacagatcaaactgcttcctttctcattcattaaaaggggatcggataacagtaggagcgtaaaccctgtgttcacgcttgctcccaatgagcgtatctatggctgcggcgagtcgttcacctcgcttaataaggtaggacagaaggtgcatctttctgttaccgatccgcaaggacccgaaagtgacggtcagtataagccggttccgttctatttctcgaatcggggctatggggtgttcatgcatacctcggcaccggtcacctgcgacttcggtcagagctatatcggtgcacagcgcctgtttatggctgatgagcagatcgacctcttccttttctttggtgagccgaaagagattctggatgaatataccaacgtaacaggaaagagtccgatgcttccactctggagctttggtacctggatgagtcgtattacttatttctctcaggaggaaggactggagattgccaaacagttgcgcaaccatcgtattcctgccgacgtgattcatttcgatactgggtggttcgatgtggattggcaatgcgactatgaattctcgaagaaccgtttcaagaacccggtgaagatgttgaagcagctggctgacgatggtttccatacttgtttgtggcagttgccgtatttcacgccgaagaaccgcttcttcccagagatcatcgagaaaggactccatgtggtgaatgccacgggcggtatgccagtggaagatgcgattctcgatttctccaatcccgaaacagtaacgtggtaccagtcgaagattctcggtttgttgaagcaaggcgtttctaccatcaagtgcgacttcggtgaggcggctccctacaacggcttctatcatagtggtaagggtggtttgtatgagcataacctctatccgttgcgctataacaaagcactctgggaagctgtggaacaaaaataccctggcaatggcattatctgggcacggtcggcttgggccggttcgcagcgttatgccctgcattggggtggcgatgcggcgactaccaataccggaatgttgggtgatctgcggggaggactgagtttcgggcttagcggcttctctttctggagtcatgacatgggcggttttgtcaccgccagtcctgaggatatctaccgccgttggctgcccttcggcttcctctcatcccatacaagagcccatggcgctcctcctacggaaccttggctgatctccgagagcttcactgatgctttccgcgaatgtgctgagatgaaatataaactgatgccttatgtctatgcacaggcaaaagactgctcagaacacggtctgcccatggtacgggcgcttttggtggaattccccaacgatcccggtgcatggttagtggaagatgaatatatgttcggcagtcagatgctggtggctcctttactggagagcggaaacagtcgtacctgctatctgccaaagggtaagtggattgactaccagactggtaaggtttatgaaggtggttatcaagagatcgaggcagggaagattccgtgtatcatcctggttcgcgatggctcgctgattccccatgttcctcttgcccagcgtactgacaagattgagtgggacaagattgagtggaaaacttatcaggcagatgccaagtcctgcaagggcttgctcttcaaacccggagatatccaattgcagatcgtagagaaataaggagtatctctcatctctatacacataggtgcgtatatagaatcttgcacccgatggcaatcaggatgatgcctccaaacagttcgggtttgatgcgatgcgtgagcttaccgaagcgaatgccgagcaagtttccgacgatggagaacacaaatgaggtaagaccgatgatccagaggggtagggtaagactctccagggtttggtaacctgtacacacaaatgagattcctacggccaaggcatcaatactggtggctatggccagtaggatttgtgtgcgcagcttacggggattgaagaaccgttcctcttcaggcataaacgcctcgcgaatcatcctgataccgataaaagctaataatccgaaggcaatccaatggtcgtatgcctcgatatactgctgtacgtaggtcgttcccaaccatcccaacaaaggcatcattgcctggaacaaaccgaacaggaaactgatctgcaggatcaccttccatacctgtttttgcaggatggctccgctcaccatcgataccgtgaagcagtccatagccaaggcaatggccagaagcagtaggtctaataaatccatcatggccgcgaaggtacaaaaaaaacagaaaaccgaaaaatatataattactttttttctgtcttatacggttgtaaataaaagaatgctccgctaatacgcctaaccgacttatagccagtaggttgttggcggagaaatattggaggggttgaggacggccctacttgtcttcgcaacaagccttctaactacctccaactagccttacaactacctctaatcagccttctaactacctccaaccagccttccaacttttctctttctgacacatacagacacattaaattcctccgccccgattcttctggtaatcatgtaattacacaaaatggcggagaaatatgaacaaaggtgaaaaccacaagaattagagggtgaaaccataagaataaaggggagaaactgccgttattctatctattgcctatatgcaaacgatcgtacggctataaccaaacgattacgtgcctatacccgatttgaaacgcaacgaaaaactgtgaaaacagattcagaaggaatcctcctcatttcttatctactaaatatatatagaatctttttgaatccacaatgaagatagaaaagtttttgtaagttctatgcttcatccacctcacagagtatcagtgcattgtgagcacttatcttcgcaacaactcatacaaggcaaggtggagctccaaaccagcctagttgaagggtgttataaggcttgtaggaattagaccatgtttacatgctataaaaaaactcccaccgaagtgggagcataggttttatccttcggcatatagccttattgtgataagatgtagaatatcttatgatgcaaaagtaatcaaaaacatcggaaccacaaaatataattaataaaaacttgtttccatcgtattaattttgtaattttgactccagaattactaaaaatccaaatttatgaagaaaagaatattaggtatagatacaggaacaaatagtcttggttgggctgttgttgataagaacgacaatggaacctattcattgatcagaaaaggtagccttattttccaagaaggagttaaagtggaaaagggggtcgaatcgtcaaaggcagctgataggactgcacatcgcgcgcttagaaaacagtatttccgtagaagactaagaaaaattgaagtactcaaagtgcttgttgagtttgattggtgcccatacctgtctccagaagaactacatctatggcatacaaagaaggcttatcctatggatgaagcatttatttcatggcaacgaaccaatgataattttgaagagaatccgtattactataggcatttatgtttgcataagcagttagacctcagtaataaggcggatagatatatgctgggcagggctatgtaccatctggctcagagaagaggttttgtcagtaatcgtcttgagcaaggggatgatgatgaaacaggtaaagtacgggatgccatatcatcattaacaaaaagcatgtcagaagcaggatgcgattatcttggtgattatttctataagatatacaaagagaaagggaatacagagagaatacgaacacactataccgatcgcgaagaacactacaagaaggagttttatgccatctgcaagcaacagaacctttccgaggaacaaatctcagtattagagaaagccttgtatttccaacgtccgttgaagagtcaacggcatagtgttggtaaatgtacatttgaaccgaagaagccccgcgtggctgattctcatcctgcatttgaactgttcaggatgttgtcatttgtgaataacatcaagataaaaggtccatatgatgtagaactgcgtcctctttctgtggaagagtttgagaaggcaagaccgatgttctatagaaagagtaaaacccagttcgattttgaagacatagcaaaagcgattgctggcaaaggaaaataccagtatatcaaagaagagagcgcaaaggaatataagttcaactacagaatgacgcagagtgttacaggttgtcctacgattgccaatctcatgtcagtattcggagatgactattcgacagctatagctgaacgttatacattatcagatgggaaaaccccagaacagatggtcaacgatgtttggaatgtactatatagctttagcgacaagaacaaagtgaagcaatggggaaaggagaaactacaattaagtgatgaagaagcagagaaattttcaaaaataaagctcacacacagtttcgcatcgctcagcttatcggcagttaataagatcctcccttggttggaacaaggacttatctactctcatgcagtcttaatggcaaaagtgccagatttagttgggaaagaagtgtgggaaaaacgaggggaattaataacgaaagagttattatcctttattgcgaattttaatcctaaagatgatacgatgcagggtacattggatttctgcattaaggacattctgaaggatttgtgtgatttggagtcaggtgcaacagaaaaactgtatcatccctcgatgatagaagcataccctgatgctaaaaagaatgcgcagggcgtttaccagttaggctcccccaaaaccaatgctgtgcgtaatcctatggcgatgcgctcgcttcaccagttgagaaaggtaataaacactttgcttcgtgatggtacgatcgatagtcaaacagaggtccacattgaatatgcacgagagttgaatgatgccaacaaacgtaaagcaattgctcaatggaacaaaaacagagagacacagcgaaagaagtatgttgatgacatacgtacattatacaaacaagaatgtggaaaggagatagaacctacagacgatgatattgttaagttccagttatgggaagaacaaaaccacatttgtttttatacgggtgaatctattggtatcactgagtttgttggtccaaacccaagttatgatatcgagcataccgttcctcgcagtgtcggaggcgatagcactcttgagaatatgacgctatgttccagtaagttcaatcgtgaggtaaagaaagctaagttgcccacccagttgaccaatcatgatgacatcatgcagaggcttgaggaatggcgcgagaagatagagaaacttcgcaaggatgtggatcatgtaaaaactcattcagggatggataaggcagtaaaagatcgccttatacaaaagcgccatctgctaaagttagaacttgagtattggataggtaagtacaaacgttttcagatggaagaggttccggaaggttttgctcgccggcaaggaactggtattggtcttgttggcaaatatgcaggattatacttgaaatctttattccataaggctgatgataggactaagagcaatgtgcgcgttggaaaaggagctaccacagcagaatatagaaaaatgtgggggatacaagatgaatatgaaaagaagtctcgtgacaatcatgtccatcattgcattgatgccataaccattgcttgtatagaacctggagagtataatgccaccgcaagatactatcagcagctggaggaatatgagagaactaaggcaaacaagccaactttccccaaaccttggcctactttcacagaggatataaaggctattgcacaggaaatgcttgttgttcacagtactccagacaatatgcctaagcgagctcgcaaatatgtacaaacatccaaaggcaagaaacttgccatgggagactctgcacgtggatcactgcataacgacacatattatggagccatagagcgcgatggtgagataaagtatgtagttcgcaaagagcttagcagtctcaaggaaagtgatgtagaaaacatagtagatgaagcggtaaaagagaaaataaagcaggctattgcagataaaggattcaaggaagcgatggtaggtgacatttttatgaacgaagaaaagggcatcaagataaagaaagtaagatgcttcacaccaaccgtcaccaaccccttacacattcgtacacaaagagacttgtcaaagaaggagtacaaacgccagttccatgttactttggacggtaactattgtatggcaatctatgagggtgaagtgaaggggaaaatgaagcggacttatgaaatagtaaacatgattgatgctgcggcctatttcaaaaagagtgcagatctgactaaactttaccccattgcacctgaaagtaaaaatggactaaagtttagatgcaccgtacaaacaggcacacagataatccttttgcaatccgatgacgaagagataaaccttgcagacaaaaaagatttatcaaggcgtttctattatgtggctgtaatgcgtagcgatggccgtatagtattgcgttataatcaagatgcacgagatgctacaacactgaagaaagaacgaaaatcgggtgcatacaaagtaggtgagcaatacagatcagagataatgctatcgctatcagattttcatgctttggtcgagggcgtagatttcaaaatcaatgtgttaggtgagattgttatgctaaaataataatgtaatgctgaaacgtacacttgtcttttctaacccaatgattctttcgctgaagaatcagcaactggtgttggcttacaaggattctccagatgaaaaactaacagtgccgattgaggacgttggcgttgtgttgttggagaatcaacagactaacataactctacctttgctaaatgctttggtggagaatgaagtacaggtcgtcatatgcaatagcaaaggtatgccaactgcaatgattcaaagtatgaacagtaacaacctacaaggtgaaactctaagaaatcagatagcttgtggtgaagtcctgaaaaagcaattatggaagcaggtggttgaagctaaaattaagaatcaagcatctttgctggatagtgttggtgaaaatggaaatgtcctcaagccattctatgcaaatgtaagaagtggtgacgttgataatagggaagggatagcggctcgaatctattttcagcatctatttggcgatagttttgttcgcgatagagatgcaccaggcatcaatgccttgctaaactatggatattctattctaagagctgcgacatgtcgggcaatcgtatcatcaggattgcaacctgcaataggtatataccatcacaatagaagtaatgcttacccattggcagatgatttgatggagccttttagaccttttgtagatggaatcgtgtacgatttagcgatgagtggagaaatggaactcacaaaagaggtcaaaggagaattgattagtgtattgtatgtagatacaatgtatgaaaagataaaacgtcctcttagtgttggtttatcaatgacaacagcaagtatggcaaaatgcctatctaaggagttaaacacaataagtatgcctgcattgccatgaaatttgagagactaaattcatatcacgttatgtggctgtttgtgatgtttgatttgcctgttatttccaagaaagaacgaaaggatgcctccctttttcgtaaaaacctggagaaagacggttttaccatgcatcagtttagtgtatatataagatactgtggttccctagaaagcgcccaggtgcatattaaaagagtgaaaagttttactccagaaaagggacacgtgagcgttctttcaatcactgataaacaatactcgaacattattcatatttggggagcgatagagaaaaaaacaaagcctgccccattacaattagaatttttttagtatttttgcagggtataagccttgtcctaaccacttcgtgtatgtaaaaaggtatcgtaagtgctgtaaatgaaaggaatacaaagtatatgttgtggtttgatgtagaagaaggataaaagacaattgatgacggagaagaaggtgagcctcccgagttgtggtttgatgtagaagaaggataaaagacaatatcaacttactggaagaacgcaagcagcgagttgtggtttgatgtagaagaaggataaaagacaatgaagcagcctacggtttcgactggattcagttgtggtttgatgtagaagaaggataaaagacaatgaattaagccgtgatattcgttcatgtaagttgtggtttgatgtagaagaaggataaaagacaataattcatcggcaacgccgtggaagtgaacagttgtggtttgatgtagaagaaggataaaagacaataatctctctcttgcggataggggctttcgagttgtggtttgatgtagaagaaggataaaagacaatttgatgaataagctaagtcagtttgctaagttgtggtttgatgtagaagaaggataaaagacaatacgtcctctgcatcttctcgagttcataggttgtggtttgatgtagaagaaggataaaagacaatgcgaagatccacatcatcatacccaatgcggttgtggtttgatgtagaagaaggataaaagacaatgtggacaatatcctgctggccagtcaggagttgtggtttgatgtagaagaaggataaaagacaataatgatgtcgaagatgtcagacagcggctggttgtggtttgatgtagaagaaggataaaagacaatccgtttttcttggaccaaagtaagtaaaatgttgtggtttgatgtagaagaaggataaaagacaatagtgctcacgggtgctcttgaggacagtacgttgtggtttgatgtagaagaaggataaaagacaattttcagtaaagttacttgtgcatcgttcaagttgtggtttgatgtagaagaaggataaaagacaatgaaacgttcaatacatcgagtatagaaaacgttgtggtttgatgtagaagaaggataaaagacaataccttgacggtcttctcgacatgtacatcagttgtggtttgatgtagaagaaggataaaagacaatatcctgaccgataaggtttgcgaggtatgcgttgtggtttgatgtagaagaaggataaaagacaataagaatacgagataaattacaataatgctcgttgtggtttgatgtagaagaaggataaaagacaatcagccacgcaatgtcacccgcacccttctggttgtggtttgatgtagaagaaggataaaagacaatgtcgggtatcttcacccggatgcgcttgccgttgtggtttgatgtagaagaaggataaaagacaatagcattgtgcgatcttgaatccggaagaagttgtggtttgatgtagaagaaggataaaagacaatcaactgagctacaagcgcatcattgtcgggttgtggtttgatgtagaagaagggcgtgacatgtcccttgttacgcccttctttctatataattctattgtttttaaatagttctccctttttttcaggttaacgtgatctatggcacttttcagtgcaaaatatggcactctctggcactaacgatggcagtttgtgtgttttgtcaaaaagtacagtatgtggtgcaaaatctgcacctcaaacacaagaggcgggaatcgatatccaccttacgcctttacacaagcaggcgtagcaatgctcagcggcttgggcgcaagtgtgaaggacatgggggtaggaatgtgtgctgtaacgaagatgcagacgccacctaatattattctacagttgttaaaatgaacgaatttgtagtgtctctccgaggattgccatttcgattggtacaattacgccattcaaatccttgattcctggaatccttagaataggcgttgggttttgatttagtcatgcagatttcgctgattatactgatatataaaggctatgaattctttcgtttttttcgttctagagcaatgagttttgggaaccttttccaaaatctatggttttagactccaatacctatggtattaggctccaaaagcataggttttagaaggcaaaaccgcaggtattagagaaggttctctaagttattgattttcttgtgcttacagatcgctgcaagcgatccaagaaaaacgaacacggataacgcggattcaacggataattatatattgagcagaataaatgttgcgatattctcatcgaatcatttggctgtatcatattattgtagtacctttgcattgaaataatgaattgtttaacgttaagtctatatatgacaaacgatatagcatcagaattagcgaaattacatgaactgacaggagcagagttctcccgacaggtagagcatattgccaaaagaaaggagtttcgttcattagagaccgataaggatatctttacaataggcggggaacaaagcgatgactacgaaaacttattgttagctgcccgtaaagctgtagagtttggttatcaagtgtttcttcttcctaatcctcaaagaacacgtaccccagattttatactcacaaagaaaggtgtatatcgcacttatgatttgaaaacaatatttgggaaagcctctgtagaagaaaggctgttagaatcaattggacagtgtaattgtatacttatcaacataacaacagagtataatacccgccggttagcttatgcaataaagaggtactttgaaacaaataacaaggctattgaggttcttattttcaaagggcataaacgaatcccaattaaccgctcattagccaccaatcatgattttttccatctatttaagaaagcctatgaacaatgatgggctcataaaacaaaaaccaccccgttagggatggcttttatttaaatggagtagtgtcggtgatgtcttgctccaagggcggtgtcatatatgtcttgcccttcgcgggattctgcccggatagccaatcacatggattgacgttgcaaagatatgtatttattttgtaattaccaaatatatcgaaaaaaaatgatgtaatattaatcgtccatatccttatccaactgtccttcccacaggtagtgcttggtctcctttaccagtacaccactgaggaagaggagggagaggaggttcgggatggccatgagcgcattcatacagtcggccaggttccatacgatggtcaggttcatcacggctccaataaagatggcgatgatatacaggatgcggtagatattcttagcctggaacttcgattccggcgattgcttcccgaggtttcctaagtattccacagcacgttccccatagagctcccatccgaggatggtggagaaggcgaaggtgagcagaccgaaggtgagcaagggtgctccgatataaggaatcttactgaaggccaccttggtgagggtggctccattctcgtaggagatatcaggataggcgatgatactgctcacaatgaccaatcctgtaagggcgcatatcaccacggtgtcccaaaaggttccgctggaagatactaatgcttggcgcacaggattgcgtgtttgggctgcagaagccacgatgggcgcactacccatacccgactcgttcgagaagagtcctcgggcaataccatagcgggctgccatcatcactgttcctcccacgaaaccaccacctgcagcctgtggagagaaggcagcctcacagatcagcttcagtgccggccacacatacgcgccattcatgaagaggatgacgatgcagccgatgacatagaagaaagccataaaaggaacgagcatcatacaaacccttgcgatgcttttgataccgccgagaactacagcacctgtcagcagcatgatcacaattcccgtgatatagggcgaaatgctataggtctcgaaggtcagggtagcaatggcgttggcctgtacggtgttaccaatgccgaaggaggcgatggcggtgaacacggcaaagagaatggccatgcccttccagcccagacctttttccaaggcatacatcggaccgcctaacatccttccgtcggtagtcttctcgcggtattttacggctaatagtccttcggcatatttcgtggaaataccgaacaaaccagtaagccagcaccacagtacggcaccaggaccgcctaaggcaacggccgtagccacacccacgatgtttcctgtaccgatggtggcagccaaggcagtagccaaggcaccgaactgcgatacatcacctttcgatcccttgtccttccgaacactcagcttaatggccgtccacagataacgttgcgggaatttcaatcggatggtcaggaacacatgcgttcccaacaacaatatgatcatcggccagccccagaggaaaccgctaatatctatcaaaatctggttaatcctttccatcactattcactattacttttacttgatcaaagcccattgagcgcatgagctggtagaactggcgggtggcgttctgttcggcactggcaatattctctttggtcatgcagcgatccttcatgcgctggtatgcacgtttgtacatcagctcacggtcaccatcggtccacttgcccgactcaaagaacgacttggtgcgtgcctcgtcaatgaaccgttcatcaaggagcttgatgggcggtaaggtcaccacgatactgtccttctcctttttgatccagtcggctgccacctcattcatgtcgattcccagtcgcagggtaccataatagatgcggatgagctgatcgtcggtgaagaatccgttgcgcgtagtatcaatcatctcctcgtcggcaatcgagaggaactcccattgtccgatatccttcatcgatttcacctgagtaggtgtaatcccgatacgttggtcgatctcaatagaagcagaggcatcggttactctatataaggtgtagtagccaatccccacgatgagaaggatgatggccaggatggcgatgatggtccacttactggctttccccagcatctcgaacaacgacgtaagcacattctctatccctttggtaatctcctcttgtgtaggatcagcgttttgctgtgcctgctttttcttcgtggtctttgtagtcttcttagacaccgaagaagtctttttgggagtagcttccttcttggtcatcgtgcaatggatttagcgtcaaacaatgtggggaggtccttcaccgagaactgctttcggaaggacacggtgatattctcttcggggtagcccatggccacaatcatcggaatgatgatattggcggcactggcctgtgcctgcgggatgatgttcatccggggaatatcgttgatgatggcagcacgtccttggttttcatagttggccatctcagcatccgagaagttggcacggaggatagacacctgtttcttgatctccgcatgattgatcttactgctggtcagctccaccttcggatcgggcagtaggatttcaatcttgtcaccatgacgtttgatgttcttctctgagaagttactgaaatccaccgatgccttcagtgtcgcgtctataggaatggcaatcttccgctgtcctacgggcaggatgatgttgaactccttctgcaggaacgaacccttcagcttcatctgatcgtcgtgagtcacgatcttgtgtacatgaacctcggctgtatgcagcttcgcacatttctgtatctgcatcaccatcatgggtatggtgtcgatgggtgctggttcctgagccgttggtttgttgtcggtgcaggatgcaatgaggaacatcgtgagcacggcaatcagtattgtttgtttcatgatgatttatatttttactgcaaagatagtaatttttcgccattcatcacaattttctttcaaaatgttagttaatataagaaatatgatatacatgaagatgaaacgtggtttgggaatagcagctgccttgatagcagcatgtttggtgttatcatgcagcgagaagaaacaatcgaatgtgatcattgccccgaaacctgtgaagcaggctccgaaggcaccggccaagatggatgagttcaagcatacggatgatgtgccttggctggacaagacctacaaggtggaggtacaccgctttgtggccgacagtctgccgaaggtgaaggatgagcagggtaatccctatttcgataacctgatccgtgtccgtgtgttgcgagccgacggatcggagttcttcaatcgtgtattttccaagaagagtttcaatgattacctcgacgagaacaccaggaagacaggtgctttgttgggcatcgtgttcgatcatgccgaaggcgacaacctctatctgggagccagcgtgggctcacccgaccgtctgagcgacgagtatatccccctcatccttaccatcagtcgtatgggcgatgtaggtatcaagcgggatacgaagattgatacggaagtgcctgaggaagaagaggaaggcgtttaagttacgctcttttcaaagccctttgattctcctcaaaacttttgggacacttgctgatgaagatggcattgatgatgatattggccgccatctcctcgtcggtgagatcgacatactggtcgcgtttcacttccttccctaacagtacatcccacgaggtgttgaagttcgaatccttcgcaccgaaatagttatctttcgagaacggatcctcgataatcatataccgcaccgtttgcttgctactggtggccctcatcgtggtgagcaagtcgaacgcttccttgaactcacgcttatgccgcttggcgttagggtacataatggcgatggtagggaagaggtcgtcgaactcaaaggtctgcaataattcttttactttcatatcttattcttctcagcgttttttctctacgaattagacaaattagacgaattatcatctctcatctattaccagttccaccggacaatggtcgctgccgtagatttccgtatggatcttcgcatcctgcatcttgtcggctatgcggttggagactacgaagtagtcgatgcgccacccggcgttcttctctcttgctttgaagcggtagctccaccatgagtagatattctccatgtcggggtagaaaaagcggaacgaatcggtgaagccattgctaagcaagacagtgaacttcgcccgttcctcatcagtgaatcccgcattcttccggtttgtcttgggattcttcaggtcgatctcctggtgagccacattcaggtcgccgcagaatatcacgggtttcttcgcatccaatcccttgatataagccaggaaatcatcctcccactgcatgcggtagtcgagacgcttcagtccgtcttgcgagttcggcgtatagaccgtaacgagatagaaatcctccatctccagggtaatcacccttccttcatggtcgtgctcgtcaataccgatgccatagctcacgttcagcggttggtgcttggtgaagatcgccgtaccgctatagcctttcttctcggcatagttccagtacgatgtataaccctcgaactgcaagtccaactgtcctgcctgcatcttcgtttcttgcagacagaagaaatcagcatccaatgtcttgaatgcttcactgaagtatccctttccttcacaggctctcagcccgtttacgttccaactgatgagtttcatggcacaaagttacgaaaaaacgagagcaatgcaaaagaaaagcttgtttttcttttcattgccgagtgcattgtaagttcgcgaattcattcgcaaagatactgtttatcttggccatcaaagtaggtgttttggttaaactacgttaaatcaccaccttgtaaagcaagtttttcactctttatcaattgaacgggtagagaactgaaataagtttcaaatattcccaacgtgggaataaagtgttcccacgttgggaacaacttgttttatggcagtaatcttacacctcgccccccttgccaggaccccgcccctaagaggggtggggagccgagagagcaatgccaggaacgccctaagctggggtggggagccgagagagcgatcgatactttgggggggtacgtgggcgtacccccgaactcccctcccatctcaggggaggggtgagcgaagctggggtggggagataaattttgcgatttttccaaagacctaacagtttcacggaaaaatcccctgtacaaaggtgtttcacgatttctagacctaacataagacctaacaaaaaggtaacataagtgtcttacgctggaaaaagttgacacaaagtcaacaaagaatgaaaaagaaacgtaagtatttaagcaacgaagaaaaagaagaaattttgcgtttgc

SEQ ID NO: 1657 - DNA, 20456 bp, synthetic construct
  misc_feature 1..20456: note = Synthetic
  source 1..20456: mol_type = other DNA
atgcccttaatctgataaatctgaatataatttgaacatgaatgaatatataatccgttaaatcagctaaatctgtggtttaagatactcccgaaacataaattaaataaagaagaatacagcaagtcttcctgaacttcgcaccacttcttccctatttgttcactaaaacttcctgttcgtcgcaccatatcttccgaatgtccgcaccataaccaatctatctatcaagaatacaacaactttcaattagctataatacatatactaagatacagtgataaacgatattctataaaacatcgtctttattataatattgtattcttatattaattatgtctctccataaacacttataaatcagttcccttatagttatgaggtgcgaacttttggaacatacggtgcggaagtatggaacttctaatgttgagttaatgaacatttggtgcggacttttggtacattaccttctcgtgcggactccgtgaacactttccttctcttctttcttgcatatcccaattatcattccacccttttgtgtttgccctacatacttaaatacttcgatatttcaatacttacccttttcggtattcaaatatctaagcatccctatatcctcgtatatgggtgttcaggtctctgtgtagttctgtatttgagtgttagtatatctaaatcttcgtgtacctaaacatttatgtatctccttgtatctatatatctaagtatctatagatatttaagtatgtgtaattacattaccttaattcaagcgattaaagcttacgaaaatgtacgtagttgtatatcgacaattacaaaagtatgcaaatatgtgaagatatttgggtattttcttgtatctttcgctgaaacttcttacctttgcatggcaattgaaacgttaaggattaaacaacatgtcacaagttatttctcttttacatgataaaggtgggtgtgcgaagaccactacctgcgtgaatttagggtttgctctatggctgctcggtaagaaggttttgcttattgacaccgaccctcaatgcaacctgacagatactgttgataaaaccgtccatctggaagcggaaagtacaatctatgagtggcttcatgatccacagccaggagagactttgccacttcctatttatactcgttacgatggtctcgactacgtgcctggcagccatagcatgagtaatatcaatgctgagttgcaattgatgtacaatcgtgagcgtcgtttggctgactttcttgacttgattgaccctgagactggcgcaaagatacgtgattcttacgattacgtattcatagactgtgcccctggaggtgagacgttgatgaatactaacgctctggtagccagcgattacgttattgttcctacagaagcaggcatttatagtctgcaaggtctgccgcgtcttcttgattatattaataaggtaagaactcaacttcgttgtcctgtcagcatcatgggctatctgctagttcgttggaataacaacagaaatctcagccgcgaagtgaaggagtattacagtaatatagaagaagttaaggctcccctctttcctattagcgttcgcgaaagcgttagatgtaccgagtcggtggcaaacgagatgtctttgtttgagtatgccagcaacagtcccgttgccgatgactacatgcgggttgctgaatacatgataggacgcaaggcccgtcctaaatcttggacgccagctcgttggggacagatagcgaatgcagcctacgagaacttcatcaaggaacggagtatgtagatatttgaatactcagataccgaagcatctggatatagaaacagttatatactttgatatttggactttccctgtcagcatcatttaactttcaggtgaccgattattaaccttttagccctttcaactatttatttcaaagcactatggcaataaagaagaaatcattgaatatcagtcgtgtggccgaggaagccacgcggaattttgtggctccgaagcctcttgcaaccaacgaagctgtgcgcactcagatagtacaagagactcccgcccccaaacccttacgtcgtgtctgtaccatacagaaggtgggtgggttcagcttctttacgacggaggatgaccgaaacgccctcgactacatcgccttccgacagaagttggagaagcagaacatcgtacgtgctgcgctccatcagttcctcaagcagcactacaaagagggtcaaggccttgatgccgaatcgatgcgcatcattgagcagtacgaagatactgtctatcagtgggtttgaattccagagttgggtaggcaaatgcttcagacgacatgaagagacctttcagtcaagcccctttgaactccagaatagggtagggtagaggagaaggttcaaaaatgttgtcgtaaaacttcgcttctgtttaaaacgtatttcgttaggctgaaagccccgaagtgttgtgcacctgaagcctaagtactgcctgatagaagatgctatttactagtaagtagaggcctcaatctaaatctataactagccacacctaaatgatgaattagccacgtctaattggtcaattaggtgtggctagtttgttatttagacaggctgagtcgtatgccgatatacttgaagtctgtcagttaaccgtgagtcacaattgttataagtgcggaatgaccatctgtaacctctttctatatgattattggtgcgaagattgtcatgatttcttccaaaccgcgcgtttgctcgttcagtaggtgggctattttcgaaccgttttccaatttagaaaaggctgtttttgtcgttttcggacgattgagctaaacaaatgttcccaaacttcgcactttgagatcaaaaagggcttcttgaggtgcggacttcgggaaagttttgcgtttagcagggagaaggtgatggattaacacgtcaaaaagctaaataatcttcccgaagtccgcaccaagagccttttatatcgcttactacgcttagaaatgttcccaaactccgcacttaatggtggaaaagttcccgaagtccgcacttcttgtacgataggtgttcccgaacttcgcacctaatccttataaaaagagagcttgcgctaggtgtctaagtagcttatgcgaggagaggtgcggactttgggaagacatggaaagaaaaagggtcctttgccaaatgctaacaagaagaatgttcccgaagtccgcacaagtgtgactcgcgcgtacatattttatattgtgtagttgcttgagctagggcagtaaggtttgactggagttaaaagggtgctttgctatcggcgttcagaggactgccagcgagtttccgtctgaatggctgtacgatgacgccggggtactgccttaccgacaaacgcgggggatgaggtctctatgttctgtccgagggcttcgcctccggttcttcccttcggtcaggcggcaaagccggagtccatcaaagtaagaccttccaggcttaggatgaaagctgactttactctgtagcaaagcagtcagcacgattttaccggacaccaataaatccctatattctttacggtcggattcttgcggtcctgtatataggtgatcagacgtcaaagcccgaagtcaaatccgactggacaggatgccaaatctgaccgaatagggaaggagtgtctaaagacctatgcctcgttgagcaaagtcccgtgcctcgttgggcaaagacttgagctgcgttgagcaaagacctgagctgcgctgggtaaagacctgtgcatcgttgccccaaaacctaagctacgttgagcaaatacccgtgcctcttagcccaaacacctgtgcctctttgtgcccccttgttaccatcgggatagaagacggctatttcgatgagaggctgtcctgagcctatgccttgtacaagacaggcgccaaagaggtgcgaactttgggaagattgagcatctaaggtgggtggttgtggcctgtggatgggatgaagacgcctttcttccgccattttgaatcacagaagtttgtttatttgaattttatctcatatctttgcagtcggatacgtgtaaaacgtggaaagaacaatcgcaaatgaaggaggatagaaagctatgaagtcattaagagaactataccgtataggcattggtccttcaagcagtcatacgatgggaccagctgccgcagccgctcagtaccttgaacgccatcccgaggccacggccttcgacgtcaccctctacggctcccttgcagctacaggcaagggtcacatgaccgacttcgccatcctccgtgtcctcgagccccaaggtcaggtcaccatccattgggagcccacggtcttcctgcccttccatcccaacgggatgaagtttggcgtacgccagccggacggttcgctcttcgacgaatggaccgtctatagcgttggtggcggcgctctttccgaaggcgacgaacaggagacgacggcccccgacgaagactccctctatcccctcaccacgatgaagaccatcatgtcgtggtgccaggagaccggccacacgttctgggaatacgtcgagcaatgtgaaggaccggagatctgggactacctgcgcgaagtgtggcgcgtcatgcaggaagccgtagagcgcggcatcgaccacgaaggcatcctccccggaccactcggcctgcagcgcaaggctcccatctacttcaccaaggccaagggctacaaagccaaccttcagagttccggcctcgtctatgcctatgccctcgccgtcagcgaagagaatgcctccggcggactcatcgtcacggcccccacctgtggctcctgcggcgtactgcccgccgtgctctaccatttggggcacaaccacaccttctccgaagagcgcatcctccacgccatcgccaccgccggactcatcggcaatctcgtcaagcagaacgccagtatctccggagccgatgtcggctgtcagggtgaagtcggcgtagccagcgccatggcctccgcagcagcctgtcagctctttggcggcagcgtggcacagatagagtatgcggcagagatggggctggagcatcacctcggcatgacgtgcgaccctgtttgcggcctcgtgcagataccctgcatcgagcgcaacgcctttgcagccgcccgagcactcgatgccaacttctatgcctccctttccgacggccagcaccgcgtcagcttcgaccgcgtcgtccgcgttatgaagcagaccggcaaggaccttccctccctctacaaggaaacctccgaaggcggtcttgccaagctcagcgaagagtagggagtgatgcttcgcaagtgaagagtgcttcgcaagtgaagagtgaaaagtgaaaagtgaaaaatcaaagtaaccttattccatccgtgtaatccgttttaatctgttgtcgtaataaaaggtgaaaaggtaaagaattgaaaaggtgaaaagttaaatgcttcgcaagtgaagagtgaaaaatcaaagtaaccttattccatccgtgtaatccgttttaatttgttgttttataagtccccaggcatttctgcaataagcattcctgtttctcatagacataaaaacagtaggttgtaaggcaaaatactacaacctttgtataaaagccccagaaaatcttttggggcttatgattattttatatcttagcagccagaagtattctttttagaagaaaaagaaatgaaaaacccccgctcaatctcatatttcgtcttcgacgtttggctcatacagcaattgcagttcgctccatcgggactgacacttgaagaactgaaaaagctctggatagaacgtcccgaacatcggggcaatctctcccgcgacatgctcaccacccaccgaaaaggcatcaaggacttcctcggactgagaatagaagcccccgacaggatgcactactgcatcatgaacccagaagtgctcaagctcgactcccttgcaaacgacctactgaagagcatccagaacttcgtgttcctgcaagagtacaaagatttgggcgacctcatacagcccgagcagatagagacaggcgcgtgcttcctgcagatgataggtcaggcgctacgggacaagcggaagctgagcatcacctatcagaaattcatagacgaagccccctaccacgccatcgtgcatccctacctattgaaagccgacaagggccgctggtacatcttcgcccacaaagaggggagcgagcatcaggagtacgtacaatgttttgccctggatcggaccaagcgcctcgaagtgatacccgacaccttcgtccccaatccggaggtcgatatggtcgaatacttccgcgactgctatggcgtatggcacgactacgaaatctatcccgtccgcgacatcactatcagctgtactgagaaggtggctcactatctgcgcacccttcccctgcaccacagccagagggaggatgcctaccgcgaaggccccgacgcccgcatcatcttccactaccacatctctccttcccccgacttcatcggcgacctgaagaaatggggcgacgggataaggataaaagaagggaaataaaaaagcccctccagaagagaggcagtaggaattcatccttcggcatatagccttattgtgatttgatgatgatgaattatctgaacgcaaaggtaagacaattatttgaaacgacaaaataaaacgaagaaaaaatgaacgagaaacgtattttaggtcttgacacaggcacaaatagcttgggttgggcagttgttgaccaagacgaaagcggtcaatataccttgattgacaaaggagttgtcatctttcaggaaggcgtaaagattgagaaaggagtggagtcgagcaaggcttctgaaagaacagagcatagagcacttcgcaggcagtacttccgtcggcgcttgcgcaagataaaggttctggaaactttgttgaaatttaatctttgtcccgcccttacgaaagaagacttgagcctttggaagttgcgtaagatatatccgaagaaggatgaatttatggtatggcagcgcaccaatgacaatgaagatgtcaatccttaccattgccgttatatctgcctaaacgaagtgctgaacctcgacaggcagcaggacagatacaccttggggcgtgcattctatcacatggctcaacgcagaggcttcttaagcaaccgattagacgcaacagaagaagaggagaatggtgcagtgaagagtgacatcgctaatcttaacaaggagatagaagagagtggctgcaaatacctgggcgagtacttctataaattatataaggaaaaagggaacaccgtccgcatccgcacacgttataccgaccgtgagcaacactacaagaaggagttctttgccatttgcgagaagcagcacctgcccgaagagatgattgcagagttgacacgggcattgttcttccaacgtccactaaagagccaacgtcagaacgtgggtaattgtacattcgaaaaaggcaagccacgatgcagcgattcgcatccaatgtatgaggagttccgaatgctctcgttcctgaataatatacagatacaaggaccttgggatgaagtctatcgtccactaaatgaggaagagcgtcagagggttgattcgctattctacaggaagagtaagcccaacttcgacttcgaggagatagccaagaagattgcaggaaaaggtaaataccagtggaagggcgatacgcagacagacttgccctataagtttaattaccgtatgtcacaaggtgttcccggatgccccaccattgcacaaatgaaagaagtctttggtgaaaattggaaagaaagtatagccgaaacctatatgcttggcacaaagaaggatggcacgcagaagggcattggtgaaatggtgaacgacgtatggaatgtgctcttctctttcgacagcaaagacaaggtcagggagttcggtgccaaccatctacagttggatgaggaacatgccgagaagttctcgaagatacgcctgagccgcaactatgcttcattgtccttgaaagcaatacggaacatcttgcccttcctgcggatgggtatgatttattccgatgcagttttctttgccaaagttcctgccatcatcggacgtaaccaatgggaggcgcggcaaagcgagataatggaagacctcgcttatactatacaaatggcgataaaagagaaacgtcacatagatgaagctgtaaaagactatctgcaagacaacttcgacttgaagccaggagcggcagaaatgctctaccatccttcgatgatagaaacctaccccgacgccaagccgaacaaagatggcgtcgtcctgcttggcagccctcgcacgaatgccgtgaagaatccaatggcaatgcgctctctgcacgaagtgcgcaaagtcattaacaaccttatcaaagaaggcaagataggtccagatacagaagtgcacatcgaatatgcccgagccttgaacaatgctaacatgcgtgcagccatcaacgaactgcaacgggagcaggacaagaagcacaagcaatatgccgaggagatacgtcagctctacaaagatgagacaggtaaagacatcgagcctacagaaaccgacattctgaagtatcagttgtgggaagagcaaggtcatatctgtctttatacaggcgacaagataggcattgccgacttcatcggagacggcccgacttacgacatagaacataccatccctcgaagtgcaggtggcgacagtacacaaatgaacatgacgctttgtagcagccactataaccggttcactaagaagaccaagttgccaacagaactggcggagcatgaatccatcatgcctcgcatcgagccttggaaagaacacatcgaggatctgacgaagcaaatagaccgcatcagcactcgaggtatttgggataaagcgacaaaggatgcacgcattaggaaacgcaaccgcctaaggatggagcgcgactattggcagggcaaatatgaacggttcacgatgacggaagtccccgaaggctttgcacgtcgccaaggtgcaggcatcggattgatttccaagtatgccgccctctacctgaagagttatttccatgacacgaacaatccaaatcgccgtcaggtcttcagcatcaagggaacagtaacctcagagttccgtaagatgtggggcatacaggatgagtacgagaagaagtcgcgcgacagccatacccaccattgcatcgatgccatcgtcattgcttgcattggcaagaacgagttcaacatgatgggcaggtactaccatgcgaaagaagaaaacgaaagaggagaagggcaaagaccagaattcgagaagccttggcccaccttcacgcaagacctcaagcaaattacagaggaacttctcgtcgttcaccacacgccagacaacatgccgaagaaggcttcaaaggtaatagaagtgaacggaaagaaagttgtggctcgcggagattgtgctcgtggcagcctgcatcaagatacttattatggggcgatagagaaggatggcgagataaagtatgtggtgcgcaaatctcttagctcattgaaggaaagcgatgtggaaaacattgtggacgatgttgtaaaggaaaaggtgaagcaggcgatagcagagaaaggcttcaaagatgccatggctggagatatttacatgaacgaggcgaaaggcatcctcatcaagaaagtgcggtgctatgcgcctactgtcacccaaccccttgacattcgccatcatcgagatgtaagtacaaaagaatacaagcagcaattccatgtgatgaacgacgagaactacatgatggcaatctatcaaggcatcgtgaagggcaaacgcaaaacgtcgtttgtcttggttaacgcacttgatgccgtaagcttttataaagagagcacagacaggaatgactatctttccatcgtaccagaagagaataaaggggtgccgttgaaatggtgtgtcaagaaaggtacgcatttacttatgcttgaagaaggagaggaaagtgtaagtttctctaacgccgaagaattgagcaacagacttttcactatcactaaaatggataaggttggacgcttgacatgtagaaatagcaaagaagctagaactgcgggtgacttgaaaagtatcgttaatgcaaatccgtttaggttacaggacggttatcgtccaattctatgtatgagtccaattaatttccatttccttgttgaaggctacgacttcactataacaccattgggcgaaataaaactgatacactgatatgctgaaacagacactggtatttaccaatccattccggctttccttgaagaatgcccagttggtgattgcttcaaaggagatgcctgatgaggcacgaaccgttcccatagaagatgtaggtatggttataatagagaaccagcagatctctataaccatacctctcttgaacgaattggtcgatgcaggcgtcgccgtcgttctgtgcgacaggaagggaatgcctcatgccatgcttcagaacatggatgggaacaacctccagggagaattcctccgcaaccagatagaagtgggcgaagttctccgcaagcaactctggaagcaaatcgttgaggcaaagataaaaaatcagtctgccttattggaaaaacttcatggcaagggcgtactcctgaaaccttactatatgaacgtgaagagcggcgatagcgacaatagggaagggattgctgctcgactttattggggagcgttgtatggagaggactttgttcgtgacagagaggaagacggcatcaatgccttattgaattatggctataccatccttcgcgctgcaactgccagagctttggtgtcggctggcttgacaccatcgctcggcattttccatcataaccgaggcaatgcctttccgctggcagacgacctgatggaaccctatcgccctttcgtcgatgaaatagtatatcatctgtgcgaagaggggaaactggaagtaaacaaggaaacaaaggttgaacttctcggagtacttacctgtgacactttctttcccaaagtgaccagacccttgcaaataggtatgtctatgacgatggcatctttggcaaaatgctatgcaggaacacaaaagaatctttcactgccctcgctgaaatgagtcaagtccgcctaaacgcatataaaataatgtggcttatagcgatgtttgaccttcccacgaaaactaaaaaggagcgtcacgactatgccgtctttcgcaggagtctggaaaaggatggattcgttatgcatcagtatagtgtttattgtcggttctgtgcatctttggaagcaagagaagtgcatgtaaggcgagtgaaatcctatatgccaggcaagggaagattaagtataatcaccattacagacaaacaatactcagggattataaacatttggggagagatagaacaaaaagttcagaaaaggcctgttcaattggaacttttttagtaactttgcaaaggatttgatgttcatcataccacttcttatacataaaatgtattcagaagccttcaatataagctgaatacatgatataggttgtggtttgatgatgatatgagataaagaacaaccgcacccgtcacgagtgcagacatcctttcgttgtggtttgatgatgatatgagataaagaacaacgataagacatccgctgcattgcaacgctgggttgtggtttgatgatgatatgagataaagaacaactatctatacggaagtctggcagctcactagttgtggtttgatgatgatatgagataaagaacaacagagccccacaaacaataaatagccggacggttgtggtttgatgatgatatgagataaagaacaacatgaggacttcatcatcctaatgcttcgaggttgtggtttgatgatgatatgagataaagaacaactgttcaaaaaaacgagtcccgagcttcccgttgtggtttgatgatgatatgagataaagaacaaccacatctgtttgatgatgtgcggagatgtggttgtggtttgatgatgatatgagataaagaacaacagtacacgggtgcagtatcttttctatgtagttgtggtttgatgatgatatgagataaagaacaacccgctctgaaggatatgatacccccggactgttgtggtttgatgatgatatgagataaagaacaacgaactccgtcacgcaagccttggcgattgagttgtggtttgatgatgatatgagataaagaacaacgacatgaagcgcatctaccttaacgatgaagttgtggtttgatgatgatatgagataaagaacaacgtacggcgtgctcaccgcttggtttttctagttgtggtttgatgatgatatgagataaagaacaactgttgtcctgctctatacacatcatccttagttgtggtttgatgatgatatgagataaagaacaacctccactaccgtcagttgcgctgcatgttagttgtggtttgatgatgatatgagataaagaacaacgcattttttgcatctaactcagacattacgttgtggtttgatgatgatatgagataaagaacaactgattttaattttgttatttctaagcgaaggttgtggtttgatgatgatatgagataaagaacaactgcgaccgccaagggcaatcaccgtgccgagttgtggtttgatgatgatatgagataaagaacaacatatgtctatctacatagcatacatttcgcgttgtggtttgatgatgatatgagataaagaacaactgggacgatatcttacaggcatcttttcagttgtggtttgatgatgatatgagataaagaacaaccaagagttagatcaccatcgcgaagagcctgttgtggtttgatgatgatatgagataaagaacaactatatgagctgaagccttacctgctggacggttgtggtttgatgatgatatgagataaagaacaacaataaatgggcgataataaacaaactcacagttgtggtttgatgatgatatgagataaagaacaacgtgactcggacgctcctacgtcgctttcctgttgtggtttgatgatgatatgagataaagaacaactctatgcctcgcaagctcggcatcatataggttgtggtttgatgatgatatgagataaagaacaaccgcactggctgctggtacggtcacgccttggttgtggtttgatgatgatatgagataaagaacaacctacctttcggcactatcaacaccgcatcagttgtggtttgatgatgatatgagataaagaacaactcagcctgttcaacctccccagcttgttaagttgtggtttgatgatgatatgagataaagaacaacttaatacttctgttcgtgatatgattaatggttgtggtttgatgatgatatgagataaagaacaaccgacgaaactggatgtaattatctaagccggttgtggtttgatgatgatatgagataaagaacaactttatttaatttttccctttcatcaaaaccgttgtggtttgatgatgatatgagataaagaacaacagacaataaaatgaacgcccattggtcaggttgtggtttgatgatgatatgagataaagaacaaccctcagacgggttacaccaacccatacgcagttgtggtttgatgatgatatgagataaagaacaactttaccttaacttgtaatataggtaaattgttgtggtttgatgatgatatgagataagacacaatgcgtggtccgcaaaactgccctatggaaaaaagtacgtgtacttgtcgccataagtacgtgtacttgttgccataagtacgtgtacttatccacataagtacgggtacttattgacccaatgatttctactgccgtagatgcgggggcttatcaagtgttttgattagttcgttttattgggtttgcccaaagccggagaagcgtggggagttgggtttatggttggtcgggggggaaggcttttagcagtcggcggtattctttccgggtgatggggatgactgttccgtggcggggggtgaaggctccggtggtctctgtgttctgcacgaaggtgaaggtccgcaggtcgtcgctacgggtgaactggtagtggccgcttgtgtagcagtcgtacatcaggcaccatcctccgccgatgagcgggaagacgccggcgccttctacgttgtcggtcgtcgtctcgcaaaagccttcgtggagtgtccaggtatcggggcggtgcagttggcggaaggtgtattgccgtatgcctttgtgactgccgtcggcttctgtcttgaagaagaggtggtagagtccgtcggaggtctgtacgatgtcggtgtcgatggctggggcgtggaagtcgaagagcacttgcggttcgccttccagtccgctgaagtcagggttggcatagcaccaatagacgcggtcgtaggggatggagccgtcgtctgtgaggagcgagaaatagacgagatacttgcctgcctctttgtcgaagatggtctgcggcgcccatacgcgggtgacgcttgcaaagtgtgtgccgtggtagcggtcggggaagtgtacgcggtggtgttcccagtgaatgaggtcgcgtgagcggaggagcactatgcctctgttgctgctccatccgagggaggagcgcatgtcggtagccaccatgcggtaccatccgtcgtggcagcgcaggatgtgtgggtctctcactccgtgggcgagtgctatgctgtcgcttccgatgatgggctttccgctgttcaggggtgtgtagttgaagccgtcgttgctgacggcatagcatatctgctcctgttccggggcgttgccggtgaagtaggcgaagaggtacttcgccatcttctttgccggacagggcgttgctgtcagaagtgcaaggaagaggatggtgagctgtggcagccaggagtgggttctacgcatcggcagttgtcaggtgcgtcctcatttcttgtttttcttcaggcgctcgaactctttctttgctttggcgagttggtccatgaagtctttgttgttgaggagtgcgggcagtacgagtgctccgaccatctgtccggccttgacgtcgctgtagtggtggaagcctacgatccatcggctttctccgaagtccagtccgcgcttgaagagctggtcctgtctttcggggttgatggtggcaagaaccatagcgacggaagtgccgattgcgctgtgcccggagacgtagctgccgttgttgcgaaggccttcctctgcttcgggaacagccgtcggctcgttatagagggcgtaggggcgtgtgcgtttgtagaagtttttggtgcagcgtgtggcgtagctgccggcgtcttccttcatggtgttgatgagcttgtagatttcgggtgtgttctccttcgagagttccatgccgaaagcttccgagaagacctccaggatgttgttggtcgaggtgttggcatccttgacggcttgcttgccgcgctcggtgggtcggatggtcttgccgtactggtacatgtggaagtcctgttcgaacagcagggagccgaatgctggtggcgggcccatgaagactgtgtcgtgcggggcttcttcttttgtcaggtagtggttggactgtccgtaggctacgatggctgcgaacaggagtgcagagatgcagagcgtctttttcatagttgttgttaattaggttattctgcctgcaaaggtacaaataaaagttgaaaattgaaaattgaaaggtgaaaggtacaaaaaagaggtgaaaaagttggagataaagaaaaaaaccgtaactttgtaagcgtaacagtatagtattaacctcctaaaaacgaaaaactatgacttacaagattatcgacatcgagggcgtaggcgaggcttatgctccgaagctccagaaggcaggcatcgttaaggtagaggacctgctggcaaagtgtgccactcctaaaggccgtgctgccctggcagaagagacaggcatcagcgagaagctcatcctgaagtggaccaaccatgccgacctgttccgcatcaagggcgtaggtccgcagtttgccgaactgctcgaagcagcaggcgtcgataccgtcaaggagttccgtcatcgcgtagccgagaacttggcgcagaagattgttgagacaaacgacgcaaagcaccttgttcgccgcgttccctccgtcaaggaactggtgaagatgattgagcaggcaaaggaactcaagcccctgatgacctattgatgcacagggtgacctattgagaaacctcgtgaacatatggccggatgtctgtggatgttcggccatatatattaatgtgaaaacaaagaaagaataaaggaaagtgatatgatgacgtatgacgcccatgcccgttctgtccgaaacggtctgccactaatgacggcattgctctgtgtattgatgctgacaatcagttgtacatcaacacagagaagtaatcaagtctccctctcgcagttgcgtgaaggctttgccaatccgcccaaggaggcgaaggtgcgcacatggtggcactggttggacggcaacgtgacgcgcgaaggcatcactgccgatctcgaagccatgcatcgtgttggcatccaggaggcaaccctcttcaacggaggcatgggcttcccgcaaggccccgttgagtacatgagtcccgagtggctcgacctgctgcaacatgccgcaagcgaagcaaagcgcctcggcatggagctgtccttccacaacggtcccggatggtcgtcgagcggcggcccgtgggtgaagcccgaagatgccatgcagaccgtcacctacagcgagcgtcgcatagagggcggtcgcaccatgagcgtcgtcctagagaaacctcagtcgcgccatgagttctaccaggacatcgccgtgcttgcctttcccactccgcagagtgagcaacgcatcaacggcttggaagagaagacgctcagcaacaatcacttcaagagccacctgatgccagagacgcgcgatgtggatgagcaggccatcgtcaagcgcgaggacatcgtcaacctgtcggaccggatgctgcccggcggcacgctgacgtgggaagtgcccgaaggcaactggaccatcctgcgcatcggcttcacgcccaccggcatgaccaaccatccggcgctggccggaggcaacggactggagtgcgacaagatgagtcgcaaggcgctcgacgccttctggcaaggcggcatccagcccatcatcgacaagctcggctcgctggtcggaacagcccttaccggttcgctcatagacagttacgaggtaggctgcggcaactggacaccaggcttcgagcaggagtttgccgctcggcggcattacgacctcaccacctacctgcccgccctggctggctactatgtggatggtggcaatgtggccgaacggttcctctgggacctgcgtctcaccgtcggcgagctcatggccgagaactactatgaatacttcggcgagctctgccacaagcatggcatgaggtttctgaccgagccttatgagggtcccttcaacgcgatggaggtcggcgctccggccgatgtgcccatgagcgagttctgggtgggcagcaacatgttcggcagcgtggccaatctggctgcctccatcgcccatcagagcggcaatcaagtggtgggagccgagtcgttcaccgcagccggcggcgagagtcgccaccgcaaccaccccggcatgctcaaggcacaaggcgacctcaactggaccaacggcgtgaaccgcttcatcctccacaccaatgctcatcagccttgggaggtcggtccaggcttcagcctcgggcagtacggcacgaacttcaaccgccacaacacctggtgggagcaaggtcgggcctggatggactattgtgcacgttcgcagtacctgcttcagcagggccaaggcgtgcaggatgtgctagtcttcatcggcgagtcgtcgcccaacatggggacggatcagcccgagatacgccagctgggactggattacgaccagatatccgcctcggacgtgaggaagctgaccgttcaagatggtcttctgcgcacggccgtcggtcgcacctatcgcctcatgacgttgcctgccgaagagcagcccacgctgtcgctcctgcaacagctcaagtcgctgaccgatgccggcgccctcatcatcggcaagcgccccgaagggtcaccgtcgctggacggctatccgcagagcgacgtggagtatcaagccctggtcgacgagctgtggggcaaggataacaacgggaagatcagggacatcggcgtagaggatgccatgaaggagaccggacttctgcccgacttcagcggcggctacggcgaccagcggctctgcttcctgcatcgttctacgagcgaggccgaggtctatttcgtgtcgaatcagcagaaagactatcgcaccgagctctgccgcttccgcgtcgaaggcctagtgcccgagctctggaatgcgcagacgggcagcatggagaatgttccggtgtggcgcagttccgacggcatcacggagattccgctctccttcaagcccgaggaagcctacttcatcgtgttccgccagccagcagagggcgacgtgcaatatactgccgccagccagaccctcaaaggccctgcgcctgagctgcttcccgacctcgaaatcgtgcgtgccgactacggacagttcctgcccttcggcctcgtggacgtcaccgacaaggtgagcggccaggtgcgcgacggtcgtctgtccatcgatgcgaccaacgactttgcgggcggcgacccctgcttcggcatcgtgaagagcatgcgagtgaagtacaccgtcggcggccagcagcacaccatcaccgtgtccgagaagcaacacctcgagctgccgcagcagggcgaggagggcgagctggccatcctgacggccttctacggcaaggtgcccacgctcttcggcaacgttcgcgctcccgagaccgtcgatgtcaccaacctcttgaagcagaagattgcggcaggccaattcatcatccctgccggcgagataaagaccccactgcccggacaggtggaaggcctggaggctccgaagctacaccttatatataaggtaggggagacgtggcacgaccagttcttcaccgaggacatgaccatcaacctggctcagcacaagcccgaaccgtcgctggtcatcgaggacggcaagcccgcctggtacacgcctgaggcaggtgagctgacgctgacaaaggccgatggcactacagctcaggcacagatagatgccgtgcctgacgtgctgcctctcggcggaacgtggaccgttgacttcaagcagaagtggggtccacagtggcaacgcaagttcccggaactcatgtcgttcagcgatgtggacgatgacgacaacgtgaagtacttcagcggcacagccatctatgcgggcacgttcgccttgccgaagaactactgtcgagaggacatccgtctgatgcttgacctagggcaagtcttcgtcatggccgaagtctttgtgaacggcgacagcctgggcatcctctggaacgaaccttacgaaacggacattacgaaggttgctcgcgaaggcgagaaccagattgagctacgcgtcacgaaccaatgggtgaaccgtctcattggcgacgagcagcttcccgccgactttaaggctgaaggcgagcactacaccgaatggcccgactggatgcagaagcccgaggctggtcgtccctccggccgcacaaccttcgttgcccacaagcattggcaggccagcgaccaactcctgcccgctggcctcgtcggtcctgtcgtgatacgaccctacgtcagagcagccgtcgaataagggcttaaggcagctcgcgacgcttccgaaacaagcttctgccgttctgtcaatcacgccggagcggtcagaagcctgaccagaactggcgccagtacttgcgggccagttcgtcccaactgccgatggtggcgttgaagaagtctgcggtgtagccgttgaggaaagcggtccgttccttttcgtcggtattccaccatgttcgctctacataggactgttcgcgtgtggctttgtcgaggaagtgctgctgtgctgcc

SEQ ID NO: 1658 - DNA, 18742 bp, synthetic construct
  source 1..18742: mol_type = other DNA
  misc_feature 1..18742: note = Synthetic
gcatgctattatctcctgtcctatgctgttcagtttccgccagtagcgtcgctgtgtccagtgcctctcgctctccgcagtccattccttgtcctccttcagcgagtcatgccttgtgtcgaaaagattctcgcagttcagttccaccaccgtgaatggcgttgttcttgggtgttgggtgcttgggtgataggtgcttggtgtttggtgttgggtgctgggtgtttggtgttgggtgacgggtgtttggtgatgggtgtcagacaccatttcttgtccgcatgctatggagcacacggcaaataacaatgtggtttgccaacatatattacctaaatgccgccaccaaacaccccttatccagcacctgtcacccatgcctgttatttctttatttctatgtcgcgctttacgttgttgcgtatcttggcgaggtagttcttcatgccctcggcgtctttgttgtcgatgatctcgaggagttccttcagctcggtgcgtatcttggctacgttctcgctggtgtaggggttgaagaggacctcctgcaggaggaagtcgtcctcgttgagcactcccttggcgatgcgcatgtgtcgcttgaaggttgttccgggtgcgtcctggtgtttcattacggcagcgaagacgaaggtgctgacgaagggtatggagagagagtatgccacggtgcggtcgtgttcctcgaaggagtactcgtagatgttaagtcccagtttggtgtagaggtccttgaagaagagtcgccctatgaagtcgccctcgttgatgatgatggcgttctcctctgacagttggttgaggttggcgaaggtgggaccgaacatggggtgtgtggaggcgtagtgcatgcccgttgtctcgtagaactccttcagtcctgtcttcaccgacgagatgtcgctgatgatgcagtctttggggaggtatggtatcacctccttgaaggctggtatggtgtatttcactgtcacggcgttgatgacgagctctggcttgaactcgcgtatctcctccagttcggtgaagcgcagtgtgttgtatgtgaagcgcagtcgtctggggtctttctcgaataccgctgtctcgtgctcgaagctgagcaggtcgaggaagaagcttcccatctttcctgctcctaatactaatattctcattgttttgtggtctcccatgcgggggttggtgtctgaacaagcacatttcagactggtttagtgtttgtatgggttctgtgcttgagaaccgtgtggtgtgtggggggaggttcagacccccaaccccctagcttagggggctagtgttcagacccccaaccccctgactcagggggctatattacttgttgatgatctctatttgctgtcgcacgctctcctcgtgtattgcctcgtagattttcttgatgaactcggagtccatgccgcagagagtaccctgtgcgccgcgcttgtcaagaatctcgttgtagcgctgtgcctgtagcacggtcatgttatgctctttcttgtattgtcctatctcacggcacacgcgcatgcgctttgcgaggacgtccatcacctggttgtcgagctcgtcgatctgcttgcgcagttggctgatgccctcggtggtcacggtgtcgtcgcgtatgacgaggagagagaggatatagtcgagcacatcaggtgtcacctgttgcttggcgtcgctccatgccttgtcggggtcgcagtggctctcgatgattagtccgtcggcgccgaggtccattgcctgctggcacagcggtgctatgaggtcgcgtcgtcctccgatgtgtgaggggtcgcagatgatagcgaggtcgggaatgcgtcggcgcagttcgataggtatctgccacatgggcaggttacggtagatggtcttgtcgtagctggtgaagcctcggtgtatggcagccagtttctttatgcctgccccgttgagacgttcgagagcacctatccacagctcgaggtcagggttcacagggttcttcacgaacacagggatgtcgatgccgcgcagcgcgtcggcgagagcctgcatggcgaaggggttggcgctggtgcgtgctcccacccacatgatgtcgatgccgtatttcattgccagttcgacgtgagcgggtgttgccacctcggtggtgacgagcattcccgtctcctccttgacctgcttgagccactggagagccggttcaccgtgtccctcgaagcctcctggcttggtgcgcggcttccacacacctgcacggaacatgtggcatcccttctgtgccagttgcttggctgttttcatcacttgttcttctgtctctgcgctgcaaggacctgctatgacgaatggtcgtttctggtcgcttggcaattggagtttttctaattcaagttccataaaagactcaccccctgcccctccctgagatggaggggagtagaatgtttgtgggggatattctactgtgttattttttattcttgttatttcgttgttgttatcgttttcgttttcgttatcgtcatcgtcatcgttatcgtcatcgttatcgtcatcgtcatttcgttataacgggttttcgctaatcgctcatcgccttcaccctttcgagtgcctccttcattttctcgtccttggcgcagagggagatgcggatgtagcgtttgccgttggtgccgaagatgaatcccggtgtgatgaagacgcgcgcctcgtggagcacccgctctgtgagttgctcggcatcggcatagtgctcgggaatctttccccagaggaacattcccacctgctcggggtcgtactggcatcccagcactgtcattatctcctctgctatgacgcggcgtcggcggtaggtgttgatgttcgcctcgcggtgccactcgtcgctgttgtcgtaggcctctgctgctgccagctgtattccgcggaacgtgccgctgtcgatgttgctcttcaccttgagtatccatgagatgaactgcgcgttggaggcgcatagtccgacgcgccatcccggcatgttatgactcttcgacatggagttgaactctatgcagcagtcctttgcccccggcacctgcagcagcgagatgggatgctcgttgatgatgaaagagtaggggttgtcgttcaccaccacgatgttgtgacggcgcgcgaagtccaccagtcgctcgtaggtcttcatcagcgccggtcctcctgtcggcatgttaggatagttggtccacatgagtttcaccctcgagaggtccattgtctccagctgctcgaagtcaggctgccattgctggtcctcgcgcaggtcgtagttcaccaccttagcgccgaggatcttgctcagcgaggtgtatgtgggatatcccgggttaggcaccagcacctcgtcgcccgggtttacgaaggcgagagtggtgtgcagtatgccctccttggagcctatgagcggctgaatctccgttgcggggtcgagagtgacgccgtagaaacgcttgtagaagcgcgccatggcctgtcgcagctcgggtgttcccatcgtgggctggtagccgtgtgccgacggttgctgtgccacttcgcacaggcggtcgatggtcttctgcgacggcggcatgtcggggctgcctatggcgaggcttatgatgtccttgccctcggcgttcatctgcgccacctccttcagtttacggctgaaatagtattcctgcaccagcgacaggcgttctgctggcttgatgttaatgtccttcatattctccaagtattttcatttctcttgttaatggtgttatggcgtcgatgctctggcgatagcgtatgatgtcgtcgaaggtcacatcgacatagaacttatactcccactcgcgtcctattatgggcagcgactgtatcttagtgaggtttatcttgtagaaagagagtatcgagagcacctgtgacagcgagccctcctcgtgaggcagcgagaagacgaggctcgacttgttggtctttggcagcgacctgaggaagtcggccttcaaggggttgcacaccacgaggaagcgtgtgaagttatgcttgttgtcctctatcgtgtcctccagtatgcgcatgccgtgcatctcggcggcctcgcggctgcatatggctgcccatcctcggcagttctgctccttgatatactgtgccgagcctgcggtgtcctcagcctccaccatcttcagttcggggtggttggcgaggtagttgcggcactgcatcagcgccacggggtgagagtgcacctcgttcaccgtagcccagttgtcctcgggcagacagcagatgcagtggcttatgtgcagtttatgctctcccacgaccgtcgttcccgactgctgcagcagttcgtagttgtgcagcaggctccccgcgatggtgttctctatcgccatcatgccaatggcggtagggtcgcgcttgatgttctcgaacacctgctcgaatgtggagcagcagatgagctgtatctgctctccctcgaaatactgatgggcggcgatgtcgtggaaggagcccaacaatccttgtattgctattcttttcatattatcaaaaatcccgcctcaatcatcttgaagcgggacttaaacgtatatttcttttcgtttgtttttcttaagttgaaatctacacgcaacttcccgcttcacagttccctgcaaagtaaaagtagaagtaatagaaagatgcgtaagacatgttcatttctctatgttttatttaactcgggtgcaaaagtaaaataaattcgcgatataagcaaacattttgatactttttttcaccgaaaaatgaatttctgtcaaataagcgcggtttcctactttttaatatatacatgcgcgaaggtggtccatgcgccgtagaagcccgtctctggtcccacgatgttggtgatgatgcagaagcgggggaagaactctgcgtggaactcgtagttggcctcttcctcaacaccggtcataatgttattgaagagtgctcccacgccctcgccctccgcaatattgggggcatagacggcgatattgtatgccagtttctcggcgcccttgatggagaactctgccgtgccaccgcgctcgtcgcccgtgatgtggtcgtaagagaaattgtatttcttgcctatctccttgcgtgttgccggtctcagctgccctttcaggtcctcggggtagtcgatgtttcccgtgagcaccatatcgtactcagtttccagatgctgccatgtgccgctatatttcgtgccttctatcttgagaaacatgttgccgttgatatgaccgttcttctggtactcgtagaggctgacatatttcccgacttcctcttcctcgccggcgtttcccacaaggagaatgtactcgggcttcttagcgttggggtagcgtatccagccagacaggaggccgtcgtcgcgtctctctataaacacctgcacgggagtcttgcccttgttcatcgttccttcccatgcctcgtaagtaatgttctcctgtgccttgacgccgatgacagccatgaggcacatcacagtaatgatgataattcttttcatgatgtttagttttgcatttgtctttttatctccttctatcttcctctatctccctctatctccttctatctccttctacctccttctacctccctctacctccttatctctaattatccaaacggattactgttcttgtatgcctggcgcgtcttctcctcgatgtcctcctcgtcgttctcgggagtcatctctgcaatcttctgcatgtcctcgtcgtacccttccttgtcgccctgttccatctttatggcggcgcgctcgcggtaggcatctatcgagaaggggttcagttcaatgacgctgttgaaggtcgccattgccctgtcgctgtcacccttcgccttctccagacggccgttgagcatcagcacctcctcggtctcgctgtatctctccataagccacgcaacatcctcggcggcatcgtcgagtttcccgtcggcaagaagcgtctcgccgcgcagcaggtaggcgtcgccgtagtcttcgcgcaggtttatcgccttagtaagcatagccaccgcgttagaggagtctttaagtccgatgcacgcctgggcatagaggtacatcagttcgggcatgtccttgtccacatgcatagccttctcgcatgcgttcgacatagcgttatagtcctccatcatatatgccacgttagccattcttatgtatatcttcacgttgtcgggctccgtctcggcgagtttctgcaggtgttcataagccatcagcaggtcgccctgacgtatgagagcctgactcagatagtcgcgtgtctcggggtcgtcctttatcttcagcgcgtgcgtgaggcatttcacggcatattccgcatttccctgcatcatcgcctgcttgccgtcatatttcagtacgtcgaagttatgctcttcagtctctttcttgtcttcttcaggagtctttggcttgctcccgaacagtgctttgaaaaaattcatttgccttaggattctatttgtttaggggtacaaagataagtaaaaaatgctgtataacagtgaaattaagtgttaatcaaataaaaaacaccgaaaaagacttaataagttttggtgttacgaaacttcacgttatctttgcccacgatatgaggaaacatcttttcattattataatggcgctttgctgcatccagatgcaggcacaggagaacgtcgtttcagacttggaaaagcctgcagacacctctgtgcccgccaaccttcagctgtcacccgtcactcaaggttacgcactttcaccaagcgaagtggagatagaacagccagcacccgccacctatcacccatcgcccatctcccttccctggatggggtggagcagaggctatggcgcttttatgggcaaccttcacccgggctttaatgtcagcctcggtgcaagtgtctttgcgcccatcggcaagcatcgctcaggaggcgcagggttctcacaagacatcaccgccgtgtatgctatgcccctcaccaaccgtctctcgctcgccgtgggaggctacttcaacaatatcacctgggggcaccatagttatcgcgatgcgggtatcaacgccattctcggataccgcttcaacgagcattgggaggctttcatctatggacagaagtcgttcctcaagcccgagatgccgctgcctctatattacatgcatgacgtgggcgaccgcatcggtgccgccgtgcgctacacccctaaccacacgttcagcgtcaccgtctctgtggaaggccgctccgagccctcatggctccctgcgatgcccttcgccaaccgttacaacgacttcccctatgacggaatggactggtagcgtttgagaatgagtatgaaaaatgcataaacttataatgttgcaacacagcaacttaaatagttttaaaatataaccaaatgtaggtattttacttaaaaatctttcaaaaagtttggagagtaactatttttgttgtatatttgcacatgggataatgagtcacgctatgtgctccaagctgactaactgtataactaaaaatcggagaggagcaccgatatgaaaaactattaaggaggctatactatgaacattaagccaaaatgccacaaccaggaagacttcgaactcgacaatgtctataatgacgaggatcgaatttacaatgagtcgtccaactctactatctggtacaattgatgagatgatactatgaatgaaacaaacaaccgcgtcacagacatcacagtgtgtggcgcggttgttttgtgcccgtgcgccacaggccatccctcgcctccccattagccatctttcgcatcctcatcaaccgcatctggccctctgaaacatggctgctctgcatgcgaaaggcatatcagagaacctgtcgttaccagcaaagaaccataatcaggaaaagacactatttggtcacagtcacacggtcacggtcacatggtcacggtcacatggtcacagctgtgaccatgtgaccgcagaggagatgcatcagtcatatgatttgtaacatgctgatatgtagttgtttacaaatgtatcccaacaatgttgcgagtcattaatggtcacacggtcacagctgtgaccatgtgaccgcagagcgaaaggagtaaagcataatatgcataaaatactgatatacaaatacttatattaataataggataatttctctgcgtgatgaatggtcacacggtcacagctgtgaccatgtgaccgcagagtagggcagaatctatatctatataacttattgatttactgatatttacatccaataatatatcctacttaggacctagaggtcacatggtcacagctgtgaccgtgaccgtttccataagacatagaatcctaatcggacgcctgttccgaaattatcatgaaattataacgaaaagagttggtgtttataagataatttagtatttttgcagattagatatagtaatataaatattgcaggaatcaactgttgacctttgaacgaaaggagaaaacgatatgtacataccaccattttcagtaagttcagaagctatcaacctgatagcagagatttccagcatgatagagcgttacgccatccgtttggaacaggaagacggtttgcggctgcgaaaagcaaatcgtatcaagaccatccactcatcattggcgatagaaggtaacacgctgacagagggcgaagtgcgagacatcatcgacggcaagaacgtggtggctcctatcaaacagattcaggaggtgaagaacgccatagccacctatgaactctatccaacgctgaatcctttcagcgtaaaggatttgctgaaagcgcacggcgtgatgatgcaggctttggtagatgatgccggtagattccgccgtggaggcgtgggagtgttcggcgaacaaggtattgtacacctggctcctcctgcagaaagagttccgatgctgatgaatgatttgtttgattggctgaaaacgtcgaaagaccatctgctgatacgcagttgtgtgttccattatgaatttgaatttatacatccatttattgacggtaatggcaggacaggacgtttgtggcaatcgctgatattagggaaacttcaccccatgtttgaacatctgcccgtagagaacatggtatatgccaatcagcaagcatattacgatgccatcactgccagtacaaaagctgctcagtcgggacctttcattgatttcatgctgggcgaaatttacaagacgctaaaggaacaccagggagaagagctttccatgacagaagtagatcctatagataaggagttcggtttaaaattcggtgaagagttcggtataaagtatggtataaagttcggtataaatgacaaacagcttcttttattgcttaactccaacccatcattaacagcctcggaagcggcagaacgcataggcatgagtcagcgcggtgtggagaagttgatgaaaaaacttaaagatatcggagttatcagcagacaaggcagccggaagaatggattgtggattatcaacaagtgacgaatgacaataactatcacatcatagcggaaggtacacaccactttcattatatataatagcaaaacggtcacagctgtgaccgtgaccgtttccataagacttagaaccataaccttacatgttattccataaaaaatgccctccagaagagggcatataggatataatccttcggcatatagccttattgtgataagatgtagaatatcttactgtttgcaaaggtagtaaaaaacgatggaacttcaaaagtattagttttaaaatttgttattatcattattatttcgtaattttggctcatatttttaaaacagaatattatgaaaaagagaatacttggtatagacacaggcactaacagccttggctgggctgttgttgacaagcaagaagacgggaaatactctttggttagaaagggtagccttatttttcaggaaggtgtgaaggtggaaaagggtatagaatcttctaaggcggcagaccgtacagcacatcgcgcactccgaaaacagtatttccgcagaagactcaggaaaatcgaagtcctgaaggtgcttatcgagttcggctggtgtccgtatctttctcctgaagcacttcaccagtggcatgtgaagaaagaataccctatggacgaagcattcatatcatggcagcgcaccaatgataattatgatgataatccttactattacagacatagatgtttgcacgagcagttggatttaaacgaaagagcagataggtatgttttaggcagggcgatgtatcatctggctcaaagaaggggattcttgagcaatcgcctggagcaaggagatgataatgagacaggcaaggtcaaggaggcaatttcctcattatccaagagcatggctgatgcaggatgcgagtaccttggcgattttttctataagttatataaggagaagggaaataccgaaagaatacgcacacgctatactgaccgcgaggaacattacaagaaagagttctatgccatttgcgaacggcagaatctttccgaggagcagatatcgaaattagagaaagccttgtatttccaacgcccgctgaagagccagcgccagggcgtcggcaagtgtacctttgagccaaagaaagcccgtgtggccgactctcatcctgcgttcgaactcttcaggatgctctcgtttgtgaacaatatcaagattaaaggccctcacgatgtggaactccgtccactctctcaagaagagtttgaaaaggcaaaacctatgttcctcagaaagagcaagccccaatttgactttgaggatatagccaaagcaatagctggtaaggggaattatcagcatatcaaggatattggcgataaagcgtataagttcaactatagaatgacgcaaagcgttacgggctgtcccactattgcctgcttcatttcagtctttggcgacgactatgagaacgctattgctgaacgatatacactatctgacggcaagacatcagagcagatggtctatgacgtatggaatgtgctgtatagtttcgacaacaaggaaaagctgaagcaatggggtaaggaaaggcttcaaatggacgatgatgaggccgagaagttctcaaagattaaacttacccatagtttcgcgtcactaagtttggcggcggtcaaaaagattctcccttggttggaacaaggacttatctatccgcatgctgtattgatggccaatgtgccagatatcgttggagaagaagtgtggaagagtcgtggcgaggctatcactaacgaactgttgtcgctgattaccaacttcaaccccaaggatgtcacaatgacgggaacattggatttctgcataaaggatattctgaaggatatgtgttccttgaaccctggagcagcagaaaaactataccatccttccatgatagatacctatcctgatgcgaagaaaaattcgcaaggtgtttaccaattaggttctccacgaacaaatgccgtgcgcaacccaatggcgatgcgctcacttcatcagctgaggaaggtcatcaacacgttgttgcgtgaaggcatcatcgatagcgatactgaagtccacattgagtatgcccgtgagttgaacgatgccaacaaacgcaaggccatagcccaatggaacaaggaaagagagacgcgccgcaagaaatataccgaagacatccgcacgctttacaagcaggaatgcggaaaggacattgttcccacgaacgatgatatcatcaagttccagctatgggaagaacaagaccacatctgcctttacacgggcgattccataggcatcaccgagtttgttggtcctaatccgagttacgatatcgagcataccgttccgcgtagtgtaggcggcgacagcacgcttgagaacatgacgctatgctccagcaagttcaaccgcgacgtgaaaaaggcaaaactgcccacccaactgtctaatcatgcagccatcatggaacgccttgaagaatggcgcaagaaaatagagaaactgcgtaaggacgtagaccacgtgaagacacattcgggcatggacaaggccgtaaaagaccgtcttattcagaagcgccatctgctgaagttggaacttgaatattgggtaggcaaatacaagcgtttccagatggaagaagttcccgaaggtttcgctcgccggcagggagccggtatcggtctcgtcggcaaatatgcaggattatacctgaagtccttgttccataaagccgatgaccggaacaagagcaacgtgcgcgtcatcaagggagccactaccgcagaatacaggaaaatgtggggcattcaggatgaatatgaaaagaagtcgcgcgacaatcatgtacatcattgcatcgacgccatcaccattgcctgcatagagccaggcgaatataatgccacggcgagatactatcagcagttggaggagtatgaaagaaccaaggccacaaaaccttcgttccccaagccttggccaacttttacggaggacataaaggccattgctcaggaaatgctggtagttcatagcacgccagacaatatgcccaaacatgcccgtaaatatgttcagacttccaacggaaggaaacttgctatgggcgactctgctcgcggttcccttcataacgatacgtattatggagccatcgaacgtgatggtgagataaagtatgtagtgcgcaagttactgggcagtctgaaagaaagcgatgtagaaaatatcgtggacgatgccgtaaaggaaaaagtaaagcaggccattgccgagaaaggatttaaaaaagcaatggaagaagacatctttatgaacagggagaagggcatcaagataaaaaaggtaagatgctttacccctaccgttacaaatcccttgcatattcgcagtcacagagacgagtcaagaaaagaatacaagcgtcaattccacgtaacgctagacggaaactattgtatggcgatttatgagggcgaagtcaagggaaagatgaagcggacatacgaaatcgtaaatatgattgatgctgctgcctattacaagaagagtgcagatttaacgaaacaatatcccattgctcctgagaataagaacgggctgaaatacagatgttctgtacgtactggtacgcagattatcctcttgcaatcagacaacgaagagataaatcttgcagacaaggaagatttggcaaggagattctatttcgtggctgtgatgcgtagtgatggacgaatagtactgcgttataaccaagatgctcgtgatgccacgacattgaagaaagaacgaaagtcgggtgcttacaaggtaggcgaagaatataggtcagagattatgctgtctctttcagatttccacgctctagttgaaggtgttgatttcaaaatcaatgtgcttggtgaaattgtcatgctaaaatagaattgtaaatgttgaagcgtacacttgtcttttctagtcccatgattctttcgctgaaaaatcagcaattggtgtatgcctttaaggatactccaaatgaaaaatttactgtgccgatagaagatgttggagtcgttttgctagaaaatcaacaaacgaatataaccctgcctttgctcaatgctttggcagagagtgaagtgcaggttgttatatgcaataacaagggtatgcctagtgctatgattcaaagtatggatagcaataacctacaaggggaaacacttaggaatcaaatatcatgtggcgaggttctcaagaaacaattatggaagcaagtggttgaagccaaaataaaaaaccaggcttctctgcttaataacataggagaagagggcgacatactaaaacctttctattcaaatgttagaagtggcgatgttgataatcgggaaggtatagctgctcgaatatatttccagcacctttttggagattgttttgtccgcaatagagacgaaatgggaatcaacgctttgctaaactatgggtattccatattgagagcagcaacatgtagggcaattgtatcttcagggcttcttcctgcaataggaatacatcatcataacaggagtaatgcatacccgttagctgatgacctaatggagccgtttagaccttttgttgatggggtagtgtacgatttagtaacacgtgggcagatggaactcacaaaggaagtcaaaggagagttaataagtgtgctatatgctgatacaaagtatgagaaaatcatacgtcctctaagtgttggtttgtcaatgactactgcaagtatggtgaaatgcctatctaaagaacttaacacaataagtttgcctgcattcacatgacatatgaaagactaaattcctatcacattatgtggttgtttgtgatgtttgacttacctgttatgaccaagaaggaacgaaaagatgcgactctatttcgtaagaacttggagaaagatggtttttctatgcatcaatttagtgtttacatacggtactgcggctcgttggaaagtgcacaagtacatataaaaagagttaggagttttaccccagaaaagggacatgtgagtattctttcaattacagacaaacaatattcaaacattattcatatatgggggagaatagagaaaaaaacaagaccaaccccaatgcaattagaatttttttagtaattttgcgtaatagaaaataataataaccacttcatgtgttaaaatcttattgtaaattactgtaaattaatggattgcataatatatgttgtggtttgatgtagaaaagagatataagacaatatccctttgaaataaaggaaaatccgcaaagttgtggtttgatgtagaaaagagatataagacaataagaagtaatgcgccaaagagccttgaaagttgtggtttgatgtagaaaagagatataagacaattcacctgcattaagatgcatgtgcttaatggttgtggtttgatgtagaaaagagatataagacaatacgagataacaaaggagttgaagcaagcagttgtggtttgatgtagaaaagagatataagacaatgcttgcaggacatctcgaccaactggcagagttgtggtttgatgtagaaaagagatataagacaatcctgtgcctcgagcaaaaaccacgcgccggttgtggtttgatgtagaaaagagatataagacaattcacttacaggctgacgaacaatagcaacagttgtggtttgatgtagaaaagagatataagacaattggcaaagaaaaaatcagcaagcgtccaaagttgtggtttgatgtagaaaagagatataagacaatggaaaaatatatataggacaaactactaagttgtggtttgatgtagaaaagagatataagacaatacgttaaacgttttgtttactttatcccagttgtggtttgatgtagaaaagagatataagacaatcacccgtctgaagtcgaagtaatgctcgtagttgtggtttgatgtagaaaagagatataagacaattgtaccgccgtcgtaagagtaacgaacatagttgtggtttgatgtagaaaagagatataagacaattcaccagcaaggcaatcagtaaccaagacagttgtggtttgatgtagaaaagagatataagacaatgagaatactgagcgtgagattcctgtagagttgtggtttgatgtagaaaagagatataagacaatagctgtccggaactttatagcaaaatccggttgtggtttgatgtagaaaagagatataagacaatggtattgtcaatttctccattagccacgggttgtggtttgatgtagaaaagagatataagacaatccccccgccgttcccgccgctgcccccaaagttgtggtttgatgtagaaaagagatataagacaatgatgacagaaaaggcaaaaatgtgaaggagttgtggtttgatgtagaaaagagatataagacaattcattcgtcttattccacatgtcccaattagttgtggtttgatgtagaaaagagatataagacaatagaagagccatctgtgacttaaactcgtcgttgtggtttgatgtagaaaagagatataagacaatgcgcaggttgagagagtcgaagtgccaccaggttgtggtttgatgtagaaaagagatataagacaattgacgaagttgcggtggcttcgtccgttgttgcttggatttgcccataaagagatgagggcatactgtgaaatacacgcgcaagttatacatataaataattagtttgtttcgctttttattcgtatctttgcaaaagaagataattgtttctttatgagaaaggtgacaaaaaggattgcttgtgtggcgggcgtgatgacggcgctgtgcgccgtgttaatgctgctttgtgaccatttggtatcgagcaacgcggaggggaaggctttttatgagatagacagcatacggcataataaggtggggctgctgctgggcactaaccctaaggcgcgggtgacgaaaatcacgaactatttctttatctatcgccttgatgcggcggaacgattgtataaggcggggaagatagagaagatattgattagcggcgacgaggatagtcttgacggcgtcaatgaaacggagtgcatgagggactcacttgttgcacgtggcgttccggcagatgatatcatacttgacgggaagggataccggaccatcaactccgtagtaaatgctaataaggtgtacgggctaaggagtttcacgataatatcccaggagttccacaacgaaagggctttgtatctggcggagcatctagggctggacgtagagcatctgcaggcatataatgcggagatgcccaagacaaggagggcttttctcaccactatacgcgagtatttcgcgagggtgaagatgttttgggatttgctgacatattagtaatagggtagaaaataataaacgtatgaagaagatattgttcttggactttgacggtgtgctgaacacagaacggcatcatgagcattgctatgaaaacggcattgctcctgtcgacgggtatggatatgcctttgatccggaggcggttgcaaatctaaaacggattattgacgagacgggcgcggatatcgttgtctcgtcgtcgtggaagttctggggactgtctgctatgacggatatgtgggaagaaaggaacttgcctggcaaggtcatcgggattaccccgaacaccatgagcgacgaaatgctgcttaacgccaatctggaagactgggatgcgatggcgggcaaaggacacgagataaaagaatggttgtcgaagaacggtaaggacgttattcaatacgccattctcgatgatgtctgcgacatgcttcccgaccagcaggaccactttgtgcagataaaccccgtagtgggaatcacggaggaagatgcagaaaaggttattgcaattttgaagaactctaatacacaatagattattatgacgagactggagggtataataagaactctagaacaattaaagatttttattacatgacgaaaagaatattagtgttgcctgatgtgcacgggcggttgttttggaaagagcctgtgcagaagtatattgacgtggtggacagggtggtcttcctcggtgactaccttgacccgtatggtgacgaggggggtgattatgatgctgagagcatctttgaaaaccttaaggagattgtggaactgaagcggaacaatatggacaaggtggtgctgctgaaaggcaatcacgaccagcactatgcttcggatctgtttaatgaactggctggcggtacacgtcaggataggagtaactggaacaggaatcatgagttcttcaaacaaaacaaggacttgttcggcattatacataaggaggaggttaatggtattccgtatatcttctcgcatgcaggagttacgttgtattggcttaagaaggtgaatgataacctgtggatacttccagataataaggtttctattgccgaccagaacatcatagacaagataaatatgatggacgatgagcatgaagggcaggaacaattgtctgtcattggtaacagtcgctcgtggtttggcgagaagactggcggcgtgttgtgggcagatgtaaatgaacattccattcctgatgcgccagatgtttacgacttgaatcatgttttccaggtcttcggacatacaagacttagaaaagagggcagcatggtggagtgtgacaatcttgccatgatagactcacgccaatgctttatcatagatgggaacagaagggaaagaataatgacagtaagggagtacgagaagtgaaaaaagaaagaatttggttagtcaggtgtcctcggaaaaacatgtgtcaagaatttcggcaaatgcgaaaaataatcttctaatattttggcagttaggaactattgagttatatttgcaccgttttttaagtatttaagaatgaagaagttgttttttgtgcttgcctgtattttggcgagcgtttctgta

SEQ ID NO: 1659 - DNA, 18237 bp, synthetic construct
  misc_feature 1..18237: note = Synthetic
  source 1..18237: mol_type = other DNA
gcataatcatgacagatcgtatgttcctcaaccatatcctgataccgggctaacagggttggaaaaatggaagcacgcttatctgataattctgcttcatagggcttggggttttcatacagcaccccgtctaccatacactggcaatcgccaatcatccatatttcgttgtttgtcttactgtatataacgatgctggcgcacagacgtgtttcagggtgtgtagcctggacagaagcatcattgggataaagacgaaaaatttcatgggtaacctcctcgcaaaattctgaaagggtaatgtcaggacgtgcatgttgaatataatttgcaataagcatcatgcagtatcgtccgtttttcatgctagaatttaactggattttggttttgcttgtgctgccgtcaatgaccgcaatgaagttatctgtgacaacaattccatcttcacatgtttcttgtgtatgcttacccacaagtttttgctcaataattctcatattaaaatatatggatatgccctttcttgttactatgagtatattacatagaaagggaatcggctaccatttatcttttcttttttctctgatgacgggatgcggtggattgaaaattgggattatatgatttacgtacccttttattctgtcctacatctggcgaacttccaaccgcttttgcatcataatgaatgtgcccgtggaacgggacgccgtcataaagttttgctataagatcagtccgcccaatgtgtttgagttcccgttctatgttttttcgctcttcaggcttgtaccaaaagaagaacatacgctgggcaagcttctccttaggcgttttagcacagaatacaggctctaatgaataagggtcataacctgtataaaaagcagtcgtactaacagtcattggggtaggggtaaagtcttgtacctgttcaagatggaaatcaagttttttggttaaaacagcaagctctgccatatcctcctcttcacagccaggatgactactgataaaataaggtatgatttgttgttttagtccttcttccttattgatcttgtcaaatagacttttgaaatcgtagaaaagtttgaaagaaggttttctcataaacttcaatactctgtcagatgtattttcaggagctactttcaatcgcccgctaacatgtttggaaataagctcacgagcgtatgtgacagcattggcatttgactgattatctttgcttttgtgcaagataaggtcatagcgaactccactgcctatgaagcttttctttactcctggtaaagcatcgacggcacgataaatatctaacagtttggcatgatcggtaataaggttgggacaaattgcaggattaatacatgacggtcgcttacaatgttcacaaacattgaggttacgaccgtgcattccgtacatattggcagaaggtccacccaaatctgaaatataccctttgaagtcgggcatttgtgttatttgcttcgcctcgcgtaaaatactctcttttgaacggcaaacaacaaactttccctgatgagcagagattgtacagaaggcacatccaccaaagcatccacggtgcatattgattgagaatttgatcatttcatatgcaggaatggtctttcccttatatttaggatgtgggagtctggtgtatggtaagtcgtatgctgcatccaattcttctgttttcaaaggtggaaacataggattttgaacggcaaacagattccctacgggttgaatgatacgttgagcatgtattctattcgattcctcttcgatgtgtttgaagttctctgcatgtgctttcttgttacgtacacattcttcaaacgaatgtaatacaatatcatcgtcttttattcctcctggtatcctgtcttttcgcctaagaaatacagtttgaggaatatcgttgatttcttcgatttttcgtcctttctcaagctcctgacataataacagcgtgtttttttcgcccataccatatagcaaaatgtcggctccactatcacacaaaacaggcttcatgagtttgttttgccaataatcgtaatgggtaagacgtcgtagagaggcttcaattccacccaaagctacggggacatcaggataaatctcttttaaaatctttgtgtaaataacagaaggatagtcaggacgcatatcgtgtcgcgagtcaggactgtaagcatcgtcatgtctcatgcgcctgttagcggtgtaacggtttaccatgctgtccatattgccaggcgatactgcgaagaagagccgcggtttacctaattttttgaaatcgcgatagtcaccatgccagtcgggttgcggcacaattgcaacgcggtatccatgcgattctaagaaacgcccaatgacagcggctccgaaagctggatgatcaacataggcgtcaccggagaaaaggataacatctaattgctcccagccacggagattacattcttttttcgtagtcggaaggaaatcagtcagttgatattgctgcatttttatgttattccccttctatattatcgtcctctacattctgttgttgcttcttccaatcgatataaagaagcagaagttgatgaagtccgaatgccttcatattgttattataaatcacatcaagacaaagatcgagtaacgctttgtcttttccttcttctgattcaagtaaagaacgtatattcagttttagcttatcgagcacagtttcatcaataatgccgttgctatctacaaggtttcggagaagcgcatacttgtctaatgttttaagatgctgctctgttatttcgatatttcttgtaccagaatgattagtttgtattttcattgtagataaaatttaagtgtttaaaatgattttattttaatagatagttcagaataccttgcataatacgattacgtatgctattatcgttgatacattcgaaaggaaatcccatgacgaaagttttgctatctgacgaactgtttgcaacagctgcagaagttccattgctgtataccattgcgcagaaagcattatcagtgggagttaaaacatcagtgtgcattgctgcatagtgatcaggattaagatgtctgtaaaagtcgaaatttattcctaacccgtttattcctgcaatagaatctgtttttatttgcttagaataagaaacgtgaaatgttttagcaagccaggctgagtcctggctgcctaacatatctgacccgatataagcaccgcttaccaatattctccctttgttctgtaaatatgaagataacttttcttgcatagaattagtaaaggtcttataatatttaacagtataaggtgaatacctctctaatccaagaataagatctaccgcagaataattctctaatttaattttcccgttctcaatagcttctgaagaacagctgacaacattatattgtttttcggatattattgctgatgtatggcttttaatataattgaagtcattgcctgcgatgatttttcctgctaattcatttccgctatatcctaatccgttggccccttctatacctattttgtttttatcgaagttgatttgttgtccgttccaacctgaggttggtccatagctaacacccatatccgcattaaggtcgaacccctgttgagtattgttatctattatagcaggagctgataacctgtggaagccattaacaacaagaattgtttgtgttgcgatagggttataaaaggccgaaatagtttctgttggaaaactttctccacccttatttgcagcagaaactttaaagttatattgtaaacctggttgtagatcaattattgttgatgtgcctttaatttttactccattgtcaaaaccgacatttccaatagaagtatagagaatataataagatggttcagccgttggctcttgtccatcaatttgtttgttccaggagattatggctttatttttatttaattgcacagaaatatttgtaggagcaagcggtgaaatgattgtgggattgccgtgcatgtcattaacatatcgaacaattgtcttgtaaatagagcgtgctaatgtaaaacgaaagttgggatcctgtcctaaaatcatgtcagggaagttctgatgtgacaaggtttcgaggatggcagaaggtatttcgggcacccttgtctccgaatagtttctatcccataaatatcttttcgcccaatttttatatttgtaagtgatgtctcttgtaactccattaaggagcatatcggcaaaaaattttgagctttgacgtgttatcccggatgctaaacgtccatcattgaaatcggttgtacaaatagccaatgatcctatcaggcttttggcatcctttgcgtatccggcatcactatgaaccgcaagagaaagttcaagaggaacaccttttccctccctgtcaggaacatatacagaacctcccgccagccagttagtcattctagaacgcgcgttaatgtcatctgcataatcgtctgtaccatattgcctgctgtaaacattataaggtgctcctgcccattgggcataataacgcgaaccttctattgcacggggataaccactaatttgtcctcctctctcaatattccccatacctccaccaaatcttacagcgtctgctgtaaccattcctttcttatgactttggttagtgagcattacacaattgtctgtactacttcctgcatcaaaagtaaaggtacctaaataaacccatgtgccaccgcccattttttgatttacataaaattcagtagcctgtccttgatgaaatactgtataatgagcgtcgtctatactatttgataatgtttgatagctgatgtatacagcatatttaccagacttattaaagtaaggttgccattttataaaagctttgcttgctttttttgtcgtttttatttgacgggctaatcctgattgaaatgggttttcattgtcaacataattacctgtatgtgcagcgaagcccggctgtattgtattctgccatggcaatgattcataatgctcttgatagctgttaggcaaagtattaagtccaccatcagggtcaacaatatattctatttcttgccaatctcgctcacgtggtgtaaaaatattggcgccagccttctcgagcatgggaataaggaagggtactactatggtttgtgtgaacaggtcttctgttgttccgaacaaagcaggcctttgccaggcccactcgtttttgttgttattatagtatcttccgtgcgaagcccatacggcaatatgccgtccttccagaccgtgcgtgtaatttaccggtctggatacatttgtaacccatgggcgtccttcataatttattttcccccataaggcgttaccttcattatttcgttttatatatcctggtatgtaatattctatgggtagaccgttacatataattttaagtgcaaaatccttgaaataatcaggtaaccccttttttgttcgcttataaattttatttattatattgtcgttaatttcttgttgtgcaaagctcccatctatggtgattgtaattttttgcctgtctttatccgtcgttactttctttaagtacgagaaatggggtgttgatgttatatcgttaggtgaggaattagagaagtaagccttcacatctctttcaattagagattgtatattggacgtctgtgcatgtgtatgaagggatataacaataaaagaaagaaaccaaataagtattttgttcatttgctatcagttgccaactataaaattttcgggatttttccccttgaaatctttaaaataggtcttaatttccttcatttctgagtcaatattccctgtgggaataaaactcttcgtacactgaatgagctttcgttcgtaatctaaaccgtaaagaagaattggtatttttgctttcaatgcaatgtaataaaatccctttttccactctgcattgggtgagcgtgttccctccggggtgatacatatcttaaatgagttgcgagcttctgcctcatgtgccatcgcatctgtcatgctggtatgcttagatctgtttacagggataccacccatacgacgaaaaagggaacctaatggccagaagaaccattcttttttcattaaaaagtttattttcataccttgcgaacgcatataaagctgccccagtataaaatcccaattacttgtgtgaggtgctaaagctatgacaaatttatcggggtgttcaacagccacattcagcttccatcccaattttttgaacagaagccaattacaaaattgtctaaccatgacttaaatgcttaccctaatgtttttatttgttctataatttctaatacatgtgtgttgaattctttaataatttcgctataatatttctgtggactcatgcctggctcaggatgagaaatacgtttaatatagtcgtcacgtaatacgataattgaggcaagggtctgatcaactgcatccttatttttgttggatccatataatgaggcagcaacagtttctgcaaataagtcattacatacataatttattgcacgttttaagtctcttttctttgccataaaaaaatatcttttagttagaaaacactgttacagcttcaaagataaataaaaaaaaggaattgtaaaacggaggtggcaaaaaatgttttaaaaatggcttttctttgtttttcgtttcttcatttcgcctaaatcgcgtacttttgcacgaaaatatatatagaactaaacagaaacaacaagaaacatgaaaaaaagtcttttgcagcaagctcgtgcgctgtatcaacctaagcttcccaagggccttcagggtgcgataatggttaaggaaggtgaaccaacacaaagcgtaggcgatcaggaagaaatcaaaaagctattccctaacacttatggaatgcctctaatagaatttgttccaggtactgaagaggcaaagaatgagattaatgtaggcgttattctttcgggcggacaagcgccaggtggacacaatgtcatcagcggcattttcgatgcagttaagaaaatgaacgcaaataacaaggtttatggtttccttatggggcctggcggtctggttgatcacaactatatggagcttacaaaagaagtaatagatgattatcgcaacacaggcggcttcgatttaataggttccggtcgtaccaaacttgaaaaagaagatcagtttgagaaaggacttcagataattcgtcagttaaatattaaggctattattattattggtggtgacgattcaaataccaacgcatgtgtattggctgaatattatgcagcaaaacaatatggagtgcaggtaattggctgcccaaagacaattgacggtgacctgaaaaacgatcaaattgagacatcctttggctttgatacggcaacaaaagtttattcagaagttattggaaatatcgagcgtgacgccaattcagcacgcaaatactggcactttataaaacttatggggcgctcagcttctcatattgctttggaatgtgcattgcaaacacagccaaatatatgtctgatttcagaggagattgagaagaaagacatgacgctgaatcagattgtagagcagattgccagggccgttgctaaacgagctgaggacggtaacaactttggcgtagttctgatacctgagggtttaattgagtttattccggcaattggccgtcttattgacgaactcaatgaccttcttgctgctcatggtgccgattataaggacctagacgaggagaatcagcgcaagtatatattggctcatctcagcaaagaaaatgccgatacgttctcaacgcttcccgaaggtgttgcacgccagttgtcgcttgaccgcgatcctcacggaaatgtacaggtatcgttgatagaaaccgaaaaacttatttcggatatggtagctgcaaagctcaatgaatggaaagaaaatggcaagtttgctggtcattttgcagcacaacatcatttctttggatatgaaggacgctgcgcagcaccgtcaaattttgatgccgactattgctatgcgctgggtacaagtgctgcaaaccttattgcaaatggcaagacgggttacatgtcgatagttaaaaacttgtctgctcccactgacgaatggcgtgcaggaggtgtgccaatcaccatgatgatgaacatggagcgtcgtaacggcgaaatgaagcctgttattcgcaaggcgcttgttgagcttgacggagcaccatttaaggagtttgctgcccaccgtgagcaatgggctaatgagacttgctacatttatccggggccaattcagtattggggtccttcggaaatttgtgatcgggagacaatgacccttgctcttgagaatgcttccaaaaaataactgatataaaatattgtattttgacaggagggatagcatggtctttacgagtctgctatccctttttgttcgtttttaagcctcattatttgttataatgtttgccaatgagtagcaaacggccatcatattctcaccggtcgtcttcttcaaaacgaagaagatatggttcacgtcgtcaacggactattctgccggctattccttttttttcaagaaaggggaaaaaagtatggctgttaggtgcactggctgtcattataatttatatttgggctttctatttcttctttgtaggccctactggttttcggtggcgtgcgctttacgggcctcccagttatcctgaaggttatgagatacatggtattgatatttcacattttcagggcaaaatagattgggatcgcctccatgccaatgccacgattgacggtagtcccgtacggtttattatagttaaggctaccgaaggtgcttcaaaggttgatgcaaactttaatgataacttctcgcagatacgcgaatatggctttattcgtggtgcataccatttctggagcaataagtcttcggcaagggaacaggcctacttctttttgaaaaaggttcatctcgaaaatggagacctgcctcctgtccttgatattgagcatgcaccttccgaccttagtatcgctgattttcaaacaaatgtattgacctggcttcacattgttgaagacaagtatcatgttaagcctattatctatacctattataagtttaagcagaaataccttagtgcgccggtcttcgacgattatccttattggatagcccattactatgttgataaggtagagtataagggcaaatggaaattctggcaacatacagatcggggagtgctgccgggtattaaaggcaatgtcgactttaatatttataatgggtcatattacgatctcctccatcttacgataggagagcaggaacaggtagaagtttctgaatagtttctgttttgtttttatgttcataaacatgggcgtagccttgtttaccaggctgcgttgtatttggtttgcctttgttaacggctgcagttccttttgttttatatcctgcataatggtttaattgcgggatagttacaccgtattgatgagatagttattattatatggtgtaacttgatggatgtattactcatcattcgacggcgtcatacacattgttcgacgatcgccgtacgcgttgctgacggccgccgaacaacgaccaccatgttgaaatggtgttaatatatggctataaaaaacataacaatatggtggaattgaagaggcattaaataaataaagggatgtgacagagcttaactccaacacacccccaacaggtctttcgaccttcggcatatagccttattgcggtaagatgtagatttcttacgttgcaaatatatataaattattttgatgacaaaaatatttttattatttttacgcaaaaattactactaaacgatgaaaaaacgaattttaggacttgatactggcaccaacagcttaggttgggcagtagttgactgtgatgagtatagtaattacgaactcgtaaaatatggcgacctgatatttcaggaaggcgttaaaattgagaagggaatagagtcgtcaaaggcttcagaacgaacggggcaccgctctttacggaagcaatatttcaggcgcaggttgcgtaaaatcgaagttctgaaggttctggttaagcatggattatgtccttatctgagcgaagaacagctgcataactggcatgtacgaaaggtttatcccaaaacagacgacttcatgctatggcagcgtacaaacgataatgaagataagaatccctattactatcgccatttaagtctgcatactaaatttaaccttgaccgtcaggacgaaaggttcatgcttggacgggcactttatcacctggcacagcgcagaggttttcttagtaaccgccttgacagtactcctgaaaacgataatggcaaggtgcatacaggcatttccaatctttctcatgaaatggagttggctggttgtgagtatcttggcgactacttttatcaaatttattcagccccagacaaccatgagcgtatccgtacacgctataccgatcgggaggaacactataaaaaggaatttcaggccatttgtgagatgcaacaattatcgcctgagatggttagggaattggagaaagcactttactttcagcgtcagttgaagtcgcaacgacaaggggttggcaagtgcacttttgaaccgagatgtccccgttgtgccgattcgcatcccgattttgaggagtttcgtatgctttgtctgctgaacagtattaagattcaaacgccatacgacctcgaattaagacctctgaatgaggaagaaaaggaaaagatagtttctttattctatcgtacaagtaagtccaattttgactttgaagacattgcaaaggcgctggcaggaaaagggaaatataagtattataaggacgaaggggacaaaccgtataagtttaactaccgtatgacgcagggtgtagcggcttgtgcaacaacgggtaaactacgaaaaatatttggtgaaaactggaaggaggctattgcagagacttacaggcttaacaatacacgtaaaggccagaaaacggtggcgcaaatggtagacgatgtatggaatgttctgtctacttttgagtcggaagacaaactgaaacactgggcacaactgaatcttcaactcgatgaagaccagagcaaaaggttcgcagccataaatctttcgcacggtttcgcctcgcttagccttaaggctatacacaagattctgcctttcctccgtcagggctatatctattctcatgccgtgatactggccaatataccagcgatagtgggcgaggaagtatggaatgatgctgacaaacggagctttatattaaatcatgtactcacctatctccaatctgaagaccagactaccaaagatttctgtattaaagacttcttgttaaataactacaatctgaagccgggagcagccgataagctttatcatccgtcaatgatagaaacctatcaggacgcaaaacaacaaggagacgtttaccaacttggttcaccgcgaaccaatgccatacgtaacccgatggccatgcggtcgcttcatgaagtaagaaaggttgtaaaccagttgttgaaagagaagataatcgaccagaatacagaggtacatgtagaatatgcccgtggtttgaacgatgcaaacatgcgtaaggccattgccgattaccagcgggcacaggataagaagcataagacggatgctgattccattaaggacctgtacttccgcgagacgggaaacaacattgaacctaccgaaacggacattaaaaaatttgagctttgggaggagcagagccacaaatgtttgtatactggtgccgaaatcggtatagctgacttcttgggcgacaatccgaaatacgacatagagcatactattccgcgaagtgcaggtggtgacagtatgatggaaaatcttacactttgtgacagcaattttaaccgaaatgtgaagaaaactcagctgcctgcacagttggctaactatgaagaaattcttacgaggattgaaggctggaagaaacgttatgaaacgcttaccagtcaaatggataagtgtcgtacattttctggcatggcaaaggatataaaggattccgttattcaaaaaaggcataaacttaaaatggagcgcgactattggaaaggaaaatatgaacgctttacgatgactgaagtgcccgatggattcagtcgtcgtcagggagctggtattgggttagtgtcgaagtatgcagggctttatctgaagtcgttattccacgatccgcatgaccgtagcaagtcgagagtgtttactgtcaagggaactactacggcagaattccgtagaatgtgggggttacaaaatgaatatgaaaagaagtcgcgcgacaaccattgccatcactgtatagatgccatcaccattgcatgtataggaaagcagcaatatgaggcggtggccaaattttatcgtgacgaagcactttacgatgacggcagaggaaagaagcctcagtttagaaagccgtggtcaacgttcacggaagacgttcttaatttggagaaaagtatgatcattgttcatgatactcctaataatatgcctaaaaaagcgcgaaaatatgttaggacagctaacggtaaatttcttgcaaaaggagactgtgcacgtggcagtttgcataaagaaacatattatggtgcaattgaacgtgatggaaaaatagagtatgtagtaaggaaagcgcttgcttcttttgaaaaagagacagaactcgataatatagttgatgatacggtaagagagattgttcgcgaagctgtacgcgggaaaacctttaaagaggcaatcgctcaacctatctatatgaattaaggagaaagggattcttattcagaaggtgaggtgttttgctcaaggaataacgagatcgctaaatataaggcagcaacgcgacatatcattaaaagaatataagcaaacctttcatgtagctaatgatactaattattgtatggccatttatgaaggcttggtaaaaaataaaataaaaagagattttgaattagttaagacacttgatgctgttacgtactttaaagatagtacttgtaaagtagaattcccaaccttagtgccttcaaagacgaatgctgaattgccactgaagtcaataataaaaataggcacaatggttctgctatatgaaaacacccctgcagaaatagattttgctgataaaaaagatttggcacggagattatataaggttgtgggactttcttctatgtctattagtgggtatacatatggagtaatgtcacttcgatatcatcaagaggctcgtcaaacaaaagagcttaaatctaaaaatggaaggtacagaaatggagaacaatatcgccctcttatggtactattacatactcaatttagcgctttagttgaaggatttgattttcatattaatgtacttggagagattgatttaataaatagttaagatgatgttaaagcggagccttgtcttttcatcaccagcaggtctgtcattaaaagacaggcagctggttgtagttttgaaagaaactcccgatgaaaaacttactgttcccattgaggatataggcattgttatgattgacaatcagatggtttcgataacaattccgttgttaaactatcttgctgacaataacgttatggttattatctgtaattctaaaggtatgccttcttctacattgctaagttttgatactaaccattatcagggagagatattgcaaactcaaatggaaatatctgaaccattaaagaaaggactttggaaacagattgttgaatcgaagattaaaaatcaggcgatgctgcttaataagctgggtaaaaatggagacaggcttaaaccttattataataatgtaaaatcgggtgatacagataatcgggaaggcattgctgccagaatatatttccaggaacttttcggagtaaaatttgttagagatcgcaatcaggacggaatcaatgcccttttaaattatggatataccatactgagagctgctacggcacgtgctgtatcaggatcaggtcttttcattggtataggtcttcatcaccataacagaagtaatgcctttccattggccgacgatataatggaaccttatcgtccatatgttgatgaggctgtgtatcaattagtattaaatggctgtctggaatttacgaaaaatgttaaggctaagctaatcagtgtgttatatacagacgtgtttttcaagaaaacatcgaggccgttgggaataggtcttacttttacagcgtcttctttggtgcggtgtttaaagaaagatgataagatactttcattaccattgctacaatgagtttcaatcgtttaaacgcctatcatattatgtggctctttgtgatgttcgacctgcctacgcaaacgaagaaggataagcacctttctgctctctttcgaaagaatttagagaaggacggatttatgatgttccaattcagtatttacgcaaggttctgtggatcacttgagagtgcaaaggttcatattaaaagagtgaaagcacttgttcctgaaaaaggtatggtaagcatcctgcaagtaacagacaaacaatattcaaatatcatcaatatttggggtaaaatagaggaaaaaaggcgtcaaagtcctatacaattggagtttttttaagatagttgcaacataaaagcaacttcactttgcttctattacatccgtttatttgtttatcctattgatatacagtaatatatgatgtatacgttgcggtttgatgtagaaactttaattattgcaaccgacacggagtttatcaccacacgagcagatgttgcggtttgatgtagaaactttaattattgcaactttagcaaaatttcttgcaacaacatcaggttgcggtttgatgtagaaactttaattattgcaacaggacattactccgatattttcggacagaggttgcggtttgatgtagaaactttaattattgcaaccgtccgtaccgccctcactttcgtccggctgttgcggtttgatgtagaaactttaattattgcaacaggcgatatccgaagggtttgctccataagttgcggtttgatgtagaaactttaattattgcaacgacaaggtatttgcctgcatgtgtcttccgttgcggtttgatgtagaaactttaattattgcaactttgtcacaaactccctttataccctcaaaggttgcggtttgatgtagaaactttaattattgcaacagctacctcctgcatacttatcccatattcgttgcggtttgatgtagaaactttaattattgcaacttggagtacatgaagtaacagataatagtggttgcggtttgatgtagaaactttaattattgcaaccaattcgtgaattgatatatgctcgccgttgttgcggtttgatgtagaaactttaattattgcaacaagaaagcagtcaaggagagtcttcacaaggttgcggtttgatgtagaaactttaattattgcaacgcttaggtggctctggcttcttcctaatctgttgcggtttgatgtagaaactttaattattgcaacctttcaaggaaacttatatgaatagatacagttgcggtttgatgtagaaactttaattattgcaactgctcaccatacacagcgtcccaccacaggttgcggtttgatgtagaaactttaattattgcaaccttagctaacattggcaaagtagatttactgttgcggtttgatgtagaaactttaattattgcaacttgtattgttccagagaatttctttgtgtagttgcggtttgatgtagaaactttaattattgcaacttttaagcactaaaccgacttgttggctatgttgcggtttgatgtagaaactttaattattgcaactccaaacaaaacacggtcctttacgtggatgttgcggtttgatgtagaaactttaattattgcaactcccacttcaaatcaggaatatcatccaagttgcggtttgatgtagaaactttaattattgcaaccgtatacggtgaagctgccaaagacggtagttgcggtttgatgtagaaactttaattattgcaacatcgctttaaatatttcaaaagccacctgtgttgcggtttgatgtagaaactttaattattgcaacgtagatggaatgataacataccgaacatatgttgcggtttgatgtagaaactttaattattgcaacacaaagttctggtagtcgttcagttgtaccgttgcggtttgatgtagaaactttaattattgcaacagacttgtagtctataacatcaaacatccagttgcggtttgatgtagaaactttaattattgcaactcccgcatcgtaggtgtactctctaattgggttgcggtttgatgtagaaactttaattattgcaactgcgacctcaagcgctcaacctgtcgtaacgttgcggtttgatgtagaaactttaattattgcaactaggaatttcgtaacgatttaaagcggtcagttgcggtttgatgtagaaactttaattattgcaacaggtatagttggctgttctttgaaaccatgttgtgataattaaagtttgcatttacagtaattaatatttttattaattgcgacaatgaacaggtattactatttatggaaaggagttataacgatgcttaataatagaatttggaattatattctatgtgcaactaacaaatacaagaagatatggacaagttaatgagattccgtgaaagggatttttcctatgatgtctgagctaaaagttaaaatattgataagttaatgggattgcgtggaagggtatttcctcatagtgtttaagttaaaagttaaaatatagacaggctaaagtactgttgggaaggttgccgatacaattcgtttattttaactaatcagtataatattagttatttccatattgtataagcctcatatatgctatcatacaatgatgctcaatactctgccaatcagttgttttattgtgcacgcatgattattaccggttgttatcctgatgttttggcagttaagatatatctttttcaggtgttggttatatataaattttcgtcagattttgtttattcattttggcataataaatcttagaaaacagtattcttgttcctttgttgataagatataaacgggatttaaaagtgagagaacaagaaatatgtttgtaaactattttcttctctctctattgtgcccttgatgggaaaagacgttaaatgtggtcataaaccaattattttgcgtacctttgcagagataaacgagatggctttatctttaaagctgtcttttgtctaacggagttcatacagcatataactgtttctcataaagctgttgggaaatgagatatttcccagactccagaaaacaattattatggagaaaatattaaaagatttatttttaaaaaagttattattttcattctttttagtactgttgacgacgaatgcagcgagtgcatccgattatcctacatcaaataccactgtaaactgggagcctgtcatatcagctattatacaggttgagagtggaggaaacccgaaagcggtgtgtggaaactccgtaggagcaatgcaaattacaccaattcttgttgcagaatgcaataatatccttaagattcgtaaaagcaagaaaaggtataagttggctgaccgacttagcattcagaagtcgaaggaaatgtttttacttattcagtcaaagtataatcctttaaatagtattgagcatgcaatacgttcgtggaatggtggcatgcattatagtaaaaagaaaacgcaacattatttcaataaagtgatgaactttttgaagtagaaccctgaaaggagcctgtctttatatgacaacgctccttttattttgcctgttttatcaatatttaagcatgtaattgtatggcgatggcatggtaatgttgattgtgtggcggcc

SEQ ID NO: 1660 - DNA, 17619 bp, synthetic construct
  variation 9035..9134: note = n is a, c, g, or t
  variation 9356..9455: note = n is a, c, g, or t
  source 1..17619: mol_type = other DNA
  misc_feature 1..17619: note = Synthetic
taaatgctttttttatcccgaactcgcgtatatgagaaagaataaaatcataaatggattttgctacttttatgtaaagaataacactatatataaataattatttaagtatatgccctcaagattttactataacaaagagcaaaaggaaatgattattaaagaactgaaagcgggagagaatatcaaaagtctcgctaagaagttttgtattccctgtgtaattattgaaaattggcaacggcagaacgaattagatggaatactggatatttcttatactcaaagcaacacactgaaaaaggataatttatatgcaactattcgctccaggataagttctgtataccaaacatctttcaaaaataagaagtctacagtagttctagtgacaggactactttttacgattgcaatagttgtcttattctacgataccgcagaatttaagtctcaatctaaaacggatcatctcttaggacccaagatagactctctcatccaaaagggtattaatattgagggtaaaataaacgagcagaatcaatttcttatacaacagcatgcctcattcgttaccaactgtaaagcacatatccccacaacatccaaaggagatcagccaaaaggtatacggaatcagagaaagtatgttaagtccacagataaaaacgatcgctgctgtacatgtcataaagatacaatttaatagttatgtttgatttctataataattcgtacacttttattactgggttatttaccgtcattttcggtatggctttcccacttattctacaatgtattcaaagaattgatgaaaagtataattcgtctgttatatcacaggaatttgagaatgaggtttcatttaagctaattaaatggttgctttacccatacctctttattgtttgtttatctccattgattttgggctatgtaaatgctaaaaccaatctatcctatatcatccattgttttatgctaatttatatcttggtaatagcagtgctaatgatattgttgtttaacaaaataatggtttattacaatttaaattatttggtagaaagtttacagataaaaaatccttcaagaaaggttcttgtatcatttgatttagcaagatatgcatctcgaaaaggctatcaagatacatacataaaagcaatggccaaaatagcagagtgcattatgctagagcaaagaaatactgaagaaggaagagaagtgatttactctgaaaatgtgagacgtgtactagtggaaatcggaaaaacaataggtgattttaaaagtgaagagtatggctataaattcgatgaattaattgatgttatatatgataaaagtaacaaaacttatttgtcagattcgacatacaaattactatggtttatgttgaataatgcagcgatgagaggtgataatgggtggataaaaaactattggacatggacaacacagtattatagctacatatctatgagagcgcagaataaacagacagaggatttttataagtttaatgtcatgcttggtgccttactcgttttcaacaaaagatacgaatgcttgtatcatattatgacttttacccaaagccaaccagcaaaattccctttaatcccagatacgcttggtaaaattttatcgtgtgcagggcaatttgaatcaatgcttgacaaaccactagaagtatatggtaaatatacaatacaaggattagatcatggaattaataatgatgatgctattatctcagaggcttataaatatcttgcactacttattattcgtatatggtcatataaagactataactatacatatagtaatcctcttactataccgcaagcagattattataatgctgatataaatgagaaacgaatatttattttagaaaggttaaaaaaatatactattgaatggctagactctgatgtattcacatatattcgtcttaataacattcctgcgattgatgatgttaaaaagatacttgacgattgtgcgaatgaatgtaagaagatgaatcaagaaatagatggaagaaaaggctacgatgatcagaaactaaagcacataactgatgaagcaataagagtaaactatgaaaactatataacaataccaagccaaacagacttaccccccaaggaatctttatgcattgataaatttatacaagcatgcaatagtgttgaaaggaggttcttacaaaaaggaagagctgtggagtgtggaggaattggaaattttctagcagaggacttatatctcaaatacaaacaagtatacatagagattgtcagacaatcatttaatatgtcgactaagaacattaatcgaaataaacttcaagaatatttagatagattatctctgacacaagagcatgtgattataaaattgacaagtggtttaaaaatatcaacgggtgcattagaatacgatttaggaagattgtactgtgatgagtttataatcatctgtgaaaaaaaatatttaccatccttggactttatcgaaattcaggagcaaagaaattttcaaataatagatgaatacaattatctatatttctgtgttgaagaacatccggatatattcatgttatatttaggtcagacgatgagggttataagagataaagaaaaaagaacagcaagaatgattaagataacataactgttctaccatacaaaagatacaataccattcttgaaactttatagatttcaatgacaacatccaagatgtttgctaatcaatactactcaaattgaggaaacatttttgtaccacacaaatgtaagtcattgataatcagcgtaggatatatttgaggaagtgaaataatctctcaggaaatgtaacgatagaatataaaaaactataagtgaatggcagcaatgtaatagagatattatgttgctgctattttcgtattataaattaagaatgtatagactatcaaattattattatagtcttaattatgtgtgcaactattatgaaatatacgctatatattttgacacccaaagcatgctatagatgaaagtgctatgtatattcaaaatcgaattacgaagaacttgataaagtatagctgggtgcggatgaggaaaagagacaacagaaacataatttcttcaaccaatgatattatatcaaatactatgagggtgctgttttagtctgtgcctgtaatatccaaaaacaaaaagttagatctaaagttttgatacgaattacatgatgacagaatcaggaaaggattgcttatttatcatagataaaaatgttcgaagcagcttggtccttacgtccgccgtcttaattctcaactcgccatctcgtggtcaagtcttgtcatacggttggatagtggtgtccttgctgcctcttcggattaatactaacacccgctggttaattcaggcttaacggtattcctatcatccgcgagaatgttccgctcgattatgccggctgttagtacttcactacaaagataaataattattctatacattgcgtcaaaaaacaaatatttttcgataatgacattaaaagaattggaatggtagagtcaactagcaaatacaaaattagcatagttaactctactccaaccaaaaggactggaactaaaggtatattggcgtatattaaatagaaatatattggacaattagttaggattcaggttagtagcacttaggtataaatataaaaaagaggaaatgatttgctcatctttcctccatatatgagaatcaaaaaaaagcccctccgaagaggagctacaggaaaatatccttcggcatatagccttattgtgataagatgtagaaatctttctgttgcaaatatagattatttattttgaagttacaaatattttgtataattttattgcattaatttaataaaacatgaaaaagcgcatattaggattggattccggtaccaatagcctaggttgggctgtggttgatagagatgagaacaatcaatattcactaattaaatatggtgatctgattttcgaagagggagtaaaaatcgagaaaggtgttgaatcatcaaaagctgcagagaggaccagccaccgagctctgcgaaagctatactttagacggagactacgtaagatagaagtattaaaagttctagtgaaatataacttatgtcctcaagtctctgaagaagaactacatttatggcatacgcgaaaactatatccccaaaacaaagatttattacaatggcaacgtactgacgaaaaggcggggaagaacccttacatatacaggtatcgctgtttacatgaagagcttgacatgtcagtatctgcaaatcgcatgactgtaggtagagccatgtatcatcttgcacaacgaagaggctttttaagtaataggttagataatgaagaagatgaaaatcaaataggtgctgtaaaatgcggtatttctaatttaacagaagaaatacaatcttcaggatgtaagtatttaggagagtacttctataaactttataatgaacatggcaatacggtgagacttaggactagatatacaagtcgtgaatttcactataaaaaagaattttatgcaatatgcgaaaaacaaaagctagataaaaaactaatcgaagaattagcaagcgcgttgtattttcagcgtccgctgaaatcacaacgccatactgttggaagatgtacattcgagcctaataaaccaagatgtgcagattctcatcctgcatatgaagaattccgtatgctgagttttataaatacaattaaggtgcaagggccttatgatacagaacttcgtgtactaaatacagaggaacgagactccattactaaattgttttgcagaaaatctaaacccaactttgactttgaggatattgccaaagaactagcgggcagaaataactattgctatataggcgatgttgttgataaagcttataagtttaattatcggatgtcacaaggtgtttcaggatgcccaacgacgacttacttgataaacgtatttggtcaagactggcaaacgggtatagcagaatcatatcaagccattgacacaaaattgggacagaagtctgtagatgcaatgattgatgatgtttggaatgtattgtactcattctcatcaaaagataaattacgagactttggacgtaaaaaattacaattaggagataaagaagcagacacttttgcaaatatcaaattgactcataagtttgcatcgcttagtttaaaagctattcgtaagataaatatatttttgcgtatgggtctagtctattcccatgcagtaaccttagctaatattcctactatagtaggaactgatatatggcaaagaaaacgtaattttatattggctgaacttctacctctcatagaaaattttaatcccaaggagacaaaattacaagaaactctggatttctgtgtgaaagactttctacaaaataattttgaattaaaaaatggagctgtagataagctctatcatccttcgatgatagaggcctatccggatgcaggattgaatagcaacggtatattacaactcggttcaccacgtactaacgccatacggaatcctatggctatgcgttcactacatgagataagaaaggttataaaccagttattgaaagataaaatcataaatcaagatacagaaatacatgtcgaatacgctcgcgaactaaatgatgcaaacaaacgaaaagcaatatctatttggcagaaatcacaagagaaattacataagaaatatgtagaggagataacaaatctatacaaggaagaaaccggaaaagcaatagtaccaacagatacagatattctgaaattcaaattatgggaagaacaaaatcatatttgtttgtacacaggacagcaaataggcattgctgaatttcttggagctacccccaaatatgatatagaacatactataccacagagtgtgggtggagatagtactgacatgaatctgacattatgtgacagcagattcaatcgcgagattaaaaaagctcaattaccaacacaactgggtaatcacgcagacatattagtacgaatagctggttggaaaaacagctacgagaaattatccaaagacatagatcgtattcgtactcattccggaatggctaaagacataaaagacaggctaattcaaaaaaggcacttattaaaattagaacgtgactactggcgtgggaaatatgaacgattcacaatgaatgagattccagagggattcagtcgcaggcagggtgtaggtattggactcatttctaaatatgcgggactatatttaaaatcattattccatgataagaatgaacgtaacaaaggtcatgtatttgttgtaaaagggactacaactgctgaatttaggaaaatgtggggattgcaaaatgagtatgagaagaaatcacgcaataaccatgtacatcattgcatcgatgctattacaatagcctgcatcggcaaacatgaatatgctcaaatggcacaatactatcacgacgaagctgaatatctatatcatcacggaataaagcccatattccccaaaccatggaagacattcacggaagacttattagatttggagcatagcttattcgtagtacaccatagcccaaacaatatggctaaacaggcacgaaagagaattataacatctacaggacaacattgggcacaaggagattctgctcacggaagtctacacaatgatacatattatggagccattgaacgagatggcgaaatcaaatatgtagtaagaagagctgtatcatcctttgagcaaatgagcgatgttgatagtatcgtcgatgatgttgttaaagagacagtacggaaagcattagagggaaagaattttaaggaagctgtcaatgctcctatttatatgaataaagaaaaaggtgtattgattaagaaagttaggtgctatgcaaaatctatcaagaagcctatagatattcgtacacatcgcgatagttctagtaaagagtacaaacggaaattccatgtatctaatgacattaattacctgattgccatctatgaaggaactgtaaaaggaaaggttaagcgagatttcgaagtcgtaaagaatattgaagctgctaatttctttaaacgtagccaagatagaagagattatcctaccatcgtacccgaaaagagtattaaacatggcttcccattgaaaacaacattaacaaatgggacaatggttattctgtacgaagagaacaaagaagaaatagatttcacaaaaaaagaagatatttgtcggaggttatacaaacttgtaggaatgagctccatgattgtatctggttgtgaatatggcgtcttatcattgagacatcatcaagaagcacgaccttctaaggatataaaatcaaaaaatggagcttttaagaatggtgaagctcttcgtccagcaattactatgcttcacacccaatttaatgctttggtagaaaacatagacttcaatattgatgtaacgggaaatatagaattaatataacgcataatatgctgaaacgtagtttggtttttacatctcctgccatgctttctatgaaagatagacagttagttatttctttgaaggaacaccctgatgagctacatactgttcctatagaagatttagggtttataatggtagaacatccacaagtgatattgaccgtaccactaatgaattttttatcagaaaacaacgtatcattagtcttttgtaatagtaaaggtatgccatgttcaatgctattaaacttagatacaaatacaacacaaggagaaaccatacgaaaccaaatgaatgctggagaggtcttgaaaaagaatgtttggaaacagattgtagaagcaaagatccgtaatcaatcgttactattaaataaagtcggcaaacgaggtgagctactaaaacctttgtttatgaacgtaaaatctggcgatgccgataatagagaagggattgctgcaaaagtttattggtcagaattatttggcaaggactttctacgcgatagaaatatgcccagtattaacagtctattaaattatggatatactatactgcgatcggctgtagcccgctccttgatgtcatcaggcttattcccagcgattggactctttcatagaaatcgaaacaatgcttttccattagctgatgatctgatggaaccatatcgtccctttgttgatgaaatagtttataatctctattgtgaaggaaaagaggagttgaataaagaaaccaaagcagaactaattagactattatactatgatacttattttaagaaagtaacacgtccgctttcagttggtctctctttgacaatggcatcattggtaagatgttatgccaaaacaagtaataaattgatattaccagaaataagatgagtgaaatccgactaaattgttatcatattatgtggttgtttgtgatgtttgatctaccaactttaacagctaaagaacgtaaaaatcatactcgattcaggaaagaacttgagaaagatggatttaccatgtatcagtatagtgtgtatattcgatattgtggttctcttgaaagcgcaaatgtacatatcaaacgtgtaaaaacattcacgccaacacaaggtcatgttagtattttgactatcacggatagacaatatgccagaattatcaatatttggggagaaattaaaacaaaaacagagaaagctcctatgcaattggaatttttttagtatttttgctatatctacataagagacgaccacttcatatactctaatcctatcatatctcattgatttataaggatataagacatatacgttgtggtttgatgtagaataaagatataagacaacaatatggtacgcaccaatcacagtcacgagttgtggtttgatgtagaataaagatatannnnnnnnnnnnnnnnnnnnnnnnnnnnnnnnnnnnnnnnnnnnnnnnnnnnnnnnnnnnnnnnnnnnnnnnnnnnnnnnnnnnnnnnnnnnnnnnnnnnggtttgatgtagaataaagatataagacaacttaagattatactttttagtaagcaaatctgttgtggtttgatgtagaataaagatataagacaactgcaattgtaaatttataaataatcatgtgttgtggtttgatgtagaataaagatataagacaactaggttggtcgttctcatcaagagcaggagttgtggtttgatgtagaataaagatataannnnnnnnnnnnnnnnnnnnnnnnnnnnnnnnnnnnnnnnnnnnnnnnnnnnnnnnnnnnnnnnnnnnnnnnnnnnnnnnnnnnnnnnnnnnnnnnnnnnggtttgatgtagaataaagatataagacaaccgtattcacggaagaggaatacattacacgttgtggtttgatgtagaataaagatataagacaactaggttgtttgaacgaagaagtatcctgttgttgtggtttgatgtagaataaagatataagacaactaaaggcgagattaatcaaactagtagtgagttgtggtttgatgtagaataaagatataagacaacactcgaacccgaatgcctgcctattaggtagttgtggtttgatgtagaataaagatataagacaacggacttggtgcgggcgttacgaccttgaagttgtggtttgatgtagaataaagatataagacaacgaaacaggctgattaatgcgcctgttttcctcttaaaaagaattatgtcacttacggctctgttgatgaagagagtggcagatattgtgtagagctggaattttacagccttcacgatggcgaccagattgtttcactctggttcgacaaagaaaaccctaacgaaacatttgctgaagcattgagcgattattatgaagactttgatgtggatgagtatgtgggtatgtggctcgacgctaaaaaagaacgtccttctgtgtgcaacttgtcagcacgtcagttagtagaagatggtgaagatgtggataagtttcttggaaagttgagcgatgaaatagacaaaagccttcgcaacgtaccaactgaaacagccgttaagcgtcttctgtttgcaatacagcgcggtgtggtgaatgctactcgcataatgcaaagaggctctttctggtgcgatagatgcactgttatgccagtcttttgttcttatggtcaaattggatatactttcaatttcgactggtgcgaccagacaatagaatgggattacgaattagggaaagtaacactaaacggtgttcaacgataaaacaaagatataatgaaaacatcaaataaattacattccttcctgctcagtcagcaggaagggcaaacactcctcactgcaaaggattatccctggagtgtattgcaggtgataccgaccactcctgataagttcaaccaggtagtggaaaagctcaaggagcgcggcatggtagccactcacgacaccgatcgcacattttgtatcatacacctcgcttcgggcgaccatgacggccaacatccagagcgacacatcaatgtcactcagagtaactatgagcagataatagaggatctgaaggacgtgatggctcaggctgctgtgtggtataaaacgaatgtattatagaccattcaaagaataggaatttatggaacatgatatgatattaatacgagaactttacgacttaatttgtaaaagtcagtacaaaagtgtgttacttttcactgaggtgaaatcttactaaagttttttaccttacaagaaattccaaagcgtaaatccgagttgtggtttgatgtagaataaagatataaaagaacgaggatacaaaacaattatttcacattaattttgtcgataatatacgagtttaacgctaactatataccctttatcccttattttcattacctttgtagctgaaatactgcactcgacaatttgaaaaaaggttttcattgtgttcgtgtgcaccatatttccgccaataaacaacaactaaacacatttaactatggaagtaggaaataaggcacccgaagtattgggacgcgacgaaaaaggtaacgagattaaattgagcgacttcaaaggacaaaagctggtattatatttctatccaaaggacagtacatcgggttgcactacagaggcttgcaatctacgcgacaactactccgaacttcgcaaagctggctatgcagtcgtaggtgtaagcgttcaggatgagaagtctcaccagaaattcatcgataaaaatgagttgcccttcccactcatcgcagataccgagaagacattgaatgaagctttcggcgtatggggtgagaagagcatgtatggtcgtaaatattttggtacattccgtaccacctttatcatcaacgaagagggaatcgtagaacgtatcttcactcccaaagaaatcaaggtaaaggaacacgccaagcaaatacttgggtaaacgtttacccccatctctctactcaagatacgagagtaacgattattaataatataccaccaatcaataactccgctctaccctctttctttcatatcaagagatagagagcggcctctttttatgcaattatcatcatcaaggagcagtatgctccacggagtgctactgataacactcttcgcttgcgccgcattctacatcggcgacatgtcattcgtcaagcagatttcattcagtccgatgattgtcggtatcattttaggtatgctctatgccaacagtctccgcaataatctgcccgaaacatgggttcccggtatcgctttctgttctaaacgaatcctccgtatcggtatcatcctttacggtttccgactcacttttcaggatgttacagccgtaggattacctgccatcgccatcgatgccatcatggtgacggtcacggtatgcggtggtatactcatcggacgactgctccacatggaccgaggcatcgctttgctcacatcggttggcagtggtatctgtggagccgccgctgtattaggtgccgagtcggccattaaaatcaaaccatataagacggctgtggccgttgccacggtcgttatcttcggcacactctccatgttcctctatcctatattgtatcgtagcggcatatttgagttatctcctgaggccatgggtatttttgccggttcttccattcacgaagttgcacacgtcgttggtgccggcaatgccatgggtaaagaagtttccgacgtagccatcatcgtcaaaatgatccgtgtcatgatgcttgtaccggtactattagtcattagttacagcgtagcacgtgctaccagacaaaatgcaagcgataataagcgcggcaaaatcaccattccttggtttgccattctatttttagccgttatcgggttcaactctttcgacctcttgcccgaatctctagtgaactttatcaacacttttgatacgttccttctgaccatggccatgaccgcacttggtgccgaaacgagcatcgagaagtttaagaaagccggttttaaacccttcgtattagcagccattctttatctttggctcattggtggaggctattgtttggctaaattcgtcgttccggtattggtataaatacatatatataaacaaaagaagccgtgagaattcacggcttcttttgtttgataggtaagataatattccataccacccaagaccattccacatacgacaacagtcaccaatggtcccaccctgcggaacactaccatcgtcaccaaaaagacggtatgaatccataaatctcgacaagtaaagaagtcttgattcgcacatatatcacgccaaacataaggagttatcatgctatacgaatcaatagagactatcaagtgcaatatatagtagaataattctgtacacatccaaacacctaaaaatagtgcaaagaaagacaacaatccaaagaggtaacgcgacaaaaacttctctagaaaagaagcaggtaacatcaactctgataccaactcatgtggcttacacatccccagcatgattcccatgccggaaataacgaatactattctcaaaaacgtagccacaatacctcctaaaaacttggtcacagacatttgcatatcttctatatgaaggagtgggattatcatatataagaatgcggcacccaatactgcgcctaagagtcccggccaatagcgtaagcagccagtgtatatgcgccacttcaatagtttcccaaatctacgtatgttaaatgtttccatcatatttcctccatttaattgtgttcttggttttccagattggtaaaatttgcttgattcaccattgcattgaacagtaattccaagttcaagagcgtatctttatcgcctgtttgacggtgacacatcacagcattgccttgcaatgccggttctgcgtaaataactgtatcgtccatctcgctctgtcggcgatagccgaaagtgtatctatcggtcagttcccccactgaagcattgagcaagagttgtgaatggtcaagcagtaagatatggtcgagcagcgactccacatcgtgtacttgatgagtagagataatcatggtgcgctcttcggtcatgttgttggctataatcttgcggaagagactcttcgaaggtatatccaagccgttggtaggttcgtccattaccagcaaccgagttcccgaagccaatgccaaacacatatatactttcttcttttgtcccatagagagttcgttcaaccgtttcacttcgggcaattcaaactccgacaagcacttgattaacacctcgtcggaaaaccgaggataaaagtcacggtgcatctcaatacacttcatcatactcatccgtggcatttcaaatgtttcggggacgatatacacatcctgcaacatctccactcgacgtgcatttacgtccatacagtcaatatacacacgtccttgctgcggacgcaacaaaccgcaaacaagattgagcaacgtactcttacccatcccatttttacccaatagaccgtagatgcggttttccggcaaagaaagcgagaagtcgtcgaacaccggttctaccttcttgctatagccaaacgtcatgttttgaatttctatcatacccgtatttttaaaccaaccttagtgtactactataatagcacgctgcaaatgcatttcattttagactttcttgcaattttttctcaatattttttcatatcaccgtgattttttgaacagtaagtatataacatgtcgcgtacctacataaaatagaataatccccacaattcaaaacttatgaacttagaaacttataaactgaactctaaactcgtctacttatcaactctatataccctccttccccttttgggaaaccaccggtcatcgacctaatagtcgctgttggcgtaacaggtgctttctttctactcattacttgtatacttgtcaactctatatatcctcactccccttttggggagggacggggtggggctgttgcagcgccttgtcagcgttactgcctagcccattcagcattgctgcaaagcctagacagcgatgttgccacgcccttgcagccaaccagttaacaagtagacgagttgacaagtgataagttatggagttgacaagtgacgagttgggaatgaaaaactcatgaactcacgcctctataatatgcacaacacagccctatctgtgcaaaaacgggtaagaaataggacaattcggttggcttatcaacaaaaaacacatacctttgcattctcaaattattatatagaaacaaataaaacgatgagttacaatcttttaaaaggtaaaaagggtattgttttcggggcactgaacgacaaatcgattgcttggaaggttgccgtaaaggcagtagaagagggcgcacagattgtgctgtccaacactcctatggctatccgtatgggagaagttgccgcattggccaagcaaactggcgcagaagtcattgctgccgacgctaccaatgtggaagaccttgaaaacgtattcaagagagctatggaagttctcggtggtccggtggacttcgtactccactctatcggtatgtcgcccaatgtgcgtaagaagagaacttacgacgatctagactacaagatgctcggacagacactcgacatatcagccatttcatttcataagatgattcaggctgccaagaaattaaatgcgattgcagaatacggttctgttgttgccctcacctacgtggctgcacagcgcacattcttgggttataacgacatggcagatgccaaagctttgctcgaatctatcgctcgtagcttcggttatatctatggccgtgagcacaacgtacgtgtgaacaccatctcacaatcgcccacaatgaccacagccggtgccggtatcaaaggtatggatcgtctgtacgacttcgctaaccgcatgtcgccactaggcaatgccacggccgatgagtgcgccgactactgtattgtgatgttctccgatctcactcgtaaggtaactatgcagaacctcttccacgatggtggcttctctagcatgggtatgagcctgcgtgccatgacagcctacgagaaaggtatcgccgacgagtacaaagatgaagaaggaaacattatctacggataatgtagtaaaacattgctacgatttaagaacaacattttcaatcaataagtagcagtgttaaagcaaaatagagatgtaaaatctacttataacatataagtaaatgtatatcaatgccagtccgaaggactgcctataaatagctggggactatcaagcgatagcgaagatagtctccggtttataatattcggggtatccagtctggcaagactgcccacgcacaatctgttatacaattggcaaacttgagggagtcttatcaaacacgaattggtctttgccttatctccgtaggtttttgctgcgctccaatgcaacaccgatgaagcgataatctttcatacaacaatcatcaagatatgaaatcaacaaacattcatctgttaactccctctataactccaatgccagataggcatttaactcccgatcactccaaagttgagcatcgctgcgaaacttaaatactctttatacacatggaccacctaccacaaaacgacataccgatgcttgtttcggccatcaacttcctgttgcgcgacgaagaatttgacaatcttgaccagatatgttaccatttcaacataggcagaaaagacttggaggcacgcatggcaaaggccggtttccaatattcggagactgagaagcgattttggtaaaccacaaacatcgacttatatgattacaaaagacagtatagaatcggcttacagcttcttccatcagaagtatcgtgtgtatcaatactccacactcgattggcaaaaagacgatatagaatatgctattggttcgtacgtggctgacatgaacaaggacttgtacgcgctattggccaatggaaatgattcatatctgctagaccatacctgctttgatgccgacctttcatcggcagtggagcggttggaggaaatgttggagtgagtttttgagttgttctgtttctgaattaatgagttattgagggagttcttgagtcggaaagggcttgagttgttcccttaacctaacttggcttgcagccatttaccgcgatacaaacgccaaaggaacatgcaaccacggaacgtaagttccgctgccatagctgtccaaacccctttcaggccataatgaggtgccaataaagctgctgtggtaagacgtaagcaccacatactgcccaagttgatgagtgcaggacgcaaagtatcgccagctcccacacatacactgtaggccacaatggctgcagcaaagaacggttctgcaaaggcttcgatgcgaagagattgtatacctagttcacgaatggcctcaacgggggtaagcacaccaatcatttcgggcgcaaaaatatacatgataacacccataaaggccatgactgccatgccaagagccactgtcatataagcgaaattacgacaaaggtcgagtcgaccggctcctttgctctgccccacaagcgtggtcgccgcatcggcaataccgtaaccgggcatataacaaaggctttcggccgtgatggcaaaggtattggccgcaatggcaaagttgcctagaggtgccacaatgatggtgctgactatctgagccgtactcatcaagatagattgagcagccattggagcgcctatcttcactgcattacgtacataatcccatacccaacggaatggagctgtatctagtcggagtgccaatatcttactccggaagatggcaaaataggcttgtgagaacgcaccgcacatgatagcgagagccgttccgatagcggcgccgacgacaccgagaccaaaccg

SEQ ID NO: 1661 - DNA, 17227 bp, synthetic construct
  misc_feature 1..17227: note = Synthetic
  source 1..17227: mol_type = other DNA
gaggtcggaaaacgaaagtaggaagaaaactacttcgttttcctcctactcgattccatggccttcccttcatttccggatgaccctgttcttgagcaatgtcgcaatgccccttgcggtatcacgggcactaaaggaatggctcttcttgtattccttctgtgccttgtccttgccttggcaggcggaaatgtataaggagatgggaatgtcccttggaacggagaggaccgtggtggctgcgtcgcatacgaagttggcggcggcagccgtgtcatcgtcaaacgaaaggatgagtctcgagaaatcctggtcgtatctgtcgaagcctttctccagggcataaggaatgccatggcccttggcgaactgctccatctcttgcaggtcgacgttgtcgtcccggacggttatgaatatctgtggatcgcccttgcttaccttgtcttcgaacaagggttgccaaagattgtatttgctgaatacgacattctggatatcaaacgcattgataccgtagcgcggatcgtcgtcgtccagcttttcgtcatcggtgaggtccagtctgttcagatccaatgccaaaaggaggaaggcgtacttcttgggatcggctttttgcgttgcgatgaactcattgagagaagccaggagctcgtcgtgataagtcaccccgtcgggagcgtccatggcaggatgggcgtggccgggctcgtaccttatcccgattccattgtgcatcacgccagtgtcggtggcttccgtctctccggcgtctgtcttttcggtgtccaagggtcgtgacttgggactctcctttcggcagggggctgccttctcagtgtcggcggatggctctttaaaaagcggctcgccacagttctcacatctcttggccgagggggcaaccaggctgtggcaatgtgggcagacggcggtacagagatccaggatatgcttgaagtcactgtacaggtccgcattggttccacattctgcgatctgtccgaagaaggacttcttctctttcttgggcatgaagagtccactgagggtctgcgtggcttcgtcgaaggtcagcgttgacgtgtcataccctttcttaatggctcttcggttgtatctttcaaccatcttggccaccttgtcctttaccttggcaggtacctgccattcatgtctctctgttgagaggaactgttgcatctcttgcaagttcatggaattgtcttttttcatgatgatcttatgattaatcctaatcagtcattagtcctttatcttattggtcagaccgaggattgcccatcctcttgccggcagcacgtccgtcgccagccatgccttcagtaaagacgggtgcagggatgcccggcaatggcgcgaggtcttgcggaccggaccttcgatggctgattgggatcttggtttgatgaattgggtcatggatcccatcccgttgacggccaacaggatggggaatggaagaaggctgcgtcatgatcgggaggacgcacgctggtcggcagatcctgccccggcgtcttggaagtacttccggatctcggacttcatggaggtataggagtatagcgccttgtcggcttcctccggatggtctgccagttccgggaacagggcctcctctcccttgcgcccgtattcagtcaggtcgtcagacatcttactaagttcctgcaagttctcgttcttcagtagccgatagcgcttgaacggcagcaccctgtcttgcatcatcttcttcagccgccggttctcagcctttatggcctcttccttgagcttcagggcctcttctctctgcacataaccctcatagaaggacttgaccttgtcctgtcgtgactggatcagggtgttgaaccacttacgctgatagaaagtcctttgaccgcacacctcctcgcacctggccttccaattagcgagcttcgttttgtacaaggccatcagagcctgtcggtagaacgcggtgatgttcctgacatagtcttccgtcgtcgtctctctctttaagatgtcgatgacctccgggagggaataggcctgatacagcagcttggcgtcgtgatagtcggctatgatgtcggcaaacttcggccagatggcggagaagtgtgttcttgcggtttcgcgtctgccgtcctcatacactttgctgcaagagttgccgcccgtgagcggactgcccgacacgaaccagatgagtgacatcgtgccgtcgtcgtcaaacaagacggaatagggcgcattcatccaccattccagatagacgcccagcgtggcagtctcgaactcgccgctataggcaatcccgttgtggacggggacgggtgtgagcagcatcctgctgtcgttgaggatccgttccctgttggcgaggataaggaaggcattgtcggtaaacagattcctcagttggagttcctcatcaggggtaagcctgggcttaccgggctttttgccaatgctgaaatatgcgccggtagtgtcaagtgcagatttccgggaggtgtcctccatgcttacgtccggcttcctatagccttggatgatacggccatcttgcagtctgatgccattctcgatacagttgttgttcgtttccatattgtgtcttagtgattaatgagttcaaaatattcggttgccaaggggatgtcctgttgcaggcgctggatgaaatccacgatgtcctcatcccgggtgcaatggaggcagcggtagccgatggcgtgggagtattcctctacacatctcaggatattgtcccaatcgacggctatctggcaggtcctctcgtaatcatcgagcagatcgcagcgcagcgagatggattgaatgatgtctccgtcgcattttacgtcgaggtagaggtacagttgctttaccgtgcccatgcgccgcatcatcatcgcctttagaggggaagggtcccatgccggcagataacggttggtcaaggctcgggtgatcgggttgggtgtcagtgcgtcataatcctcgtaattccaaaaggagtctttcacgctcttctttaaaatggctttcatgttaatgtatcgttagggttattgaatcattgtcttgataagggtggcggggggcgggattccaggcgagggcagacgaggggctgccatgtccctctgtcgggacataggaagtcatcggcatgcccatcatcggcatgccctcgtggaaatcatgggttggggaacggttagtgttaagcggccatctcctcgtcgagcgtcaacggatcgccaaggatgtagacctgccttgcttcctgcaaggcatgatcgatggggggggtacggcatggtacggccacgcgatcttacacatcatcagcgtcttctgccaattattctgtccgacaaggttgtccggatctgtggtcttgtcataggcttcagatattagtttattaagtgcttccattgccgggtcttgcgcgcacggtccttccttcttgcgtctgcgtgcgtgtcgcggctctttgtcctttgtcaggaacgcataaggcttctcagtcaagctgcacgcagggcctgcgcatggattgcctgcgctgaggaggatgccgtcctgctcgtccgtggatttgcagaaaggccgaagactcagcttccttgcatcgtagccttccgtatgacccaatacaatgatcttgaaaagtgattgattactaaggggatagcaagtgctatcggacatcttaaggtattccatattgtttgatttttgattggacaatccacatcattttaccaccgtggctacaatagcataaagctcggttggtgcgtatcaattacgctcttgatgcatttcgattgcaaatatacgggttttatgggtatggcttcaatttattggtggaaaaaatgttaagaggaatatgttttcacggtttttggcttttcacgactgtccttggatggaaatggtctggaaatggtacgagatgcctcggacggctgatggtcggttgaggacgatgatggaagaggggcgggacggtgagggggcaaggccgggcaggtgagcggagggcatgaaaaaagcctgtggcagatcggtgtctgcatcacaggctggataaatatgaatgtgagttattgtttgtcggtcatgatatcagaacggatgggaggttccgtatcatttatggggcttatcctaccaggaaacgtgccaggaggtagccgccgccgaggagccagacgtagagcagtccggcaagcaggaaaggcttgcttcctgccttcttgaacttgtcgatgctggtctctgttccgagggcggtcatggccatcgtgagcaggaaggtgtcgatgtattcgatggctccgttcagcggaatttccttcactgaagagacgccgcagaggtgctgcagacccgtgttgatgcagatcacgatgatgaagtagaaagcgaaccaggggatggtgatcttacgcttgccaccgtcggtagtctgcttgcgtgtgcgtgagaggatgaagctgaggacgacgagtacaggtgcgaggagcatcacgcggatcatcttggtgatggtggccgtacctgcaatgccgagggcatcggtagggtccatggcgttaccggcaccggcaacgtgggccacctcgtggagcgtgctacccgtgtagatggctacggcggtattgctcaggtcggagagccagcccatgcggtacatcacaggatagaggaacatcgagatggtaccgaagatcactacggtagacacggcgatagcggtcttgtggccttcgcacttcactaccggctcagcaccgagtacggcagcggcaccgcagatggagctacccatggaagtcatcagggctgtgtcgcggtccatcttcagcacgcggccgaggaagacgccgagcaggagagttcccacaacgatgatggagtcgatgaggatggcagaggcacctacctgctgcacctgcgtgagggtgaggcggaaaccgtagagtacgataccggtacgcagcaaggtctttgtacagaacttgatgccgggaacccatgtctcaggcagcttgttgcgaaggctgttggcatagagcatgcccaggatgatgccgacgatcaggggtgagaatgaaagatgtttgatgacgggcacctctgcaatgtagaaagccgcaaaggcgaaaagagcgataagcagaatgccgtggagcgtgttggcgcgatttggtttatcgaacataaagctgatggttatttatatattttatactttattttcttttcgtctgcaaagttacgccgaatcataaggttgtacaatcgatgataatggaatgtttcgataaaaataatctatattttcgattgattgcccgtcttttatcgtatctttgcaagggagcaaagtccctgtgactctataatataaggtaagatggagattcgtcaactcaaatatttcgttctggccgcgcgtacgctcaacttcacggaggcggcccaggcagcccatgtggtgcagagcaccctgtcgcaacagatcaagcagctggagacagagctctcggtgccgctcttccatcgtgtgggccgtcacgtgccgctgacggtcgagggccgtgccttcctgcccgatgccgagcgcatcctgctctatgcggagaaggggcggcagcgcatggccgacctgcgtgcggtggaaggcggcgatctgtatatcggtgtctgtacgggcatcggtctgtcggccatcctcattgatgccctgacagagttcaaccgccagcatccccgtgtgcatgtgcacatagaagaggatatcgtcgatgtgctggaacaacggttgctcgatcataagatcgacctggcgatgatgtttactccgcgtcaggctaatgatgcgatagaggtacgtccgatcttcaccacgcgcctgaaggccatcgtcggtgagcgtcatccgctggcctcggcctcctcgatcaccctcgagcagttgcagatgcatcctctcgtgctgcccggcaagagctggtatgtgcggcaggagctggacgggatggctgcccggcagggagtggtgctcgagccgacaatagagatcaacgtcaactcacagctgctttacatggtgcagcgcggacattggataacggtgttgcccgatgtagctacgcttgcctacaacggattggtgacgcttcccatccagggtgaggagggacagattgagacctccatcctggtgcctgccgaccgataccagcggcgagccgtcaccctcttcgtcgaggcgctggaggagagcgcacggcagatgtggccgtaagacgggaaaggggcaaggccgtaaatggggagaaagacaaggaaaggaaagacgatggcgaaaagagggaagcggaggacgagaggacaggaatgtcggtgactgtaatttttaagtattattcacgcagcaggcacgccagatgcttctgcagatcgggaaatgtgactaactttgcccttgaaataaagaatgcggaaaatgaaagatatcatcatacggcctgccacgcctgacgatgcggcagccctgcaggctatctatgccccttatgtcacagacacggccatcacctttgaatacgaggcacctaccgtggaggagtttcggcagcgcatcgtgcatacgctggagaagtttccctatctggtggcggagatagtagagacgggcgacggtccggaaccggtgtcgagacggatagcgggctatgcctatgtgggtacgctgcgtgtgcgtcccgccttccagtggtgtgtggagacctccatctatcttgaccgtaccatccgccatcagggtgtaggcgacgtgttgctgaaagcattggaggaggagtgccgtcagcgtggcttcctcaatctgtatgcgtcgatcgcgaccgtcaatcctgaggatgagcacctcacgctcgacagctatcatttccatctgccccacggctatcgcctcgtaggaacattctaccagtgtggccgtaagttcggaagatggtatgacatggtgtggatggaaaaaataatcggtccgcatacctcagccgatccccgacctgcaggacggaaggagtagaagtcttaacggtcagtagcgcaaggtgcttgcacgggcaggcatcaggtatttgattttcttcccacagtttttttatctttcggcattgccaaggcatagaattgacaatgccctaacccttctgtcttctatatctaaagtcttaccatcgccatactattctattttttccgtccatcgttcaagtgaccttgtagcttccgtaacgatgaacatagttctattgagtgctatacgaacaattgagggtaagccttcggtaggaagagttagctgtatattgaccatcttagtattgctaagatatgttatgcttggcgtcaattggatatttccaaataagagcacgaaaaagcccctccgaagaggggctataggatgaaaatccttcggcatatagccttattgtgataagatgtagtatttatttgctgcaaacatatacatattatttgtatttcccaaataaaatgcgtaagtttacaaaaaattaaataaaatcaaggtaatatgactaagacaagaattttaggattagatacaggtacaaatagtttaggttgggccattgtcgaccgggatgaattgagtggtcaatatgaattgatataccgaggtgacttgatttttacggaaggagtaaaagtggaaaaaggcatagagtcatctaaagcagctgatcgaaccgaacacagaagtttacgcaagcagtatttccgtcgtcgtctgcgtaagattgaggtgttgcgcgtgttgtcttcctatcatctatgtccacctgtcagtgaggccgaattacatcagtggcatgtcaagaagatatatcctgtggaaaatgaggaatttatgctttggcagcgcacaaatgataatgaaggtaagaatccttattattatcggcatatttgtcttcatactaagctcgatcttaccttgatgaaggatcgttatatattggggcgtgcactctatcatttgtcgcagcgacgtggctttttaagcaatcggttggatcaaggctcggatgaagatgctaagggtgctgtaaagacgggcatatcttcattaagcaaagatatgagcgatgccggttgcctttatttaggtgactatttctacaagctctatagtgaagaaggtaatcgggtgcggattcgtaatcattatactgcccgcaatgagcattatcttgtggaatttgaggctatttgtaagatgcagcaacttgagccgcaactggtagaggcacttcgtcgcgctatcttctttcaacggccattaaagtcgcaacgtaaaggagtcgggaaatgtacctttgaacctcgtaagccccgttgtgccgactcacatcctgactatgaagaatttcgcaagcgatgctttgtcaataatatcaagatccaaacacctgatgatgatgctatgcgaccgcttaatgaagaggagcgccaacgtatagattcactattttatcgtgtttcaaaagccaattttgattttgaagaaattgcaaggctgttaggagggaaaaacaattattgttattacaaggatgaggtccaaaaagatttcaagtttaattatcgtatgtctcaaggcgtatccggctgtcctaccatagctcagttgcgcaatgtttttggtaaagactggaagacaggcatcgcagagacctatcagcatagtgttaaaaaggatggaactttgaagactgctgacgagatggccgatgatatttggaatgtactctattcattctcctcgaaagattgtctttacaattttgcgatcaatcagttacagctggatgcaaataaggctgagaaattttctaagatcaagctttctcatggtttcgcttccatcagtctcaatgccattcataagatacagcccttcttatgcaagggtatgatctattctcatgcagttttgtttgccaatattccaagtatcgtaggccaggatatatggagtgatgagacgcagcgtcagcatatcatgaaagagttggaagatctcgtccttaactatgatccgaggaacagaggagtggagggcactatcgaaatgtgcatcaaagatttcctccagaataattatgatcttcctgccggggctgtcgaccgtctttatcatccttctatgatagaggcctatccagatgctaagacaaataaggatggtgtgttgcagttaggctcaccggctacaaatgcaattcgtaatcctatggccatgcgttcgcttcatgagttacgacatgtggtaaaccgtttgctacgagaaggcaagatcgatcaaaacacagaagtgcacgtggagtatgcgcgcgagcttaatgatgccaataagcgaaaggccattggagactggcaacgcaagcaggataaacttcataaaaagtatagagatgatataatagcgctgtataaagaggaaacaggaaaggacattaatcccaccccgacggatatactgaaatttcagttatgggaagagcaggaacatatttgtctctatacggggcgtcagataggaatttctaagtttcttggacctgatcctgagtttgacatagaacataccgtgcctcgcagtgtgggaggagacagtacacagatgaacatgacactatgtgaacggcgctttaaccgtgaagtgaaaaaggccatgctcccttcgcagctttcaaattatcaggagatactgtcacgtattgaaaaatggaaaaagaagtatgagcagctaacaaaggacatcgaccattgtattacttattctggaatgtccaaggaggtaaaggatcctatcattcaaaagcgtcatagactgacattggaacgtgactattggcgcaacaagtacgagcgcttcacgatgacggaagtacctgaaggtttttcgcgtcgtcagggagccggtatcggacttgtgtctaaatatgccggtctgtttctgaaatcgctttttcatgatcctgcagaccgtcgtcggtcacatgtctatgtcgttaaaggtgccactaccgctgagttccgcaagatgtggggattgcaaagtgaatatgaaaagaagtcacgcgagaaccacgcccaccattgtattgatgccattacgatagcatgtatcggtaggaacgaatacaataagatggcaagtttctatcatgatgaggaggcatttgaacgcggtgaaggtagcaagccccattttgacaagccttggccgtcatttacgcaagatgtattagagcttgagaagagcctgatagtcgtacattctacgccagacaatatgccaaagcgtgcaaagaaatatgtaaggatgcctcgtggtaaatttatagccaaaggtgattgtgcgcgtggcagtttgcatcttagtacttattatggcgccattaagcataaagacgatgctcaaccgagatatgtattaagacgcgagcttgcgagttttgagtcagtgaaggatattgatacgatagttgacgatgtcgtacgtgataaagtaaaagaggctgttgaaggtaagacaggaaaagcctttaaggaggcattggctgatgtttatatgaataaggaaaaaggtatccggattaagaaggttagatgttatgtgccgtctattaagcgcccgatagatattcgtcagcagcgtgatcagtctcggttcgattacaagcgccagttccacgtagctaacgatggtaattatatgatggcaatctatgaaggtgtggtgaagggtaagccgaagcgtgaatttgaattggtgaagaatatagaagcagccaactatttcaaggcaagccaagataaagaatcgttctcgtctattatcccggaaaagagcaccaaaggtttcccattgagagcgacgcttaagataggtactcatgtgttgttgtatgaaaattcggcttccgaagtagatttcaccgatcctgtagatcttgcgagaaggctgtataaggtcgtaggactttcttctaaagtagtaaatggctataattatggagacattacgttaagatttcatcaggaggcacgccaggctaaggacattaattctacaagaggactgtttaagaatgctgacgaatatcgtgggatgataaatttatatcacacacaactgaaagccctcgtagaaggttatgattttgatatcaacattcttggtgagataacatccaaacaataagaatatgttaaaacgtacactgatgtttatgcatccggcgacattatcaatgaaaaatgcccagttggtaatcaaccgacgtgaggcttttgaaggaattacgacggtgcccatagaggatattggggttgtaatcatcgacaatccaatggttacattgaccattccacttcttaactctttgtcagaacaaaatgtggctgtcatcttttgtaatcaaaaaggtatgcctgtatcgatgcttcaaaatcttgataccaataatacacaggggttgaccttgcgtaaccaattgtctgctacagaaccattaaaaaagaaattgtggaagcagatcatagaggctaagattcgcaatcaggcagccttgctcaatgtttatggtcgtgatggcaacatactgaagcctttatatatgagtgtaaaaagtggagatactgataatagagagggagctgcagctcgcatctattggactcgtcttttcggtccgcatttcattcgcgatcgtaatcaagacggggtgaatgttttgctcaattatggatatactatattacggggggctgtggcccgtgctattgcaggtgccggacttttcccagctatcggtctgtttcatcgggggaggagcaatgcctttcccttggcggatgatatgatggagccttatcgtgtttttattgatgatattgtttaccggctttggcaggaagggcatgaagcattgaataaagacacaaaggtggagctgcttaaggtattaacgtgtgatactcatttcgatgaagtcaagcgtcctctaatgataggactatcaatgacaatgtcgtcgctcgttaaatgctatgcaaaagaagctaccaagttggtgttgcccaatttcctatgacagactatcgcctaaatgcttatcatatcatgtggatcttcataatgtttgatctgcctacggtgactaagaaagacaaaaaagtcgctgcacgttttcgcaaggatctggaacgagatggctttattatgcatcaatttagtgtttatgccagatattgcggatcgttagagagtgctcgtgtccacatcaagcgagtaaaaagtttcttgccggttcaagggtcagttagtattctgatggtaacagataaacaatatagcgaaattataaattatacaggaggagcggaggaaaaaatgcgtcatatacctgtacaacttgaattattttagtatatttgcattgtgataagcgcatcaaatatcatttcctatacttaaaatactacttaaagttttgatatataggtaattatgtggtataggttgtggtttgatgtagatacgagataagaaacaacgctcattcgcattctatacactgcgtgtgtgttgtggtttgatgtagatacgagataagaaacaacactatattataagatacaggatctttgcagttgtggtttgatgtagatacgagataagaaacaactgaattacagaaaaatctgtatctttgcagttgtggtttgatgtagatacgagataagaaacaactatcaagaatacaggaaatagcctcaaatggttgtggtttgatgtagatacgagataagaaacaaccttgtagatggcggcatcatgtccgtaccgttgtggtttgatgtagatacgagataagaaacaacaaccgctgctatagcaacaacagcaataagttgtggtttgatgtagatacgagataagaaacaacaagagcttgatctggagcacaatccggatgttgtggtttgatgtagatacgagataagaaacaacgaacaaattcaagaagctcaacaacgcgctgttgtggtttgatgtagatacgagataagaaacaacgaaatggttgcattgaacaaacgcatcaagttgtggtttgatgtagatacgagataagaaacaactttaatgaataatcaataccgatccgtctgttgtggtttgatgtagatacgagataagaaacaacatggtgtcgatgaacccgtcacccatgcgggttgtggtttgatgtagatacgagataagaaacaaccggctgctgcgttccctgcgttccctgcatgttgtggtttgatgtagatacgagataagaaacaactagagttggtcaaacgaacacgggcaacttgttgtggtttgatgtagatacgagataagaaacaacacaaattggaagatattgcaattaaatttgttgtggtttgatgtagatacgagataagaaacaacaagagaagtagaaattgaatttaacattagttgtggtttgatgtagatacgagataagaaacaacactttgttgcaataacgaggatctatattgttgtggtttgatgtagatacgagataagaaacaacgatagcgtttccataatggtgatatatgagttgtggtttgatgtagatacgagataagaaacaacacggtattgcttcccgctatcgccccgctgttgtggtttgatgtagatacgagataagaaacaacgctccagccgcagttaagaaccctcgaaccgttgtggtttgatgtagatacgagataagaaacaacatgaaaacgatattaggtttatcttccatagttgtggtttgatgtagatacgagataagaaacaacaacaaccaaaaaataatttacaactatgggttgtggtttgatgtagatacgagataagaaacaacaacattacattatctttgtctttcctatatgttgtggtttgatgtagatacgagataagaaacaaccaccctcagtatagccttttgtatagcacagttgtggtttgatgtagatacgagataagaaacaacactacaataaacaaaattcaaatagctcagttgtggtttgatgtagatacgagataagaaacaacgctacagagggcatttgcaggcggttttacgttgtggtttgatgtagatacgagataagaaacaacctcgcaaggcatccgtaatgctctctatgtgttgtggtttgatgtagatacgagataagaaacaacggtttgctcttgtcctcgccaacaagccagttgtggtttgatgtagatacgagataagaaacaactgccgaaagtatttgcgaaggcaactaccgttgtggtttgatgtagatacgagataagaaacaactcacggcagtgaagataagacacctgacggttgtggtttgatgtagatacgagataagaaaccccacctgacacagtttatctgacacaacccccaaccttttgtggggaagaaagacttgaattgcgttcttgcccggattttgctgtaaccccacgaaaaagtgccatttgggctatatgggtgacctgtttttagatctaatggaaatatttcttagatccaatgcttactttttagagtattcataggcgtggtgtggcttatccggctggatgccggtaagcgggaagatggagacgaagaagacaagggtgaggggcattcaggaggaaggacgatcaagaatggcgatcttgattttatttacatatagcagctcccgtataggtaagtgatggtatttgtcatcggataaggacggatcgtccggtggaagctttgtttaaggtaggtcgtttttgtgagttgcgattgcacaacctgtaagtcagaagctttaatggaagtcttggattacctttaagattgtagcctgagagacctgaactaggtgaacattactcgtactcctcctgcgaaacgccctgagggcattgccgctatgaggaagggaagtgcaagggccgtgtcgccgatggactgtccttccgtgtggcgaggcagccgcttatgcgagccccgagtgatggcggatagggaagggggagggaatgcaggctaaagaggatacaacgagaaatatttccatagtggagctaccatcatggcttgcaggaactcaccatttcggagcatgtcgtacacttcggccctggttcggcagaacacctcaatgtcttctgtggcatccagatgccggtggcctgtcggccgtacgcctctggcgaggaagcaatggcagagattgtccatcgtcgagggattgggtgctatcgtcatcagctcggtccattcgccgccgatgtatccggtctcttcctgtagctcacgttgggcaccttcgagcggtgtctcccctttctctaccacgccggcgcagatctccatggagaccacatcgagggcatggcggtactggcgttccagaatgagcctgccgtcctcggtctcggcgatgacgttgatccatgtgggatagtggagcacatagtattcatcgtatatgctgccatcgggcaactccaccttgtcacgtcgggccgtcagccagggacgggcgatcagtgtctcggaggagagggtacgccatctcatttctttctcgtctcgcatattgccaattccttaaagggtaaacataaaaaatgacagagcacggatgcttgtctgccgtactctgtcatttgtcttattcgtcttgtttgatggcctgcatgatcagtgactcgagctcctcgcaaagctcagggttgtcggccagtaccttcagcgtgccgtcacgtccctgtgccagtttcgagccgttgtaactgaaccagctgccactcttctgtacgatgttgtgctctacgccgagatcaacgatctcgcccagcttgttgatgcccgatccgaacatgatgtcgaactcgcacttgcggaaaggaggcgccaccttgttcttcactaccttgacgcggacatggttgcccagcacctcgtcaccattcttgatggtggtgacacgccggatgtccagacgtacggaggcgtagaacttcaaggcattaccaccggtcgtcgtctcggggttgccgaacatcacgccgatcttctcgcgcaactggttgatgaagatacagcaggtattggtcttggagatggtggcggtgagcttgcgcagtgcctgtgacatcagtcgggcctgcaggcccacgcggttgtcgcccatgtcgccttcgatttcggctttcggggtcagggcagctacggagtcgatgacaatgatgtcaatggccgatgagcgaatcagctggtcggcaatttccagagcttgctcgccgttgtcgggctgcgagatccacaggttgtccacgtccacgccgagcttggcggcgtagaagcggtcgaaggcgtgctccgcatcgatgaaggcggcgataccgcccttcttctgtgcctcggcgatggcatggatggccagcgtcgtcttacccgatgactccggaccgtagatctcgatgatgcgtccgcgcggatagccgcctacgcccagggctacatcgaggccgatggatcccgtggggatgacatcgacgttctcgacctgttcgtcgcccatgcgcatgatggaccccttgccgaagtctttctctatcttggacatggcagcctggagggctttcagcttgccctcgcgctctgcctttatctttgctgcctgctcggcagccagttcttcttctgtttttgccattgattttgtctgatttggaaaattaacgggaaggatgtgagggaagggcatacataagaacagcgggacacacgggtgcccgccgtcctggcctcttcctgacagtcgggagactacagctcaagatcctcgtcgcgtacctcatgccagggcagtccctgcttgttgagctgctccataaagggatcgggatcgaactcctccacgttccatacgcccggcttcttccacagtcccttgcaatacatcatggcaccgatcatggcgggcacgcccgtcgtgt

SEQ ID NO: 1662 - DNA, 17167 bp, synthetic construct
  variation 14547..14558: note = n is a, c, g, or t
  misc_feature 1..17167: note = Synthetic
  source 1..17167: mol_type = other DNA
cgatagtggaaggtgacgacactggtgcgtaacagcccgaggaattgctgctgatattcttctatattcatggtttcgttggttttaaaaggttagacattcaacaacacatcgcacagaagattgtagccgtagaacgtcgcaagcgaggctaggacgatcagcatccaggggaggttgtttttgttaaaactcagtttcattttgttgtctttaaataattaataatgttaatacactcacagcaaattggccaattgctttgtgcaagagtggtgcaaggtttcacttgccgttgcatctcccatgcgacggcaaaagtatacaaaaaacagaggtgcatgaaatagttccatgcacctctgtaggtttttctgtaggttctgtaggtttttctgtaggttttaattttccgacattgccttttaattgctattaagttgtttttcaactgtccttcggtagacgtcgacaagggtgagcacacggcttttcgcaccgctttgtttccatttgtcgatgtgtagtcgcatatagcgattgttcctgaacgtgctcgataataatccctcctggcattcgaattcgcgctcgaactggctcatgttgtcgggatagctgaagcagtcgcggcagacgcagaagatcacggtcatcgcgctttcgctccaaaagtactcgcgcacctgagcagcgcatgctcgcagcgtcgcaaggtcggccgcaggcagtttctgtccctccgccttcttcttttcctcctcgtcctcccgcgttgtcgggttggtcacttgttgcgtgaagtgcaccccgggcattgcgatgatgcagccgctcatgtttccatagtacagctggcagtttgcgccgggagcaaagttgttcacgatgcttttcttttctcgcgcttggtgttttcgcgctttttctttttcttttcgcatttctctattctccatttcttgatttttgagaatctaccagtcacctgatcgttaaacacctgggccgtgctgcccccttcgaagtggttgtgaatctccgcgggcttcgcctctgcctccgcaagctgttgctccagcagcagacggtcaatctccgcctgcttcctctccagctccacctgcagggcgtccagctccgcctgctttgcatccagctcgtcagagagacggtcgttctccgcctgcttcctctccagctcgtcgttgaggtcgccaagctgcgacgacaactcctccgtagcactcagcgcgcgcatgtagttcgtcatctgctcctgtttctcctgcagatgttccacctcgcgctccagtccacgcctggcgtcgctgcaccattcggcaagttcatcatagttcctgttcatagcctgctcacttcgggtcctccttgtccttcttgttcttccgcacgcgcttcggctttgctgccgcagcgttctcctcctcgagcttctgcttcatgagatcagcgtatgtaaccccgcgcatcttcctccagtctccagtttctgccacttccgccgcctctccaataagctgcaaggatttctccatgtcctccttgcaggcgctaacagaaactcctttaatcggggcttctcggtcccacttatacatgacctgtttgatcttgattttgttgaagtctaaatcctcacaaacatacttgtgtaatgatgttaaagcctcttttaacgagtcttcttcaagttcgtactctgtgtacaactgaaacaatgctcctaaacgaaatttcattttctctttgttttaaggtttaattatcgtgtgaattaataggttcgcgctgggcgcgaaatgttcagaatagttgagatttagagccccttgataaggggcggctataatgcagggtttttattattctgcctgcggcgcaacattcgctcggctttgccgctttctttctccatttcattacgaaagcggcccgttggttcgattacgtagcacagcggagaaagaatttttcattaattattttgttagattttgaattagattttgaataatttctcgctttagcgacttacccgcagctctgctgctttacccgtgctttagcgctttacgcgccgcaggccttcacccttgcgcagcctcctccgcatacgcactgatcagtgcgatggcgactgaggatatcaggaataggaaaatagcaccttccataactttcaagtttttagttcaacaataaaagaatgtcggcgcaaatatacaacagggggtgttccaaaacgcgggaacatcccctgaaacattaatatcttttaagagtttcggctatcttttgtctcattctttcacgtatgttaacaggttcaagtatttcaatgccatttccgaacttcaacagctcacccatgaagtccgacgtgggtcgcacctcgaagctgaagtcagtgtagccgtcgcccgacgatagctcgcgctgcgagtgatgcagcggcagcgtccgcagatagtcgggcatccactgatgagcccgtaccaccaagtgcgtcagcggcgtgtcgtcagtcagcaccccgtagtactctgcgaaatactgctgcgccgagaagttctcgggcatcataaaccgctcctccgtcatcgagagcgacgtcatgcggtccagggcatagatgcgcatctggtcctcctccgtccgcgccagcaagtaccagcgctggtggaacagcttcagcgcatacgggcacaccgtcttctcgtagccctccgcacgaaacttcttataccccatgcgcaggcggtggttcatgtgcatcgcctcgatgatgattcccagatactgcaagcctgccggcacgttctccagcgccacccgttccttcatgcccacgctatctgccaatatgccatgcaccgtcatcgtcgagtacagccaccgctccaggctgggatcgtacagcacttccggattcccgatgtagtatcggtacgtctcccggtcgcagtctatcacgatgccgaacatattgaggatggcatcgcgataccgaaaaaacgaagtgcgagtcaaagggtttccgccaatcaccttgttctccacccatttccgtccgagttcctctagcgtcatccctccgcatgtcttcagcgtattgatgatccaaaggtacaacttatatttctctgaatgtctcatattcgtttactttactcgcagctctgctgccttgctcagcctgcaaagttagcaaacttttttgaatggcaatgcatccggcaccatcttttttttctcatgaatcatgtctaaggagaaaaggaattgcaggaggatggggctggaagtgggaaacaaaaagcccctccgaagaggggcaataggtgtgaaaaccttcggcatatagccttattgtgataagatgtagaaatcttacggtgcaaaagtatgtattttttttggaagtaccaaataaaagtcgtacttttacacaaaatttccatcatcatgaaaaaaagaatacttggtttggacactggcaccaatagcttgggctgggccgttgttgataagttagacgacaattcgtaccagctggtacgtcgtggagtgcttctctttcaagaaggagtgaagatagaaaaaggtatcgagtcatccaaggcatcggaaagaacggctcaccgttctttgcgcaagcagtacttccgtcgccgccttcgcaagattcgggtacttgaggttcttgtgaagaacaatctttgcccttatctttctcccgagagtttgcacgaatggcatgtgcacaagaaatacccgaaggtcgacgaattcatgctttggcagcgcacgaatgacaacgagggaaagaatccctactactaccgccatttgtgcctgactgagaaactggatatggattgcatcgacgaccgctatgttctcggacgcgccatgtatcatcttgcccagcgcagaggcttcctcagcaaccgccttgacagcagccaggacgacaaggaaagtggcgcggtgaagactggcatcacggagttgagcaaggaaatggaggctgccggctacgagtatcttggcgaatacttctaccatctctatgccgaacagggcaataccgtcagaatcagaacccgctataccgatagggaacaacattacctgaaggagttcgatgccatctgtgagaaacaggagataggtagcgaactgaagaaggagttagagaaggctctctacttccaacgcccattgaagtcgcagcgacacggcgtcgggaaatgcaccttcgaaccccacaagcccaggtgtgccgagtcgcatcccgcctatgaggaattccgcatgctctctttccttaataatattaaggtgaaaggcccctacgacgtggacctccgccccctttcttcagaagagaaagagaagattgagccattgttctatcgtaaggcccttgtgaagtcttcccatttcgatttcgaggatattgcgaagacgattgcaggacgaaacaagtattcccacatcaaggatgccgacgacaagccctacaagttcaatttcagaatgacgcagggcgtggcaggctgtccgttcacggcacagatgcgaggcatattcggcgacgactggaagagcgccattgccgagtcctacacgcttatgcagaagcaagacggcatcaagacgattgatgaagccgtcaatgatatatggaacgtgctctattccttctcgtcagaggaaaagttgaaggagttcgccatcgacaagttgcaactcgatgaagagaaagcagagaaattctcgaaagtgaagatgaactccggctttgccgccatcagcctgaatgccatcaacaagattcttcctttcctgcgcgaaggatatatctattcgcatgcggtgtcgctggcgaatattcccgctatcgtctcaaaggctgtatggaacaacgcagagcagcgctcattcatcctgcagaacctgaaccgcctgattgaaaacttcgacccgaaggacaaaacgctgcaaggcacgctggacttctgcatcaaagacttcctgatgaacaacttcgagttggcggcaggagcggcagacaaactctatcatccttcgatgattgaaacctatcaggatgcgaagcccaacaagcagggggtctatcagttaggttccccgcgtgtgagcgccatccgaaacccgatggccatgcgctccctgcacgaacttcgaaaggtcgtcaaccagttgctgaaggagggcgtcatcgacaacaccaccgaagttcatgtggaatatgcgcgagaactcaatgatgccaacaagcgcaaggccattgccgactatcagagagcgctcgacaacaaccgaaagaagtatcaggaggaaatactgcagttctatcaggagcaaggctcagcgcaacaacccaccgacgacgacatcctcaaattccaactttgggaagagcaagaccacgtttgcctctatacgggcgaccaaatcggcatggccgatttcttgggaaagaatcctctctacgacattgaacacaccgttccgcgtagcgtcggcggcgacagcacgaaggaaaaccttaccttgtgccaacggcgtttcaatcgcgaaaccaagaaaggacagttgccctcgcaacttgccaaccatgaggaaatcctcgtccgcctggcagggtggaaagagaaggtcgagaagttgtcaaaggacatcgacaagattcataccttctcgggaatggcaaaggacatgaaagaccgactgattaagaggcggcatcgtctcatcatggagcgcgactactggcgcggcaagtacaatcggtttacgatgacggaagtgcccgaagggttcagccgccgacagggagcaggaatcggactcgtctcgaagtatgcaggactctatctgaagtcccttttccacaaccccaaagaccgcaacaagagcaatgtgttcgtcgtgaagggtgccacaacggctgaattcaggaaaatgtggggactgcagtcagactatgagaagaagtcccgcgacaaccacgtgcaccattgcattgatgccatcacgattgcatgcatcggaaagtacgacagcaatctgatgtcgcgctattatcacgatgtcgaagcctttgaggcaggcgttggcaagaagccgcagttccccaagccctggcctacgttcaccgaggatgtcctgaacattcagaacgagttgctcgttgttggcgacatgccagacaacatgcccaagaaggcacgacgcagaatcagactcgagaatccagcacgagtggttgtcgctcaaggcgacagtgcccgtggcagtctgcacaacgacacctattatggtgccatagagcgcgacggcgacatcagatatgtggtacgtcggcctttgtcttcgttcgaaaaggcaagcgacttggaatccatcgtcgacgaagccgtgaagcaaaccatcaaggacgccgtagcagggcgaaacttcaaagaggccattgccgaaggcatctggatgaacaagcagaagggaatccgcatcaacaaggtcaggtgctatgccgactccgtgaagaatcccctgaagatacgtcagcaacgcgacgtgtcgaagaaggagtacaagcagcagttcaatgtgatgaacgactccaactacctgatggccatctacgaaggtgaagagaaaggccggaagaagtttgccgtggaagtcatcaatatgttagatgctgccaagtattacaagaagagtgccaacagagatgtctattcctccatcgttcccatcgacaagaacggcttccctttgaaagtttgtctgcgagtgggcttgcatgtccttttatacggcgaatcagttgaggagatagatttcggcaataagcgtgatttgaagtcgagactctataagatagttggactgaatgcaccttcggaatcattcccttatggtcgaatcatcttgcgccatcatcaagaggcaaggcaggcgaaagatattaaatcaaagaacggtgtattcaaaatgggtgaagactaccgtgcctccattgcgctcttgcacacccaattcaaaggattggtggaaggacaagattttgatatcaatgttcttggcgagattattctgaaatagtaataataaatcatcaccacttcttatgcattttgtttgctgtaatctactgaaacagaagaagatacaaatcataggttgtggtttgatgtagaaaagagataaaagacaatatcctatgaaatacactttattgattaaggttgtggtttgatgtagaaaagagataaaagacaatgcttatgtggaacggctctcgatggacgtagttgtggtttgatgtagaaaagagataaaagacaatgcagattcgtgatgccttcgcccagcagggttgtggtttgatgtagaaaagagataaaagacaattagccaacgcacacaagcattcctcaacggttgtggtttgatgtagaaaagagataaaagacaatccctttatttattgggaatttgcgggtaagttgtggtttgatgtagaaaagagataaaagacaatttctcgacggggtggtgtatgagttaaaggttgtggtttgatgtagaaaagagataaaagacaattcagggcagaaccagtggccagcatcgcggttgtggtttgatgtagaaaagagataaaagacaatgctgtccttttagagtatgactaatcttcagttgtggtttgatgtagaaaagagataaaagacaataagaaagcaatcgcacaagcagcacccgagttgtggtttgatgtagaaaagagataaaagacaatccattaggaacagtctcaagagcaaaacagttgtggtttgatgtagaaaagagataaaagacaattaatagcgattggtacctcaaccagggtagttgtggtttgatgtagaaaagagataaaagacaatagctaccctttgagcgattgcccaaagaggttgtggtttgatgtagaaaagagataaaagacaatcggggctttctcggcaaagattgtgcagggttgtggtttgatgtagaaaagagataaaagacaactatgggtgagaaacctatggacaagacgcgttgtggtagtaacgacagcggatgaggcagagcaggtgaagcattgggtttaagaaggacttaccaatagtaattcatggggcgcaggcacgtctgcgtccttccttgattcttttttccttctgtcccgtttgtcccgtctgtcttcaaacaaaagatcgtctgtcccgtctgtcttctttcatcgtccgttcttctgtcccgtctgtctccaaagatggcaaggcattgcttcatacctgcggtgcatcacgatttatacctataaaaataggagggaaagaagggggaaactgtatattggggaaatgaagacggggaggaacgtgaaagtatcgcatgaatgagggcgagaattttggttttttgccactttttttgtatctttgcacatgtaaagactatattttgctatgacgatgaaagaaagaacgaaagccctgctgcaggagatgaacagggggatatatgagaaggaaacggaggtggctctgtcgctgctggcagccgttgccggcgagagcatcataatactggggcctccgggggtggcgaagtcgatggtggcaagaaggctgaaggcggcattcaagaatgccaagagctttgaatacctgatgtcgcgcttctccacacccgacgagatcttcggaccggtgtcgatagcgctgctgaaatcgtcagacagatatgagcgtgccatcgacggctatctgccaactgccgacgtggtgttcctcgatgagatatggaaggcgggacctgccatccagaacacgctgctgacggtgatcaacgagaagctgttccgcaatggcgaacgcgagatacgcctgccgctgaagctgctggtggctgccagcaatgagctgccggcacagggcgaaggcctggaggctttgtgggaccgtttcctcatccgggtggagagtggctgcatcaaggagcaggcgcacttcgaccagatgctgctcgacggcgacgacggaatggaagccgcgtgcgacgagcaatggcagattagcaacgaggagtacgacctgtggacggagagcatcaaggcgattggcgtcgctgacgacttgctgacgtgcatccacgtggtgcgaaaggcgctgggagcggtagcaatggcgacgagcgacgagcgacacaacgtgtatgtgagcgaccgccgatggaagaaaatagtaaaactgctgcgcacatcggccttcctgcaggaccgcaagcaggcggagctggctgacctgctgcccatctaccactgtctgtggaacgagcccgacgagcgcgacgacatacgtcgcatcgtgattcgctcgctgtttgccgagtttggcaccacacttgcgaagatgaagatggccatcgaggcggatgtcaggctgagcaggatgcacgatgctgccaagaaggcaaaggctgccacccagcagcgcgacgggaacaagaagatcgtcgatggcttctactaccacctgctcgaccacgacacgggaaacagctacgtcttcatcgccgactatcagcgcatgcgggactattcaagagcgaacgccggacagttgggcgtgctctacaaagacccgaaagacgcccgccggaccatcatccgcagctacgacggtgccgacttccccgacggtgcgcggcaggtgtcgctggtgcgcgacgccgacaatctgtatatcgacggtgtgcagttcgaaatagaaaaacttgcgccgggcgagcagcaacagctgccggttgcaagggggaaggtgtcggaccgcaactactttgccgagctcgacgagctgggcgacaaggtgcggaaacgcgaggaggagatacgtggaaacatcttcctctcgaaggacgaccgcgatgagctgatgggctatctgaaggggttctatcaggagatggcattgacaagagaggaaataggcaagctggatgactgacacgcaagacaacgatgtgaaagactggatggagcgcatccagcgccgtaggctgacggcgggcgagtacctcaagctgctggagaacttcgtgaagaagggcgagcagcctgagatagaaaccgatgtgctcaccgactatgcgtggcagcggtatgacgacccgatactgcgatacatcgtggaggtgactcacgacccgatggttcaggctcgcgttttaacgagccggatggccgggaaagtgttctacgaaacgatgggacggtttgtcgtggactgtctgcacgagcagaagttctgcacacagaagacgtggtcggagcggaacgagatgggaaagacctgcgagtggtcgatgcagaagaagtgcgacaactggcagtcgctccttgcctccattggcgagaagcaccgggacgacgcattcaacaaggagttcctgaagaagctgttccaacggcagggctggcgcaacgaggcgaactgggagaagctacggcaggagtgggctgcagccctggagcggcagatgcaacgcgaggttggtgagaaggtgcgcaagaagattccatcgacaaaggctgctatgacgaacctgatgaagatgatgagcgagcagcatcaccgcttcgacaatgccgacgacgccctgctgttgcaggcctgggacctgatggaaggtcagttctcggagagtgagtttgagcggaagctgaacatcgtgaggattcagaacaagtatccggagattggcgaggtggcgcggcgcatgggaaggaccgtggaggaagaggggcgcgaccacatcagcgtgcagccgggattccactttaagattgaccattcgtcgggcagcgacattgaaggcatcacggtgggaaacgacatcaacgccctcctgccgatggagctgacgcagtatgccgacgagcagctggaggacctcttctacaagaagttcctaacgcgccgactgcagacgttccgctaccggtcggagctgaacaagcctgcccagaagttgcataagcagagggcggtgaggcgcggtccgatgattgtgtgcctcgactcgtcggcgagcatgtatggcgtgccgcagaagattatgctgtcgctgcttggcaagctggaacagacggcagaggaactgcagcgcgactgcttcctcattgacttctcggtgtccatcaggccgatagacctgcgggcacggctgcgaaaccgactgatggagaggattgggcagaagccggagaaaggcagcgaatgtgtgcaaggggagtttccattcatcgggggcggcaccgatgcggagaagatgctccgcctgacgttcgccctactcgacgacggtggcaacagatatatgaatgccgacgtgctctgggtgaccgacttcctgattccacgcaccacgcaggagctgatggagcggttccaagaatataaagaatcgggcactcgcttctatggtttccagattggcgagggcgaaaacaactgggagaagtatttcgaccatatctatcggattcactatgtgaggccgagaatgtattagggaaaagcccccctgtcgtcccccgagggggacactatacccttccggagcaacggtaggttgggtgcaaaacaaaactatttgtgaacgaataccctgcattatagccgccccttatcaaggggctctaaatctccccttttaaccctttaagcccttttaaaacagagagatgacgaaaagaatattggtaatacctgatgtgcatgggcgcatcttttggaaggagcctgtcaagaagtacatggatgctgttgacagggtggtgtttttgggcgactatctcgacccgtacgagggcgaagatggtgtggccgaagacatctatgagaacatgatggaaattattgcgttgaagcagaggaacatggagaaggtggttttgctgaaaggcaatcatgaccagcactatgcttcagaacggttcatggaactggctggaggaacgcgcatggatgagcagaactgggagaagtatcatcagacgttcacggcaaataaggatttattccagattgcccatttcgagtcggtgggcgatgtgccgtatgtgttttcacacgcggggctgacgctctattggctgaagaaggtgaacgaaaacgtgtggctgttgcccgacaatcagatctcgttgactgatcccgcgatggtcgagagaatcaaccaactggatgacgagggtcgggggctggagatgctggcaaccgtaggcacgtatcgctcgtggttcggggagaagacgggtggtgtgctatgggctgacgttcacgaacattccattccccatgcgccccaggcctatgggctcaacagggtgtttcaagtattcggccacacgaggttgagcggggcaatgatggacaaggtggagtatgaccacttcgccatgatagactcccagcaatgcttcgtgattgacgaggacatcgatgagaagattgtggggttgaaggagtgggttacaaaaactgcacacagacggcccgactgacggggatgtccttgccggtgtcggagagcgcgccggtcttcttgtcgcggcggaacacctgtatcttattgctgtcgcggctgcagcagagcaggaactcgccgttgggcgtgatgttgaactggcggggatgagcggcggtgggctgatagccgacgcgtgtgagcaggccagtcgacgggtcgacggagaagatggcgatgccctcggcctgcaggcgattgctggaatagaggaaccggccgtcgggactcagatggatgtcggcaccgccacgggctcctacgctatcggagacaatctcttgaagcatttcgagccgaccatcgtgataacggaacaccgtcaccttgcccgagagctcgctcatcaggtaggcgaagcggccgttgggactgaacaccaggtggcgcggaccggaatcgtcgctgaccttcgctgctactccgttggcaacgaccttcgttccctgcaggcggtaggaaagaatgcggtcggcgctgaaatcggtcgccagcgcatagcgcccgtcgggagtgaagcaagcacagtggacgtgagcgtcctgttggcgcgataggtcgggaccgccgatcgtgccgagaaagcgcgtcgtgaggcaggccttcgtgccggcatcgctcaggctgaacacgctcatggagccaccggaatagttggccgtgatggccgtctttccgtttgtggccacatagcacgggtcggcaccttcggtgggtgcagaactcaggaacgtcatctttccgttgtggcgattcagcctgatggcgttcaacgaagcatgggcgtcgctggtctcactcacggcatagacgatttgcttgttgggagcaatggtgaggaacgacggattgctgatctccagcgagtccaggatgacagcatcgcccgtcgactgattgaagcgataggagtagacgcccttgctgccgccaccggtataggtgccaacgagcatcgtcactcgctcttgagcatgaatagaaccgacgaggccgatgagcatgaggagcaggcagctcgtcctctttacattgataatactcttttccattgttgtgggatgttatgattcttctttgtcaggtggttgtaattacattaagggcttaaagggcctaaaggggagaaagggggagatttagagccccttgataaggggcggctatcgctcggcgacgtaggagacgctttcagagcgcagcggggaaagaatgcagggtattcgttcacaaatagttttgttttgctgccaaccgcagggacagacccccgtgtctgcccgaacaagaaggggtcgcttcgcgagatttagagccccttgataaggggcggctataatgcagggtttttatcgcttcgcgagaaattcatcaaaaatctaattcaaaatttatcaaaattaatgaatgaaaaattaatggacaattaatgataattaatgtagcgccgcaggcatccatcgctaccacccctaacccctcctccccggaggaggggaccacgctgggtgttcgtcccctattgttcgggcagacacgggggtctgcccctacgatcaggggagaggctttccacccgctgttcttttcgctttcgaacgttgaacgaataatatcgccccacctgctatagctaataggaaactggcgacgtacaccttcccatcaggtaggtaaatgacgggagccttgcacatctgtatctcgcccaagccaagataggaatagacgccaagcaacgtggctgtcaagttgctgccggcatgaagcaagatggcataccagatgtttctggaccaaataaacaccagtccgaaaagcaaagcagcgagagacgcaccgacgatgttgcgnnnnnnnnnnnnatgccgaacaatacggccatcaacacgcagacgaggatttgtgtcctgcgacgacggaagggcgagatggccagatgccggtagcacaactcttcgagcacgggtgcgaggagcacggcgtgaatgccggccaacatgtcttcacgaaattcgtctggcgaactcaccagcggttctgtctgaacggaatgcaccaaggatgtgagtccatagacgagagctccttgagtcatgagccatagcggcgctaagagcagcagaccagccgccacgaggagtgtcggtggccgtagcgagaaccgacgggactcgggatagactcgtctttccatccggatgactacgaagatcgtcagcaggatggccactatggtgagaccccacgtcatcgcctcatgggcaagcgacccactgccgtcagccagcggcaaagctgtcagatagatcacggcaaggccgtagactgctgacaaaagcggcaaaagcggtttgatgaaggttgcaatttttgacatatactcctatggatgagttactctttctgggtgaaggaatcaggttggtgccgatactgttgagcagactcccctaccccgtcgcctcccaagacgaaattcaacttttttgataattatgaaggcaaaattacaaaaaattgaacaaaaatgtgtatctttgcgaataaattttgggaatcacgtaggatttggaaataaaacaatcataacataaagaaaaatgacttacaaaaaaatgcttctcatggccggactggctgcctttgcggccacactccaggcacaagtgaccatcgacatcgacgcccagcagcgcgggccgaaggtgagtcctatgctctatggcatcttctatgaagacatcaaccacgctgccgacggcggcatctatgccgaactgattcgcaaccgttcgttcgaggacggtcctcgcttcggtgcacctgccgacatgcagggttggtcgacgtttgctgctgctccgtcgcagctcacggcaaggctcatacagccttcgaaaaagacaccgctcctgaatagcgtacagcacaacgccttggaactcgacgtcaaggcctcggcagcgatgcccgtctgcctggtgaacgagggctattggggcatcaacgctgtgcaaggtcgcagctatcgcctgtcgttctgggccaaggcaccaaagtacaaaggcaccgtgaaagcaacactctgctcgcaggacggttcacagctctatgccgagacagtgattagtggattccctgccgcaaaagccaagggctggacgaaatacgaggcaacattcatagccaacggcaacgatccgcaggcacagtttgcgttggtcttcgatggtatagggcaagtacagattgacgtggtgagcctcttcccacccacgttcaagaaccgtgcgaacggcatgcgtcccgacttggccaatatgctttggcagatgcgcccgaagttcatgcgcttccccggtggctgcttcgtggaagggcaagagagtcctgacaacgctttccgctgggagcgtaccatcggcccgatagaggagcgcgagggccactggaatgtgaactggggctatcgcaccaccgacggactgggctatcacgaatatctgcagctggccgaggacttgggtgccaagccgctctatgtggtgaacgtgggcttgtggcacggaggtatgacgccctacgacagcatacagccttggattgacgagtgcctgaacgccattgagtatgccaacggacccgtcacttcgaaatatggtgccctgcgtgccaagaacgggcatccggagccgttcgggctggaatacttggaagtgggcaacgagaacaaccagcccgacccacgccagcagagcgaccactactacgagcgctacgaccagttctacaaggccatccgcgccaagtatcctgagatgaagatcatcggcaatgtggtggcttggggcgacgacaatccgaagtggaactccccgctgcccgtcgacctgctcgacgagcactactaccgctcgcccgactggtttgccggagccttccataagtacgacagctacgaccgccgtgggccgaaagtctatgtgggcgaatatgccgtgaccaatggttttggcaacctgggcaacatgaacgccgccttgggcgaggccgtctatatgatgggtatggagaacaatagcgacgtcgtggagctggcctcgtatgctcccatcttcgtcaacgagaacgatgcccgctggcggccggacatgattcgcttcaacagcagtcgcgtgatgggtacacccagctactatgtgcagcagctcatgcctcagcacattggtacacaggtggtgaaggtggtgcagaacgatccttacaaggacaaggcccgcaagcagctgacgccgaagcagagccgtgtgggattcggaacgtggggcacacgagcctcgttcgagaccgccaaggaggtggaatacatcaatggcgaatggaagaaggacggcaacaccgtcagtcagacgagtcgccgtgaagccaccatctgtctggagaaaaatgtcatcgacaacgaccactacac

SEQ ID NO: 1663 - DNA, 17141 bp, synthetic construct
  misc_feature 1..17141: note = Synthetic
  source 1..17141: mol_type = other DNA
acgagcgccacatcttcaaccgcctctacgacgactatttctaccatcgcaattcccagtactggcaacgagaggcaatgaagaaactcccccgtctggtggaggctacccgcatgctcgtctgtgccgaagacctcggcatgatacccacgtgcgtgcccaccgtcatggaagacctgcgcatcctctctctcgaggtgcagtccatgcccaaggagtacggactgcagtttggcatccccgaacgctacccctatcgcagcgtctgcaccatagacagccacgacatgcctaccctgcgcatgtggtgggacgaggacaagacaagggcacagcgctattactcccagatgctgggcagacgcgacgaagccccccaccctcttccagcctggctggctcgcgacatcatgttgcgcaatcttcagtcggcctccatgctctgcatcctctccctgcaggactggctcgccatcagcgacgaactcaagctcgccgatgccagtgccgagcgcatcaacataccagccaatcctcaccactattggcgctatcgcatgcacatcaacatcgacgatatgctcagcaaccatcgtttctgcgacgacgtagccgagatgataaagcaaagcggaagataagtttttggatatttaggcaagttttttgaaataatttttgtaactttgcacctcaacatccaaaaaaagaaccaattatataattatggcagacagattattcatctttgacaccaccctgagagatggtgagcaggttccaggatgccagctgaacaccgtagagaagattcaggtggctaagcaactggagcagttgggggttgacgtcatcgaggctggtttcccaatcagctctcctggcgatttcaactcagtgatagaaatatcaaaggccgttacgtggccaacaatctgtgcccttacgcgcgctgtggagaaggacatcgactgtgctgccgaagccctaaaatacgccaagcacaagcgcatacacactggcattggcaccagccccacgcacatcaagtataagttcaacagcactcccgaggaaatcatcgagcgtgccgtggcagccgtcaagtatgccaagaaatacgtggaggacgtagagttctatgccgaggacgcaggcagaacagacaacgaatatctggctcgcgtcatcgacgcagtgaccaaggctggcgccacggtgtgcaacatacccgacaccactggcttccgcaccccctacgagtatggtgagaagataaagtacctctacgagcacgtcgatgccttcgccgctggcaagtcgatactctccacccactgccacaacgacctcggcatggctaccgccaacaccatagctggtgtgctcaacggtgcgcgccaggcagaggtgaccatcaacggcattggcgagcgtgcaggcaacacatcgctcgaggaggtgaccatgatattcaagacccaccccgacctgggcattgagaccaatatcaacacgcagaagatatggcctacgagccgtatggtgagcacgctgatgaacatgccagtgcagccaaacaaggctatcgtgggcaagaacgccttcgcccactcgtcaggcatacaccaggacggtgtgctgaagaacacctctacttatgaaattatggaccccaaggaggtgggtatcgacgataacgctatcgtactgacggcacgctctggtcgtgctgccctgaagcaccgcctgcacatactgggcatagagatggaggaccaggagcatctggacaagatgtaccagaagttcctcgagatggctgacaagaagaagcagctgggcgacgacgacctgctggtactggctggcgtgacatcatccaaggagaaccttgtgaagatggagtcgctgcaggttacatcgggcaagggcgtgacaccaatcgccgccatcaagctcaagatagccaacgaggtgttcgaggctgctgctacgggcaacggtcctgtggatgcctccatcaaggctctcaagcagattatccatcgccagatggaactcaaggaactcaccatccaggctatcaacaagggctccgacgacctctgtaaggtacacgtgcaggtggagcacgaaggcaccgtttactacggcttcggctctaacaccgacatcgtgaccgccaccatggaggcctacatagactgtatcaataaatttaaggttgccaagatataaatttcaaggagttaaaggagttaaaagacgatacctgagacctcaactgtagtgtcctctaactccccttcactccccttaactccttaaaaaagaaactcccctataactcccctataactcctcaatacaattaatatgaatacattattcgacaaaatctgggacgcccacgtagtacagaacgtggaggacggtcccacccaactttacatagaccgcctctatgcccacgaggtaacgagtccgcaggctttcgacaccctgcgcgacaagggcatcaaggtattccgtccagaccacgtggtggctatgcctgaccacaacaccccctccgaccagcaggagcgcatcgacgaccccgtaggcaggaagcaggtggagacactggcaaagaactgtgccgagttcggcatcaaacacttcgccatgggcaccaaggacaacggcatcatccacgtagtaggaccagagaagggactctcgctgccaggcatgacgatagtttgcggcgactctcatacctctacccacggcgcagtaggtgcgcttgcaatgggcataggcacatcagaggtggcacaggtgctcgcatcagagaccatcctgcagtctaagccaaagtcaatgcgcatcaacatcgagggcgagctgcaaccaggcgtaaccgccaaggacgtggcactctacatcatggctcagatgaccacatctggcgcaacgggctacgtagtggagtatgccggcagcaccatacgcaatatgtctatggaaggcagactgaccctctccaacctctcaatagagatgggttcacgcgctggcatcatagcaccagacgagaccaccttcgcctacctcaagggcagggagtacgctcccaagggcgaggaatgggacaaggcagtggaatactggaagaccctccgaagcgacgacaatgccgtgttcgacaaggaggtgacctaccacgccgaggacatagccccacgcatcacctacggcaccaaccctggcgctggcatagccatcgacggcactgttcctacctacgactcagtatcagccgaggagaaggcacagctggaggcacagctctcatatatgcagtttgagccaggacagaagcttgagggcacacccgttgactactgcttcctcggagcctgcaccaacggcagaatagaggacttccgcgcctttgcatctatagtaaagggcaagaagaaggctgactcagtagtggcatggctcgtgccaggctcatggctcgtgcgccagcagataatagacgagggcatagacaagatactcgatgaggcaggatttgaactccgtctgccatcatgctcaagctgtctcgccatgaaccccgacaaggtgccagcaggcaagctctccatctcaacctccaaccgcaacttcgtaggtcgtcagggacctggtgcgcgcaccgtgctcgcctcacccctcaccgttgcggcatcagccatcacaggcaagataacagacccgaggaagttcttataattcacagttcacaattcatagttcacaattttataattcaactacagtggctaaagaaaaattcaacataataaagtcaacctgtctgccaataaacattgacaactgcaacaccgacctcatcataccagctcgctatctggcttccaccaccagagaccctaagttctttggcgatgccttcatgcacgacctgcgctatgatgccgacggcaaacccgtggcagacttcgtaatgaaccagccagcctactccgaggctccccgcgagggcgtccaccagataatcgtgggcggcaagaactggggctcaggctcctcacgcgagcacgccgcatgggctatagcaggctacggagtgagagtggtcatcagctcaagctttgccgacatccatcgcaacaacctcttgaactgcttcgtgctccctgtaatcgtaagcccagagtttcaggctgagctcttcgcctcaatagagaaagaccctcagaccatcgtgaccgtcgatgtgcctaaccagaccgtcaccaacgaggcaacgggcaactccgagaagttcgagataaacggctacaagaaatactgtcttgagaacgccctcgacgacatcgacttcctcctgaagaatcaggacaagatagttgcctgggagaacaagtgagttttctcaccagcaataaaacaataaccaataaaacgacattcttgcttatttgcaggagtgccgttatttttttgtgtctgttttcgagtgccacatttttttgtgtgcgttaacaaaaagaggattttcctgcaaaaaaaacttaaaattcaccaaactctcacccttcacccctccactctcaacaatttttattaactttgccaccagttttctactacaactactaactaacgaaacaattacatttcattttactacttattcaggaatagacgagagggcgaatagcctttttgccgatcgacttatatatataaaaatgaaatatagttttacactaattacgaactaacttaaacattctaacaaaaatgaaaaaaagtttactcgcaggcttaatgtgccttgctatgagcgttacatcagcatttgctggctctagtgcgtacaaatcatctgcctttggttatgccgcaggcaccactggcggtggttctgctacccctacacttgttacgtcagcttctgaactcgagaatgccctcaaggcatctggctctaaggtgattatcatcacaaaggacatcaccgtctctaaccacatctctgttcaggctaccaacaagactctgatggctgtgaagggcgtcaagctcatctccaaccagcagaactcttcctcttctggcatactctattttaagaaaggttcaagcaacatcatcctgcgcaacctcaccttcgtgggtcctggtgcttacgactgcgacggatgggataacctctgcttcgacggcgtaacaaaggcgtgggttgaccactgcgattttcaggacggctgcgacggcaacttcgacagcaagggtcttaccgataacatcaccgtttcatggtgtcgtttccgctatctgaagtcacctaaggcgggcggctcaggcggtaccgacgaccaccgtttctctaacctcatcggttcgtcttcttcagataagccatcagacggtaaatattccatgacgtgggcatactgctggtgggattcaggctgtgtggagcgtcaggcacgctgccgcaatgccaacctccacttcctcaactgtgcctggacctctgatgattctcactacttcgtaggtccgcagaatgctactgcactctttgacggttgctacttcatcaccccatctgcgcgtgtttcttcaagcaagaacttcatattctaccagaactacggcggcaccaatggctgcaagttcaacaactgctctggtccttctgattacatgaccaactcaggctctgtttcttcaccatcctacagctactctacacagaacgcagacgcagcttactccgatatcaagtcttactgcggcgctaccctcaccgtctcaacctctggctctgtatctgagagcggttcttcaagcagttcttcttcaagctcatccagcagctctagctcttctagttcttcaagcagttctagttcatcaagcgcatctacctcttcaaactacatcatagtaacggcaggcagcgcttcctctctgctctctgccatttcttcagccaacagccaggcatcttcaagcaagcgtgcatacatcttcgtacctaacggcacttacaacctcggcacagcatataacacaaaggtgtcatcatacgtcagcatcatcggcgagagccgcgacggcgtaatcataaagaacaccccatctaccgaggggctcggcacaacggctacgctctacaccactggcagcaacatctatatgcaggacatcaccctgcagtgccgcgcttcctacaactcttctaccaaggcagagcgcagcgtggcatggtgggaccacggcacgaagaacatgatgaagaacgtgaccctcgacggcacacaggatacctactggtctaacggctctgaaggtatgctcggttactttgagggtggctacatcaagggcaccacagacttcatctgcggttctggctccatcttcttcaattcagtaaacatctactgccagaacagcagcaacaagacatcaggcgactgcatcacagccccctctacctactcttcagagaagggctacgtgttccactactgcggcatcaacggcgagtcatcacaggctggcacttacaacctcggtcgcccatggcagaacagccctgcatcagcatggctcaacaccaagttctacatcaagcctacctcagcaggctggacaaccatgagctctggtctcgtacttcgtttccacgagtataacaacacctacaacggctctgccatcacctcccactccatcagtgcgctcggcggtgcatcaggttcagcgtctctctacctctcaagcacttcaggctatgctttaaccgacgtcctcggttcatggggcaatgaggcttacaactactgtcagcagctcgctgcgccaacggtaagcgtgagcggttccaagctctcatggtcggcagtaagcggtgccaaggcatacctcatcgagaagggcggctcatacgtggcaatcaccacctccacctcttacaccaccacgtcctcaggttcctacaccgtgcgtgtggctaactcaatgggcggcttcggcacggcaagtgcggcagttaccgttggttcttcaagcagtagttcttctagcagctcaagttcttcttcatcaagcacttccagctcagcttcaacctacaagagcatcagcagtcagaccatcttcaccgatttcacggcaagcggtctctctgccaactggattacgaacaacaacgtaacgtctttctctacctctggcaccgtgggctatatcaacccatcaacagaggcagtaggctctaccagctccaagactgcatgtgccgctgctcaggtaaagaatgtacgcacgctcagcttcaacgtcactggcgttcactacgttgtcgtttacgcattccacaccaacagctctgccacacgtaacctcgtgattaccgatggttccaagaccaagaccactgccgtagctcctaatggtgctgtcagctctaccttctatccatcaacctcaagcaacactaccgtcaccatctctaccgacgagtcaagcggcgtttacgtgtatgcagtgaagttcgtgcctaagacgtcagaggcttctgccaccacatgggacttcagccagttctcatctaccgtcacccttgctggcaacaactacaactactcctacaatggcctcaccctcgtgggcaacaccacctcgggctacaccaaggactatgtcaacaagaacggtttccactgcaacggcgcttcttcttcaagcatccgccacatcaagtacaccccgtcatccaacggcacgctgaccgtttacttccagtccaacaacgctactgacaacagccgcaccacagccataggcacagccgtaggctcgcctctcgctaccgcttcatgcgctgcaggccaggtatcagcaagcgtcaccgcaggcaagacctactacgcttacttcgtctctggtggtcagaccatcaccaagatagtgttcaccccatcgtcatcatcaaacgcactcgaccttgacatcgacgaagaggcaacaggcgtatcttcaattgaagaaaacggaaacgtgacaatgcagaatgaaggctggtacacccttgacggaaagagggttaattctcaattgtcaaagggtatctacgtcaagaacggcaagaagttcctcgttaagtagagataactcaccccactaactcatatatatacacacagaaaaaatcccgtcacactctctcgtgtggcgggacttttttactcccctttactcccctttactcctcctgtcgcttatcagccttacgtcggtcagccttatgtccgtcgtcgcctggtctatctgctccgcactcttgcgatacactatcgtggcattgtctatccttacgtcgtgcacgcatgagaggctcgccaatcccttagccttgatgcccgtcttgcatcccctgcatatcacgttgcttatatgtatgtcctgaaactcaggtatcctcttcagctgcttctccgtcagcgtcttgctcctcttaggcgtgccgtcagcatcgtggtcgctgtagtcacactggaatactatcgcctccttcgctatgtcgctcatcactatgtccgagacaaacagccgctccgtcctgccgcccctgccaatgccgctcttgaagcgcagccccgtgtccgtaccgtagaagcggttgtgcctcaccaccattctccgtatgccgctggtagtgttgctgcccagcacaaagcctccatgcgcatgatacaccgtgttgtcctgcaccactatatcctcacatccgttggcaggagcatccctcttcgccgtgctgctcttcatgcagatgccgtcatcgcccacgtccaccgtgcagcccactatcagccccacgttgacgtccgagaagtctatgccgtcgccgttctgcacattccacggacagcgcaccgtcatgccgtccactatcacgttacggcagttgcatgggtgcacatgaaagcgaggcgagttctgcaccgtcacccccttcagcagtatattggtgcagcctacaaaccttatgaggtcattgcgcatcgcctcatagcccttcggctcatccgctatgtcgggatagcggttcttcatcttccacggataccacagcgagccgtcatccgtcaccatgccccccatggcaagatactgcttccactccacgtcgctctgcttattcctcttcacaggtcgccactggcttccgttaccgtctatggtaccctcacccgtaatggctatgttggcacggttcaccgcatagatgcagggcagcacgcgctcctccctgtcgctcctgcccatgtacagccgcttgtctggcgagaaatatatcaaggcacccctctccacgtgcagctccgtgttgtccatcaactctatcggacctgtaatccacacccccgagggcaccaccaccctgccgcctccgagcgctgcaaggcgttctatggctgtgcgaaaagcgtccgtgttcagcgtcactccgtcgccctttccgccacaatccgtcagtctcacctcacggtcaggaatatcgggcacccttacccgagccacctccgtaggcatatccacataatacctgtcatactccccagcccatgcagtcatacatgaagccgcaaccatcagccagcaaataaaaaatcttctcataccgtatataatttataaaatttgccttttccaaacgtcatcggcaaaggtacacattttttccatatttcgtatgcggtttcggaaataatatacaaaaaaacgccctccggaagagagcgattaggaataaatccttcggcatatagccttattgtgataagatgtagaaaatcttatgttgcaaagttagtttttttttctttaaaaacaaaatttttgaagattttttgccgtacgtaaacaaaaaatcgtacctttggaggtagttttataacctaataacacaatgaaaagaattcttggtatagatactggcacgaacagtctgggttgggctgtggtagaacgaaatgataataacacctaccgtcttatacgaaaaggtagtctgatttttcaagaaggagtaaaaatagagaaaggtattgagtcttccaaagccgcagacagaacctcgcatagagcattaaggaaacactattttcgcagacgattaaggaaaattgaagttctcagagttcttgtcaaatttggttggtgtccaaaattaacagacgagcaattacatctttggcacacaaagaaacaatatcctaatagcgaggctttcatggcatggcaacgcaccaatgaaaatctcgaacaaaatccgtattactataggcatgtatgcttgcatgataaacttgacctaaataacgaagcagaagcatatatcctcggacgtgccctttatcaccttgcccaacgcagaggttttctcagcaatcgacttgatgcttctgaagaggacgagaacggaacagtaaagacggaaataaacaaactgtcacaagaaatagaagacgctggatgccaatatttgggagattacttttacaagctctatagtgagaacggaaacaacgtaagaatacgtaatcgctatacagatagggaggcgcactacaaaaaagagttctacgccatttgcaaaacgcaagaattatctgaacaacagataaaagcacttgagaaagctctatattttcaacgtcctctcaaatctcaacgtcagggcgtgggcaagtgtacttttgaaaagggcagacaacgctgtgctgattcacaccctgcgtatgaattgttccgtatgcttacgtttttgaacaacgttaaagtaaaaggaccacatgatatagaatttcgtccattgaataatgacgaatatgaaaaggctttacctatgttctacagaaaaagtaaagcaaactttgattttgaagatattgctaaagctatagcaggaaaggggaattaccaatacttcaaagatgaaggtgaaaagccctataaattcaattacagaatgtcacaaggtgtaagtggatgtcccaccacctcaagacttcgagaaatatttggagaagattacgcacagggaattgcagaagtatatagtaaaggtgcaggaaaagctcctgagcaaatggtaaatgatgtttggaatgtgctctattcgttttcagacaataacaaactaatgcaatggggcatagaaaatctgcaacttaacaaagaacaggcagaaaaatttagcaaaataaaactaactcacaattttgcctctctcagcctatgcgccataagtaaaatcattccatggttagagcaaggactatcttattctcatgctgtaagtatggcaaaaattcctgatatagtaggaaaagccatatgggaagaacataaagatagtattacaaaagaacttatcgacctcattaccaatttcgacccgaaagatgaaagtatgcaaggcactcttgactattgcataaaggactaccttaagaataattttgagcttaaggctggtgctacagacaagctgtatcatccttcgatgattgaaacatatccagatgcgaagccgaatgcaaatggaatataccaacttggctctcctcgcaccaatgctgtacgcaaccctatggctatgcgttcgctgcatcagctacgtaaggttataaacgaattgcttaaagaaggtacaatagaccaaaacacagaagtgcatattgaatatgcgcgccaactgaatgatgcaaacaagcggtgggctataggtgattggaataaaagtcaggaaaagaaaaagaaagaggcttctgacgaaataaaaaaactttataaggaagccactggaaaagacatagaacctacacaagatgacataacgaagtatctcctttgggaagaacagaaacatttatgtatctacacgaatgaatctattggcataacggactttataggttctaatccttcctttgacatcgaacatacgatacctcgcagcatgggtggagagagcgtaatgagcaatttgacactatgcgcaagctggtacaatcgtgacgtaaagaaagcgaaaatgccttctcaactcaacaaaaaggattatgaggctatacttgaacggatttctcattggaaggaagatattgaacgcctacgtaaagaaaaagacaaactccgcactcactctggaatggcaaaagacgtaaaggaccgtcttatacggaaaaggcatctaaaagatatagaactaaagtattggcaagacaagtacaattgtttcctgctcaaggaagcacctgaaggttttgccagaagacaaggtgctggcatcggactcgtgggtaaatatgcaggactataccttaagaccatcttccacaagaaagatgatagaacaaagactaatgtacgcactataaaaggttctactacagcagaattccgcaaaatgtggggaatacaagatgaatttgagaaaaaatctcgcgacaaccatattcaccactgtattgatgctatagtaatagcttgcattgatactggcagctataatgaggttgctcgttattatcagcaattagaagaatatgaacgtacaaaagacaacaaaccttcttttcccaaaccttggagtacgtttactgaagatattctcgcattaaaagatgaaatgcttgttgtgcacagcacacaggacaatatgccgaaacatgccaagaaacgtatacgcatagcaggaaagaaacttattgccaaaggtgatgctgcaagaggagcgctgcataatgacacctattacggagcaatagaacgcgatggagaaataaagtatgttgtacgtagagcacttagctcttttgaaaaagagtctgatttagaaaacattgttgatgatgccgtaaaggatattatcaagaaagctgtggcagaaaaggggttcaaaaaagcgctgtcagaagatattttcatgaatgaaagtaagggcattaagataaagaaagtaagatgctatgttagtggttctgtcagcggcaaacttattcctatacgtaaacatcgagataactcaaaatatgaatataaatctccgtattatgcagaaaatggggataactatatcatggctatatatgaggggatgaaaggtaagaaaaaacatagagaatatgagatagctaacatgatatactcgtcaaaatattttaatgaaagaaatgagctacctatactgcccgaaaaaagcgtaaaagggattcctgacttacctatcaaatatgtattaaggaaaggactacatgtaatactgtatgagaactctaaagaagaaatagacattgacaacaagacagacttaactcctagactatatattgtaacaggtctctctacgtctagcgttaccacaggtggtaagacctacaaatatggcatggtgtctctaagacatgctcaagaagcacggcctagcaatgaatgtaacgaaagaaagggcgtatataagaatggtgaagaatatcgagcgaaagcagtaatgaatcacaatcaattcaatgctctcgttgaaggtgaagactttattataactccattaggagacataaaacccatacattaaacttatgctgaaacgaaccttggtattctccaaccctatcagtcttagcttaaagaaccagcagatagtgatagcatataaagactcaccagacgaaaaggttaccgtacctattgaagacgttggtgtagttgtattagagcatcagcaaataaacgtcacacttcctttgctgaatgctcttactgacagcaatgtgcaattagttatatgtaacgacaaaggaatgcccaactcaatgttgcttaaccttgacacaaacgttacccaaggaaaaaccttgcgcaatcaaataaatgccggggaagttctaaaaaagcaactatggaagcaaatagttgaaggaaaaattcacaatcaggcaaacttgttagataaagtgggatgtgatggaaacattcttcgtccgtactactctaatgtaaaaagcggcgatagtgacaacagagaaggtattgctgcgagaatatattttcaggaactgtatggaaaagaatttgtaagagacaggaatctacctggcataaatgccttgctaaactatggatacaccatactcagggcagcagtagcacgttcactggtttcttctggactattccccgcacttggcatctttcatcacaatagaagtaatgcttttccacttgccgatgacattatggagccataccgtccctatgtagatgaagttgtttatgatttagcaaataaaggcaaacttgaattaacaaaagacgtaaaagcagacttgataagcatactatacgctgacacttattttgagaaagttatccgtcccttaagcgtcggtttatctctgacatcagccagccttgcaaaatgttacgcaaaagaggaaacaaaaattaagttgcctatgatgcaatgagttacgaacgactaaacgcatatcacatcatgtggctcttcgtcatgttcgacctaccagtaacaacaaagaaagagcgcaaagccgcagcactctttcgcaagaatcttgaaaaagatggattcgtcatgcatcaattcagcgtttatatgcgtttttgtggttctcttgagagcgcgcacgtccacataaaacgtgtaaaaagttttactcctgaaagcggacatgtgagtattctttcaataactgacaagcaatattctaatatcgttcacatttggggcaacattgaaaaaaaatctaaacctaccccactccaattggaatttttttaatctctctcctcggttgtcttatatcctgtatttccacatcaaatcacaaccgagaggggtgtcattactacggacacccctctgtcttatatcttgtttctacatcaaaccacaaccacgggtacgggtgcatcaacccgtgtaggttgtcttatatcttgtttctacatcaaaccacaacacaagaggtcagcggcatagaagaatcaacgttgtcttatatcttgtttctacatcaaaccacaactcgcacgatgttaacactacatcggatttgttgtcttatatcttgtttctacatcaaaccacaactgccaatggcatactaccattacctccacgttgtcttatatcttgtttctacatcaaaccacaacttgtcctcatcgagtgcaagctggtagttgttgtcttatatcttgtttctacatcaaaccacaacttgtcctcatcgagtgcaagctggtagttcgttgtcttatatcttgtttctacatcaaaccacaactcctctccctcggagttttctccgccttcggttgtcttatatcttgtttctacatcaaaccacaaccccagtcatctatgactgaatttgatttttgttgtcttatatcttgtttctacatcaaaccacaaccgttcctgattttagagctctcgcacactagttgtcttatatcttgtttctacatcaaaccacaacagggaactgcgcaagcatggactggagttggttgtcttatatcttgtttctacatcaaaccacaacggagacgtagccgttgaattgaaagtaaagttgtcttatatcttgtttctacatcaaaccacaacgtccacttctcgctcacggtggggtaggttgttgtcttatatcttgtttctacatcaaaccacaacaatccaacgtctcgcttttgggtgcatgatgttgtcttatatcttgtttctacatcaaaccacaacatgctgagcatcaaccaactcggagccctcgttgtcttatatcttgtttctacatcaaaccacaactaatcaagttaagtctcttcataagtcttggttgtcttatatcttgtttctacatcaaaccacaacccagcattatacggctgaaaaggtttataagttgtcttatatcttgtttctacatcaaaccacaaccgttgttgtgcctattggtggttatgttcagttgtcttatatcttgtttctacatcaaaccacaaccaaacctcgcagaccttggcgatgttggcagttgtcttatatcttgtttctacatcaaaccacaaccgtccactggtggcggttctcccagcagatgttgtcttatatcttgtttctacatcaaaccacaacccttgcgctctgcgcttctccatccgtgggttgtcttatatcttgtttctacatcaaaccacaactcgcagatggtggtattgttggaggagctagttgtcttatatcttgtttctacatcaaaccacaacatatattgcttatatccttatacatcatataattacaagaacataacattatataaaatggtagtgtagaaagttctactaggtgcaaaagtacaattatttattcaattctgcaaatctttttcataaactttatagccattgcctgatttgtctttataaggggtatttaactattgagagggagtacatggggagtgcttggggagagatagagcacgcagaaccgctgcttctacacgcagaaccaatggttctgcaaaggcatccatatactgtcatgcaaattgttgctaatcaatcgtttgcgcacaacaggctttgacggaaaatcagcaccgaaaagcctgaaaaatccctatcttcttcgccaaaatccatattcttcattcttagttcatcatccttcattaaaccccacagccgaggtttttaacacttccacgagcgtagcgagtttacttcctcttttactccttttttttactcccccttttttacttccgaaacttaaatcaattacagtattacagattacagttttctcatgagcacatcacacactaatgctaagaggaggggaaagaatagttaatatattttacattatatatataatatatatattatatatatataatgtaactttcttgttggcagattttacctacctcctaagaaactgtaatactgtaatctgtaatcaggttaatattgaaaatgtcttttcctaaaaaaggttgact

SEQ ID NO: 1664 - DNA, 16629 bp, synthetic construct
  source 1..16629: mol_type = other DNA
  misc_feature 1..16629: note = Synthetic
attattgtcaaaaattttcgcgcatgcgcgtatacgtgcgaagatagacatcttagacatcgaagacacgtattttgtgtgctcgcgtacattataaacgggcgcatagcctgcgtacctcaaagtccgcgcgctaattatagggtacaggtatatataataacctgacgggcgcgcggttatactgcgtagcagtcttaaacctataggtaattaggggaatattaaaggtcatgggctttctttcttttctactcttttctttatatagggggtgcagggggattagctttcttttctctcttttcatttcttttgatgtctaggatgtctaagttacaaaaaaatgcgtccgattgggcggctgtttttgtggaacgaagagtgaagaacgaagagcgaagaatccgatgatcaatggtttcaggttcgcggctggtcgccgcagacatccttctcggctcggcatagataagtgcggacttctctctgcgctcacctcgggcggatgttcaagtttcaggttcatccaactcgtctactcgtctactgaaattgtcaattctcaattctcaattagggcgcagcccgcattctgatgccggagttaaaactttgttttaaggactctgaggatattcagcaagcagtctgcgaggactctgccggtgtgtttttctaaatccgctgcaaaggtacaacatttgtattgcggtctaaaatattttggcaacttttttcgaaaattttttaagaggccttttttgtgatttttaatcaatgcgtttttggccaaaaatctcctaaaagcgaccactttttggggcgatatggcaacattttcagtataaaaatgacgttttttcatgagaaaatgaccactttgaccgcgtttttggcggttgcgggaggggttgtctccgtataggggtacgacctcacttttttgggcgtttttttgatttttttctttgtcgtttcgttctttttccgtacatttgtggcgaaaacccgatatttgatacctatgaccacagaagcattacatattttcgagatactggtgcaacacccggatggcatcacacgagatgaagtcaaccgacagctcatagaggacggagccgaacccgttgagcgcaagccgttcgccaaggctattgaaatgatacgtaaggaggctcgcgtcaccgttgaggcgacacgcatcggcggtttggagttcagctatcgtgtgccggagccccgcaacagcctttcccgcacagcgtccgttcttgcagcaaatatcgaggagaacaagtttctggaggaatgccgtttcctgggcaatcgcatccaacccgttgtcattttgcgcggtcgtgaattcctgcgcccgataggcaaggcaatgaggaagaactgtctcatgcgctgccgctatcagaagttcagcgatgtggagccctacgactgcatccttgctccctacatcctgaaagcctacgaaggccgttggtatctttttgccctgaagtggaacagcatggacgaggtgaatgagcatccaatgggcactcgcggtttgggtttgcaggcctttgccctcgacaggatgctgtcggcagagcagacggctgtgacgttcaagctctacgatggtttcagcgcttcaaggtatttcaagccgtatttcggtgtcttttgcgatatggagccgaagcctgtgaagataactgtcagggccgacgagaatgatgcgcactatatccgcactctgccgctgcactatacgcagaaggaaacggagcccggagtcttcacgttggagatgtgtgtcacgaaggactttgagatttacatgcgccgctatgagaacacgacgtgggaagtggaaggagaggtatgatggaagatgtaaaatgtagaatgtaaaatgtgaaagccatgaaaaagaagaatgatattgacgaaagcgttgttacctttgaggtggacaaggccgtgatagagggtgtgcgcagcggagagattcgtacgttgatactggatttgcgcgaggacaaccagaacattttcctggagacggcggacggtcatctcttacttgatgtagaggaactgcctaacgtttaccgcagctgctacttctggaacggcggcgtgtttccctacatcctaaagcggtcggttgaattttttgagcttactgccggggacgacagatgtctcgcacacatcatccgtaagacggtgctgcccggcacgcgcttcacgtttcagaagccagaagaacccggtgtggaagaccccgatggcgactgctgtgtgtggcaggtgaactacgacatcatccctctgcccgataagcctaagacctatctcatgcgttggaatcccgccatcagttctttcacggagcaggactatgcgcattgtgtggagcatcaggaggacggtcatttcttcatggattggagcatctacgaatggcaggaagcccgcaggggagatatattttatatgctgcgtacgggcgacgacaaggcgggcattgtgttctgcggtcagtttctcacagacccgtatcccggcgacgactgggcaggcactaacaggcggaggatgtatgtggatatggtgtgcacgggttttgtgaatccggaagatatgccccgcattccgcttgagagacttcagtcggctattcccgaagtggactggttgaatggccacagtggcgaactgctgtcagaggacgtcgtgagaaagctggataagctgtttgatgaagatgaatgatggaagagggtaaagagttaaaacgaaaaaacccctccagaagaggggttataggataaatccttcggcatatagccttattgtgataagatgtagaatgatttattctgggtgcaaatgtatgacaataaaaataaacaacaaaataatttgaggaaaaaatgtcaaaaaaacgcattttaggtatcgacacaggcacaaacagccttggatgggcagttgtcgaccgtaatgatgatgggtcttatagcctcatcaagaaaggtgtgctcctttttcaggaaggagtgaagatagagaagggaatcgagtcctcaaaagctgcagaacgtacttcgcaccgtgctttacgtcgtcagtacttccgccgccgtttgcgcaagatagaggtgctgaggaccctcattaaatataatctctgccctgcgttgtcggaagaagatttgaaactttggcatactcgcaaaatatatccgaagaaagatgacttcatgttgtggcagcgcacagatgaggacaaagacaagaatccctatcacgaccgatacatatgtctgacggagaaactggacttcaccaaggaggccgatcgttttacctttggccgcgcaatgtaccatctggctcagagacgtggtttcaagagcaatcgtctggacgagagcgaggataaagagtcgggtgccgtaaaagaaggtattgccgatttgtcatctgaaatgaaagctgcgggttgtgaatatcttggagagtatttctataaattatataaggacaatgccggcaaggtgagaatacgcacgagatatatagaccgcgaggagcactacattaaggaatttaaggcaatttgtgagaagcagaaattgtctgaggaaatgcagcacgatctctatcgcgccctttacttccagcgtcctcttaaatcgcagcgtcagagtgtcggcaaatgcacgcaggagaaaaagaagccccgttgcccgatttctcatcctctctttgaagaatttcgcaaactgggtttcattaacaatgtgcgaatcctcacaccatacgacaaggatttccgtccgttgaatgaaggagaacgtgccaagatagattatcttttttatcgcaagagcaaaccagactttgattttgatgacatagcaaaggcgatagcaggtaagaacaagtataagagtaaaggtgaacctggagacaagccatacgttttcactcatcgtatgagccagaatgtgagcggatgccccacagcggctcaactcagaggaatccttggagacgattggatgacagctcttgccgagacatactcgcacaatacgaagaaagacggcacgcccaagactcttgatgaaatggtcaacgacatctggaatgtgctcttctttttcgacagcaaggaaaaacttgcagagtttgctaaggagcagttgcagatgaatgatgaagatgcaaagaagtttagcgagattaagctgaagcgtgactatggctcattgagcatcaaggcaatacgcaacattctgcctttcctgcgtatggggttgattgtgccacacgctacctttatggccaacattcccaacattgtgggtgcacaggtgtggaacgacgaaacccagcgcgaacacatcctcagcgaagtacaacgcattctttctacgccgagagatgaaatcaaaaatatggagggcacgtttgagtattgtatcaaacaactgctcatgcaagattatggtgtgacggacgatgctgtggaaaagctctatcatccttctatgatagaggcttatcccgatgcccgcccgaataaggacggtgttatccttttgggcagtcctatgacgaatgctgtgcgtaatccgatggctatgcgttcgctgcacgaagtgcgcaaggtcgtcaacaatctcattctcgaaggtgttgtgtctccatcgacggaagtgcatatagaatactctcgtcagctcaatgatgccaataagcgcaaagctatcaacgatatgcagcgtgcaagggagaagaaggcccaggcagatgcagaggagatacgtcgtctctacaaggagaatacaggaaaggatatcgaacccacaccgactgacatcttgaaatatcaattatggatagagcaaaatcgcacttgcctttatacgggagaaagtattggtattcaccaattcttgggtgaaggtcctctctatgatatagaacacacgattccacaaagcgtcggtggagaaagcatacgtgaaaacctcacgctttgcaacagccattttaatcgttatgttaagaaggctaagattccatcgcagttggattgtcatctggatattctggagcgtataaagccttggaaggaacgatatgagtatattacaagtcaaatagataaattaaaaaaagggggacgtcgtgcagataaaagtgctaacgatagtcgcatccagaagattcatcgtttgaaggaggaacgtgattatttcaagaaaaaatatgaatacttcacgatgacggatgtgcctgaaggttttgctcgcagacagggtgccggcattggactcatttccaagtatgcaggacttttcctaaggagttatttccatgattctcagaatcccgataagcgccagatatatattgtaaaaggcgcaacaactgatgagttccgcaagatgtgggggctgcagaaggaatacgaaaagaagtcgcgtgacaatcatgtgcatcattgtattgatgccattgtgattgcttgcatcggcaaggcggaatacgacaggttggcaagatactacaaggcagaggaagaataccgttggcgcgaaaacaatgaggctcctcgttttgaaaaaccttggccgacattcacggaggacgtaaaagccatagcagatgagcttcttattgtgcacgacacgaaggataacgtgctcaaaaaggctaggaaatatgttcgtacaaccacgggtaagcacatggcaaagggggatagcgtcagaggtagtttacacatggaaacatactatggtgctattgagcgagatggtgagattcgatatgtggtgagaaggtctcttgacggattggatgtgaaggacgtgaagaatatagtggacgatgctgttcgtgccgctgtagaagaagccataagccgtgtaggaagtctcaaggatgctgtaaaggaaagcatcttccttggaggtaagactcccatcaagaaagtgcgctgcttcgcaaacgatgtgaaaacgcctgtggatattcgttctcagcgtgataagggcaggaaggattacaagcattcctatcatgtgaaaaacgacgggaactattgtattggtatctacgaaggaatggtgaaaggcaagccaaagagagattttgagattgttagccttttggatgcagcagacaagatgaaaaagggcggtaatgccacaacattactgagtcccgaaaagaacggaatgcctttgctttatcaattgaaggtgggacagcatgtgattcttttggataaatctgagggtagagatgtcgttttaccaaatccaacagagagattatacacacttgttggaatgtccacattaagaataaaacgtcagaatggaaagattgattcttatggtacaatggagtttagacatgctaatgaggcgcgtaaatcaagtgatttaaaatcaataaatggtgtatatgtaaagggagaaaaaaggcgtccgatgattacattacttcacaaccaattccatgcgcttgttgaaggcaaagacttcatcctttcacctttaggagaaatcacatatctaaatcaaaatgcttaaacgcacgattgtcataacagaggcttacaacctgtcgctcaaaaacgcccagatggttgtttctacgcgcgaaatgccggatatgacacgaactgtgcccattgaggatattggtttcctgatgatagaaaaccagatggcaacagcaacgatgccgttactcaatgcacttgtggatagcggtgtggctgtggtgttgtgcgacaagaagggtatgccgcatgccttccttgagaatatggatggcaataatatgcagggcgaaattctttcgcaacagattgccgcaagtgaacctctcaagaaacagctgtggaagcagattgttgaaggcaaaatctccaaccaggaacgcttactcaacaagattcacggcaatggtgaggcacttaaatccttccggatgaatgtgaaaagcggtgacagcgacaacagggaaggatctgcggctcatgcctattttccgctccttttcggtgccgacttcgtgagagatcgcacgcaggatggtattaatgccctgttgaactatggttatacagtattgcgagcagcgacagcgagagcactagtttcatcgggtctaactccagcgataggactttatcatcacaacagaagtaatgcatttcctcttgcagatgacctcatggagccatttcggcccttcgttgatgaaattgtctatggcttgtgtgaagaaggtaagatgaccatttgcaaagagacaaaggcagcactaataagtgtgctttattgcgacacgagttatccaaatgtgactcgtcctttgcaggtgggactttcgctcacaatggcatcgcttgcaaagtgctataggggagagcagaaaaaactttcgttgccggaactgaagtgagtgaagttagattaaacgcatatcgtatcatgtggttgtttgtgttctttgatttacctacggccacgaagaaaaacagaaaagatgctgcacgatttcgaaaaaacttggaaacagatggttttgtgatgcaccagtttagcgtatatgtcaggttttgcggttcgcttgaatctgcggaagttcatatcaaacgtattcgttcatttatgccagaagcaggtaagatgagtatcctttcaattacagacaagcaatattccaatatggtgaatgtttggggaaaattagagcaaaaattacaaaagaaaccagttcaattagaatttttttaatacctttgcaacgtaagatgctacttcaaggccacttcttatgccaaaataggttcttatcgcctacattttcagcggaaaagaagacataggttgtggtttgatgtagaaatgagataagatacaacgaataccacaatttaactccttccggagagttgtggtttgatgtagaaatgagataagatacaacgaagtggtggaaacggtgaacgttcattttgttgtggtttgatgtagaaatgagataagatacaacgagagcgcaatggtgagggcagcggacaatgttgtggtttgatgtagaaatgagataagatacaacgagcgtgagaagtttttccgctcgctgagtgttgtggtttgatgtagaaatgagataagatacaacataattaaagaacacatgattatcgtaaaggttgtggtttgatgtagaaatgagataagatacaaccgaagaggtgaagaagagtgtggcgaagagttgtggtttgatgtagaaatgagataagatacaaccggtgtagtgcctttggtggaaaagcactggttgtggtttgatgtagaaatgagataagatacaacaacatggcgggtgtgacactcgttgtaaaggttgtggtttgatgtagaaatgagataagatacaacctggtggacttgtcggagtgctcggtgggggttgtggtttgatgtagaaatgagataagatacaacctgacggataggttccaggatctcccggcagttgtggtttgatgtagaaatgagataagatacaaccgccggatcctttcagcttcacggtcatctgttgtggtttgatgtagaaatgagataagatacaacctacgcacgtcatttcgccgtgagaaggccgttgtggtttgatgtagaaatgagataagatacaaccgatagccttggggtcgtctttcagtttcggttgtggtttgatgtagaaatgagataagatacaacttatcttaccgtaggtaggtacagccaaaggttgtggtttgatgtagaaatgagataagatacaacgacgggcaatagcgagcttcgcagagtcgggttgtggtttgatgtagaaatgagataagatacaactacaccggactctcatacgcagacctccaggttgtggtttgatgtagaaatgagataagatacaacattcggaaaatacgggagcatccaggccggttgtggtttgatgtagaaatgagataagatacaactgggcaagcagcgcggccacttcaaggtggttgtggtttgatgtagaaatgagataagatacaactcatcgagcccgcatcgtctaacgagatcggttgtggtttgatgtagaaatgagataagatacaacccattcgggcgacaagtattagactattgggttgtggtttgatgtagaaatgagataagatacaacgccaccgtctccgtcattatcagcgccgaggttgtggtttgatgtagaaatgagataagatacaacagcgcagccgactctatgctgagcgtaacggttgtggtttgatgtagaaatgagataagatacaacatgaccgctgccgacatgtggcgactggtggttgtggtttgatgtagaaatgagataagatacaaccctcatggattctgcagcaccagtcgtatagttgtggtttgatgtagaaatgagataagatacaaccgaaaatagaataaggattaccagtcgtagttgtggtttgatgtagaaatgagataagatacaacacaccatctaaattaagaacgggagtatcagttgtggtttgatgtagaaatgagataagatacaacatgctaaacgaaattttcaataatcaataagttgtggtttgatgtagaaaagagataagatacaacctcactcgggagcagcaagagaaacttgctgttgtggtttgatgtagaaaagagataagatacaacattgacacgaagctgccgaggaagacagaaacatacatcgcactaaagtgcgctgaacaagacgaagaccaggagcgaagagacatcgcgctgaagcacaaaagtggacattttagacattttggacatgaatcttttgcgacatggaaaaaaacgtatatttgcgcaaaaaataagcgaagaatgatagaatacttcaagacaatagacgacaccggctcgggacgcaaggacgatccgcgcatgagagaggtggagagcgaaatgatacgcagccacgcactgtgcctcaagatatccgcaaagaaacctaccgaccccgactacaaagcactgctcgaggaactcttccaatgccgcatagacgacagcgtggcaatagtgtcgccattctactgcgactgcggatgccgcatgacactcggcaaaaacatcatcatcaacaaaggagccacgataatgtcgcccggaagagtggtgatagaggacaacgtgctgataggacccgacgtgaagatagtgacggtgaaccacgacctcagggacagacacaacctgctgcacttcggcaaggtgacggtgaaggaaaacgcatggatatgcatcggagccgtgatatgcccgggagtgacaataggacgcaacgccgtggtggcggcaggagccgtggtgacgaaagacgtgcccgacaacgtgatggtggggggaaatccggcgaggataataaaggaattggcatgagagcatattcatatatgtataaaaatacatgatttgtaaataaactctctgtaatcaactccttattatcaattttttttcgtacctttgcatacgattatggacatgcagaacatgatgaaggcctgcgaggagcgcatcagtgcactcagggcaggggatgcctcgctggtgggggataccctggacaacctcgcgccggaagctgaacgcatgggactgtacgtccagcagcacgaaatgcaggacctggcagtgaaggtgggataccccgacgactaccgccagataaaaagcctgctcacggagagcgaggcgatgtgcgagatagtgttcaggacattcaccctgcccataaaggcaatgctcgacgccattggactggaatatgaactggaataccgcatgaagtcggtgtacagcatctggcgcaagatgcgcaacgaccacaagacgtttgacgacgtgtacgacctcttcgccagccgtatcgtgtacaagccgctgcccctgcccgagatgcagccactgggagacgtcaaccccaagacggaacccttcatggacgccgagatactcacgtgctggaagatatacaacataatactgtcgctctaccgcatacaccccgaccgcatcaaagactgggtgacacaccccaagccctcgggatatcaggcgctgcagatgaccgtgatggggccggactgcaactggatagaactgcagatacgctccgaacgcatgaactacgaggcggaatacggatgcgcggcacactggaaatacaaggaagaaaccaacaacctctgaagaaaacaaacaaataaaacgataagcatatgatgacactgactattacatctgaaggcgacaagctcaacggagtgctcgaaggacgtctggacacagcgagttcacaacagttctcgatagacatgcagcctctgatggacggggccgacaagcacatcgtgctggactgcagcaaactggagtttatctcatcaagcggcctgcgactgtttctcatgctgcgcaaagccacaatagcaaagggaggagacgtgactatcactggtgtgtcgcctgaaatcaagcaggtgttcaccatcacgggattctactccctgttccacttcgcataaaatctgatacctaataaaaaaacaaattgagaggggcacccgattggatgcccctctctcatatctgtacgtgatatgtctgtctgcttagacaacaccctgagccatcatagccttggcaaccttcatgaagcctgcaatgttggcacccttcacgtagttgacataaccgtcgggctctgttccgtacttcacgcagttctcgtggatgttctccataatccacagcagcttggcatcaacctcctcggatgtccaggagagacgctcagagttctgtgacatctcgagaccgctgacactcacaccgcctgcattgctggccttaccgggagagtagagcagcttggcctcctggagcacacggatagcgtcgggagtggtgggcatgttggcaccctcagccacagcgatgacaccgttggcaacgagagccttggcagcctcctcgttgagctcgttctgtgtggcgcaggggagagcaatctgagcacccttctcaaaccaaggcttggcacctgccacgtacttggctgtgggatacttctcggcatactccttgatgcggccgcgatatacattcttcagctccatgatgtagtcgagcttctcgcgtgtgatgccgtcgggatcgtagatgtaaccgtcggagtcgctcatcgtcatggggataccacccagctggagcaccttctcggctgcatactgagccacgttgccggcaccggagatgagcaccttcttgccctcgatggtgtcgcccttggtcttcagcatggcacgcaggaaatatactgtgccgtagccggtagcctcgggacggatgagagaaccgccgaactcgcggcccttgccggtgagcacaccgctgaactcgtgggtgagcttcttgtacatgccgaacatgtagccgacctcacggccgccaacacctatatcacctgcgggaacgtccacgtcgggaccgatgtgacgggtcagctcggtcatgaaggcctgacagaaacgcatcacctcagcgtcgctcttaccgcggggagagaaatcgctaccacccttggcaccacccatgggaagagtggtcagagagttcttgaaggtctgctcgaaggcgaggaacttcagaatgcccaggttaacactcttgtggaaacggataccgcccttgtaggggccgataacgttgttgtgctggatgcggtagcccatattggtctgaatgttgcccttgtcgtccatccagctgacacggaactggaaaatgcgatcgggaatgcagaggcgctcgatgaggttcaccttgtcaaactcggggtgcttgttgtactcctcttcgatagtacccaatacctcttccacagcctgatgatactcgggctcgttggggaagcgccttttcaaatcttccaaaactttctttgcgtccatacctaattaaataatattatagggttaaacaaactttgtttcaaatttcacgctgcaaagatacgataaaaatgagaaataaaagcaaaaagacacaagaaaagtgtgaatctggaagaattttgtcacttttttgcttttttcgcttcctttttgacacattcggctatttcctggggtgaaaatgtcacgcggccggacatgaattcgggcacgttgtaggagaaaaggaggtcgcgatggtaggaggggtcgtcctgaggcaggcagaaaggcttggagaagtggccgttgccgtcgtgatgggcgaagaagggacgtgtgtagttgccgtcctcgcggcgggaggagaaaaccacccagcggccgtcgtgcgaccagctgtgccaggagtccacgttgtcggaattgagctgggaggccgggcgcggtgtgagggtgctgtcggagaggtcgatgaggcagaggtcggcgtcgccgtgccagatgtggaagacaccgtaagctccgcgcgtgaacatcagccagcgtccgtcgggggatatcttgggttcggtggccgaaagggaatcactctcggcatcatagacaagctggcgcccgccgaacgagagagtggccgggtcgaagggacggcggtagagattgtagcggagggtgcggaaactgcgtatgacatcctcgtcgcgtgtgatgctggtgtcctgctgctcgtagtgggcagaacagtagtagagccagcgcccgtcgggactccatgcggggaagcagtcgaggtcgttgctgtcgcactcgaggggatgcaccgtgttggcctccacgtcgtagaggatgaggtcggaataggtgtcctgcacctctatcttgttgagatgcttcgtgtggaacgactggccggtcttgttggtggagtaggcgatgagtttctccgtgggatgccaggcgggatagacacctccggagacggcgccgtccaccttgaggtccatcttgttgatgctgccgtccatggcgatgacagtgccgcccatgccctggcgcacgtggaactggaaccgctcgggattgccgcactgcgtgaaatggcagttgatgcactggccgtcctcctcgggggagtttatcatgttgccgtagatgagctgctcgtcgtagttctcaaggcagcgctgctgcagcgtgagattctcgtaggccacgtaggagggcgagatgagacggtagctgatgtaggggtcgatgctgtcgggggacacatagacagggaagggctgataggccgtccacttgccgtcctgctcgatgaagacgcgcacacagatgtcgcccttgctgacgagacgctgccactgagcgggagaggggcacacgtcgcggccggagagcaggagacgctcgtcgccggcatagaggagagtgacgaagtcgtcgccctcgttttctatggagaaatgcaagggagccatgttgcagggcaccgtgacaccgatatagtcgggatagacggtgaggggagcggaggtctcactgtattcagtaggcagctttgccgtgcaggcagagagcagaacgagggaaagcagcagattagttagtcttgacattgcgcacaaggaaatagaagtaatagaatgttttaccgaaagcggggcggaatcgtacggccttttcggcttcgctcatattggggcccaactgctggttgaaattgcagaaatcatagtaggtgcgcttcacactctcgtcgaagggcatacctgagatgtccaccttgccgggctcgagattgccgtagagataggctgcctcctgatagtgggtgggcatgcgctggtctcccagcagctgtgcgtagcggaagaaacggggccagaagagttcgatatcctgcatgatgagggcgcacatgagagtgagctcggcatagttcttgtcggctcccatgccgtgggagaaggtctgcaggagatacagttccacgagggtcttgtcgccgtcgaggcggtcggtgccgggaaggaggcgcatgatgaaaccgagttcctcgtcgtcccagcatttcttcttctctccgacgaagggcttgtacttgcgggcccagtcgccatgccacatcgtcttctcaagcaggcgcagatactttgccgcaacgccccagtcgccctcaacgagggccgccttcgtcatgtatttcaggtgggacacacgccagccgaactcgacggcgtcctccatgttccagcgggtgcagaaattctccttgcccacttcgtagtatatcattttgccgcccacctgcgtcatcttcacggggaagggggcgtgctgcagttcggcaccgtcctgataggtgaacatctcgtcgccggcacgtcccaggcgcagcagggccacattcttgcacatcaccatgatacgcgtcacaggcatttccttgtgaccccacgcggagggtttctccctgtagatgcgcagcacacgctcccagtcgcgctcctccatggcgagctggatacgtatctccttggagaaattggtgtcgcgataccacatcttatagagcgctgcactgtagccggccactgccgcgagggcgaggaggacgggcaggcgtttgtatctggcacccgtgagagcctccgaccaccgcgacagccagcagagcaggaagccgaggagcagaccgtagtagggtgcgtggtaaggccagaaataggtgtggtctccgttgcggtaggagggaagggctgtggaccacatatacttcagcatggtctctgcatacatcgtgcgatagtagatgaggggtgctacagcaatgattgaagcagcggctgccaactcgcagagactctgacaacagagaaccacggaaagaaaactccacgcacccatgaacgggtatgtcacgaaacccgtgaagacgatggcgcagaggcgcagccagcggttgccgggcagcgaacgcaccatacaggcgatgaccacggcgagggctgtgcccaacgaggggacgaagagcaggcccggcatcttcatgtagtatatccagtagccgttctgcgtcacagtggcgacaagggcgatgacgggaagcagggagagcaggcgcatccatccctgaggacggaagagacggtgcactccgagcagagtgatgctccacagcagaagcagggcgagggaacccgtccacggatgatagagtagttgggtgaaccaacatgagagccagaggaggagtcctccgggcagacgcatcatactgttgaggaagggtttggtgggaagccacagcgactgctcctgtgcaagccacatcatgtcgccttcagagaggtataagacacccgtcagcagcaaaacaaatgccacaacagcggtttgtggggcatattttgtgtattttttcatcattgtatcgcgctttgtcgcgcaaagttacaattttttcctatatttgtcctgcaatagacgtaaaaaacattacaatactt

SEQ ID NO: 1665 - DNA, 16408 bp, synthetic construct
  misc_feature 1..16408: note = Synthetic
  source 1..16408: mol_type = other DNA
taaccttgttaaccttgttaaccaaaaacaccaagtcaaccttgtcaactttgtcaacctttccagaaaaatatcatggttgactttgttgactttgttgaccttcgttttactgacaggggtgtcactttactgaaacggttgacacaattcctgatttggtttactttgtttaccaaagttaccttttgatgtagccgatgttgttttttgttgtccttgttgtctttataatctattctcttttgtccttattctatcctttgtcttcgtcttcgtagccttcagggcgtttcgttttcgtaggcgtcagcctccttccgtgtccatccgtgagcttttacttattacttattactttttacttccccgtcagggggcaggtgttatccgtggtcttttcattaaggcaccgtcgcgaaacgcgacaccccttgcatgggagtaacgaaacgcgacaccccttggggggtagttactgccgatacccctcaaaaaaaactatgttttttctttgcatattccaaggattttttgtaattttgtagtgaagtagaaaagacctggtaactaaggtataaatggttaagaaacactataggtatgtacaaacctccattcgatataacgtcagagatgcagcatctgatttccgagatatcagagcaggtaggtatcattaatatgaggctgggcgataatgtgccatctccccagttgcgtaagaaaagccagattaagaccatccattcatcacttgccatagagcataatagcctgtcgctgaaacaggtgacagacattatagaaggcaagcgagttatgggagctcctgacgagatacaagaagtgaagaatgctattgaggcctatcgcttgatgcccgaacttgatgccttcaaggaaaaggatttacagaaggctcatggactgatgatgaaagacctggtgaaacgtgctggttactatcgtcaggagggtgtaggcgtgtttgatggtaatggtaattgtattcacatggcacctcctgcagacagagtgccacaactgatgggtgaccttttccattgggtgagaacgacgaaagaccatccattgatttattcatgcgtattccattatgaatttgagtttatccaccccttcattgacggtaatggacgcatgggacgtttctggcagacgatgctgctttctcgttggaagggtatctttgcgtggctacctgtagagaccattgtcaaggaacatcagcaagactactacaatgtcatagctcatagtgatgcagcaggaaatagtactgcgtttgtggagttcatgttgaagtgcttgctggatgcaatggagaactatgaggataatgaagaagaagtagaagaactgcacgataaactgcacgataaactgcacgataaattccccgaactgtctgaaaaagcctttagcgtattagaagttttaaaaacacatcctagtcttactgctaagaatatcggtgagcaggtttctctttctgagcgacaggtcaagacgtatttcaatgcactgaaacaggctggtattattgctcgtgttggtagcaacaaaacaggctactggaaagtaattttgtagtgccattttaattatggcgaattcgccacaattgtttggtatgacagccaagcagtggcgtgataccaatcctgaattgaaaggcaacatccgtgattatgccaccatcaacgaacttatctgcctctcaaatatggagaatatcaatgccgtgctcatcaatgacggaatgccacagggagagagactcattaaactcaaccgtattgccattcagcagatgcaggtattggaaaacaatgatgacaggcgactgctgaagtaaagggggtcgtgaaatgcgataccctttgtgatggggtaacgaaacgtgacacccttttaggtgtgtcactattaatgacacccctaaaaactctttatagcaaactgaaaatgttgcgaatgttgcgcaacattttttctccactttttttgttgtttcgaaagtttttcttaactttgcactataacaagagaaacgtgatacgaaatcagagtgaataagcgttatgacatacttcaatcaatttcacaaggaaaagacggagcgttgtctgaagaaaatgaagacttggtacacaaagcctttatcatctgaggaagtccaagaaatagtgaaacgaatgtatgaaaatttacgcatagctcaggagatggagaaggagaatgcttgacgtttccgatgtcctccccaagaatttattgaaagactctacaggcgatttctttgtgatagatgtagaaatccaatccgcactctcttaacccccccataccagccacacctcccttttgtctttactttttccttagggggtcgcaaaacgcgacaccccttgcaggggagtaacgaaacgtgactccatagggatgtcactattaatgacacccctaaaactgaaaaggttgcgaaagttgcgaaagttgcgcaacatttttttctccactttttttgttgtttcgaaaatgtgaggaaataaatgcacaaaaatgccctccgaagagggcatataggataaaatccttcggcatatagccttattgtgataagatgtagaatatcttatggtgcaaagttagtcaaaaatatcaataccgcaaaattttatgcaaataatttgtattcatcattatttttgtgtaattttgacacttgaataactataacctataataattatgaaaagaatcctgggtgtagatacaggtactaacagtcttggatgggctgttgtagataaagttgatgacaaaacttattccttggtgcgtaagggtagtcttatatttcaagaaggcgtgaaggttgagaaggggatcgaatcctcaaaggctgcagagagaacttcccatcgtgcattgagaaaacaatattttcgcagaaggcttaggaagatagaagtgctaaaaactctcgttgagtttgactggtgtccttatctttctccagaggctcttcacttgtggcatgtgaagaagcagtaccccatgagtgagactttcatagcatggcaacgtacgaatgataatacagaggataatccatattattataggcatctctgtctacatgagaaattagatatgagcaatcaggctaataggtatatgcttggcagggctatgtatcatttggctcagcgcagaggtttcctcagtaatcgtctggaacagggcaatgacgatgaaacaggcaaggtgaaggaggctatttcgtctttgtctcagagtatgcaggaagcaggttgtgagtatcttggtgattacttctatagaatatataaggagaaaggaaatactgagcgcataagaactcgttacactgaccgcgaggagcattacaagaaggagttctatgctatatgtgaatgccaagaattgactgaagagcaaatctcaaagttagagagagcattgtacttccaacgtccattgaagagtcaacggcagggtgtgggcaagtgtacttttgagtcaaagaagcctcgcgtgtcagactctcatcctgcatacgaaatgtttagaatgttgtcctttgtcaataacatcaaagtcaaaggtcctcaggatgtggaacttcgccccctctctgctgaggaatatgaaaaggcgaagccgatgttctttagaaagagcaaacctcagtttgactttgaggatatagcaaaagccattgcgggcaagggaaaataccaacatattagagatgctggcgacaagggatataagttcaactatagaatgtcgcagagcgtcacaggctgtcctacaatagccagcctgatgtctgtctttggtgatgactatatgagcgctatagctgagcgttacacactctcagaaggtaagacgccagaacagatggtcaatgatgtttggaatgtactttatagttttaaggacaaggaaaatgtaaagcaatggggtagggagaaactgcaactggatgatgatgaagcggagaagttctctaagatacgattgacacatagttttgcatcactcagtcttgcagcagtcaataagattctgccttggctagaacgaggtctaatctattctcatgccgtattgatggcaaaagtgcctgatatagtaggaagggatgtttgggagaatcgtagtgaggaaatcacgaaggagcttctgtctcttatatataatttcaatccaaaggatatttcaatgcaaggcactttggacttctgtatcaaggatgttcttaaagatatgtgcgaactgaaacctggtgctacggaagtgctctatcacccatcaatgatagacacctatcctgatgctaagaaaaacgagcaaggcgtatatcaattaggctcgccacgcaccaatgcagtgcgcaatccaatggctatgcgctcgttacaccagctgcgtaaggttatcaatgctctgctcaaggatggcaccattaacagcgacacagaggtacacatagagtatgcccgtgaacttaatgatgccaacaggcgcaaggctattgctcagtggaataaagacagagagacgaagcgcaaaaaatatgcagaggatatacgtactctttacaaagaggaaacaggtcgtgaaatagaacctacggaagatgacatccttaagttccaactatgggaagagcaagggcgtatatgcctctacacgggcaatcagattggtattgctgagttcgttggtgctaacccaagttatgatattgagcataccataccacgcagtgtaggtggtgacagtacgcttgagaatatgacactctgctccagcaagttcaatcgtgatgttaagaaggcgaaactacctactcagttattcaatcacgatgagataatgaccaggcttgatgaatggcgtgagaagatagaaaaactccgtaaggacgttgaccacgtaaagactcattcaggtatggataaggcagtaaaagaccgtcttatacaaaaacgtcatctgctgaaactggaactcgattattgggtaggcaaatacaagcgtttccaaatggaggaagtgccagaaggttttgctcgcaggcagggagcaggtatcggacttgtaggcaaatatgcagggctttacctgaaatccctcttccacaaaactgacgacaggagcaagagcaacgtccgagtggtgaaaggtgcgactactgccgagtatagaaagatgtggggcatacaggatgaatacgagaagaagtcacgtgacaaccacgtgcatcactgcatcgatgccatcactatagcctgcatagacccaggcgagtacaatgctactgcaaagtactatcagcagttagaagaatatgagagaaataacgccaacaagcctacgttccccaagccttggccaacttttacggaggatataaagtctatccagcaagaaatgcttgttgtccatagcaccccagacaatatgccaaagcgagcacgcaaatatgtacgcacagctaatggcaagaaactcgcgcagggtgattctgcacgagggtcgctacataacgatacttactatggtgcaatagaacgtgatggtgagatacgttatgtggtgcgcaaagaactacgtagcatcaaagagaatgatgtggaaaacattgtcgatgaaactgtaaaagaaaaggtaaagcaagctattgcagagaaaggctttaaaaaggcaatggaagaggatatttttatgaacgaagccaaaggcataaagattaaaaaagtgcgatgttttaccccttctgtcactaatccactacatatacgttctcacagagatatgtcgctgagagaatacaaacgtcaatatcatgtgactcttgacggcaattattgtatggcaatatatgaagacgaggtaaaggggaagatgaaacgcacatatgagatagtaaatatgattgatgcagctaactatttcaaggatagttcaggtttgacaaaaaattatcctattgctccagaaactaaaaatggtttaaaatatagatgttctgtaagaacaggaactcagataatccttttacaatctgacgacgaagagataaatcttaatgatttagaggatattgctagacgtttttactatgtagcagttatgtgcagtgatggcaggattgtactacgatatagtcaggatgcaagagatgctacaagtttgaaaaaggaaaggaaatcaggcgcatataaggttggcgaacaatataggtcagagataatgctttctctttccaactttcacgctttagtagagggtgttgatttcaaaatagatgcacttggagaaataaagagattaaagtagattctcatgttaaaacgaactctggtattctcaaatccgatgaacctctcactgaagaatcagcaaatcgtcattgcatataaggattcgccagacgagaaggtaacttttttagtacttttgcccatgtaaaaaagtgtttttggaccacttcatataagcatgatagagtgtaacagtctgtatatgagtaaaataatcgctatatgttgtggtttgatgtagaacagagatataagacaactgagaagctcaagcctatcatagaccaggggttgtggtttgatgtagaacagagatataagacaacgcaacggaggcaacagcaccagcacagccagttgtggtttgatgtagaacagagatataagacaactataagtaccgcagcgtgcaaggcttcaagttgtggtttgatgtagaacagagatataagacaacattgatatgtatctccatgcccatcatgagttgtgatttgatgtagaacagagatataagacaacgtgctggtaatggcagctgtgctgcaggggttgtggtttgatgtagaacagagatataagacaacgctggtcaccaagttctggaaagaacaggagttgtggtttgatgtagaacagagatataagacaaccatttatacataaaagtgacttgtgaaagggttgtggtttgatgtagaacagagagaaatagaacacaggaacaggtgagtgttccactcaataataattccgcgaaatgtggactcatgaatgaacctgaaggaacgaaacgttccttcagctaaaatctatatttccccttaaaatttggaggaaaggaaaaaagtttgtaaatttgccagcagaaacgaaattatttgattatggctaaagcgatgagtgataagatagagtatatagtgctgcttgttgcggtgttcgctgctcagtttagagtgacggaggctgaggcatttcgctatctcagtcgctatggtgccatggatttgtgtgataaacattatggcattatgcatacactctcagtggaagagaatattaagacactgcatgagtattgtcaaatgaagggagggacactatgaaattgtatcttcgccaagggtatataacatttgatgaatttctcaatcgcattaagtatataaagggtataacatatcaatatgctttctgcacacagaaggctgtggatatcctcgttaaacaataagtgttaagtgactatgaacgtatcagagacagaatatcaaaatatgaaagagaatattgtgaaagatctcatttcccgcttgattgatgagagaggttacaatatgcagaaagcctttgatgctgtttataactcacgtgtttttgaaaaactcagcaatccgaaaacaggtttgttttttcagtcctcaggctatgtgtatagctatttatcagaggaacttttcgagggagcataatatctccagcacaagaatatagccactgtcgcgtttcgcgacggtggtttgttgtaattataatagtggaaaataattaaatgattgttaatttggcgctcatgtcaggatttttgattatctttgcattaaataattaggaattaggattaactaacaataaagaaagttcacgattatggctgaaacagttgatataagagaactaaacgttctgatagaacagcagagtaactttgttactaacctcactacgggcctcaacagggtgatagtgggacagaagcacctgatagagtcactgctcataggactgctgagcgatggccacatactgctggagggtgtgcctggtcttgccaagacattgaccataaacacgttggcaaagctgatagacagtaagtttagcagaatacagtttactcctgacctgctgcctgctgatgtggtgggtacgatggtttactcgcagaaggaggagggcttccagattaagaagggtcctgtgtttgcaaacttcgtgcttgccgacgaaataaaccgtgccccagccaaggtgcagagtgcattgctggaggccatgcaggagcatcaggtgaccattggcgacaacactatggctttgcctaagcctttccttgtgatggcaacgcagaacccaatagagcaggagggtacatacccactgcctgaggctcagatggaccgtttcatgctgaaggttatcataggctatcctaccatagaggaggagaagaagattatgcgtgagaaccttgctggcagtatgcctgagattctcccagtgtcaagtgccgacgagatactgaaggctcgtgaggtggtgaagcaggtgtatatagacgagaagatagagcagtacatagccgatatggtgtttgctaccagataccctaagcagtacggtctggacgaactcagtccgatgatcacctttggtgcttcacctcgtgccagcatcaaccttgccaaggcttcacgtgcttacgctttcattaagcgcagaggctatgtggttccagaggatgtgagagcagtggctcatgacgttttgcgtcatcgtatcggcctgtcatacgaggctgaggctaataatatcacaacagaagacatagtaagtcagattatcaataaggttgaggtaccgtgaacggaacggagttactttccaaggtcaggaagattgaaatcaaggcaaagggactgtcaaacaatctctttgctggtcagtatcactcagcattcaagggtaggggaatggcattcgcagaagtgcgcgactaccagtatggcgatgacgtgagagatattgactggaacgtcactgcccgttttcatcgtccttatgtcaaggtgtttgaggaggagcgcgagctcaccgtcatgctgctggtggatgtctctggctcgctgaattttggcaccagggtggagaccaaagccgagatggctgctgagatagcctcaacactggctttctcagccatacagaataatgataagataggtgtgatattcttctcagaccgtatagagaaatacataccaccccaaaagggcagaaaacacatactgtatataatacatgagatgctgtcctttgagcctgaatcaaagaagactgacatcggtgtggcactggagtttctgggcaagacgcagaagagacgttgcacagccttcctgatgagcgacttctacgaccgtaaggacttcgagaaaccccttcagatatgtcactcgcgtcatgatgtggttggcataagaatctacgaccagctgatggaaaatatgcctgatgtgggcatactgcgagtgcatgatgcagagacaggctacgagcagtatatagacacttcatacaaacccctgagaatgggccataacaaatactggagagagcattcggagagggtaagacaggtgtttcagcgtaattcagtagattatgtgagtgtggctactaacggcaattatgtaacggcacttcagcagctgttcgcgatgagagcatgatgcagttcatagttcatagttcatagtttacagtttatagttaacaaaagcagagtgaagtatattcttaacatattgttgctcatggtgttatcaattcctgttgcagtaaaggcgcaggggttggtagatgtgaagattgactctgttcagatacttgttggtgagcagacaggctaccatatatctgctacagtgaagccaggacagagggtggtgttcccacaatggaaacctcagcaacagataactcctggagtggaagtggtcgatgctccgataatagacacagtggatgccaacgatggttttatcaaggtgtcacaacacctggtgctgacatcgtttgaggataccctgtactacattcctaagcagaatgtaaagatagacaacaagaccctgcaaaccaacaacctggcgctgaaggtgctcaccgtagaggtggacactctgcatcctaaccagttcttcggtcctaaggatgttcaggacaaccccttcatgtggtcggagtggatagagctgttgtggttaggcatcgctgcagtggtgttatacatactgtgtctgttggcttatatcagactcaagagcaacaaaccgtttaagtttaaggtgcgcatagtaaagagaataccacctcaccagaaggctctcaacactattcaggcactgaagaacggaggaacagacagggcaaatacagaggatgaagtaaaggcatactacactgcactgactgatgccctgaggctctacatgcaagaccgcttcggattcaatgccaaggaaatgacctcggctgagataataagccacctgaaacaggaggaggaccagagcaaactgcaggagttgacctcactatttgagacggctgacctggtgaagtttgctaaatacactacagcgataagcgagaacgaccgcaacctcgtttcggctatcgacttcataaacaccaccaaacaggagaatgtgcctacggaggagcgcatagagcctaccataaccaagcaacagcgccagaccatgcaggcacgcacctggctgaagatatcaataggaataatgattatacttgctacggcaatcatagtgtatgtttgctggcaactgtatgatataagagcatgatggaattttcacaacccatatacttcctgttactgctgctgttagtaccatatattctatggtatgtgctgtggcgtaatcgtggaaagcataagatggaggcttcgctgaccataagtgatgccttcgtatataagaatgctcccatgagtctgcgtcagcgattcatacacctgccaatgataattcgttgtgcggctttcgtgctgatagtcacagccttagcacgtccgcaaaccagaaacgcatgggacaaccgcagtgtggagggtatagacataatgttggcaatagacatctctacgagtatgctgacacaggatctgaatcctaaccgcatagaggcagcaaagaatgtggcagcagccttcattgcagaccgtcctaatgacaatataggtctgacggtatttgctggtgaggcattcacacaatgtccgctgaccacagaccatgcctcactgctcaatctgctgaaaaacgtacgaccagaccttgctgctacaggactgataagcgatggtacggcaataggtatgggacttgccaatgccatctcgcgactgaaggattccaaagccaagagcaaggtggtgatactgttgacggatggtgccaataatatgggtgacatttcgccactgacagctgcacagatagctaagagtctgggtataagggtatataccattggtgtgggttcaaaacgtgttgcagcatacgagatagatgctaccacactgaagagcatagcagccactggcgacggaaacttctatcttgccacaaacaataaggaactgagacagatatacagcgatatagacaaactggagaaatcgcgcatactggtcaagaagttctctaagaaatacgaggcttaccagcctttcgccatcgcagccctgctcatgctgctgcttgagatgttgctgagactaacactgctaaggaggttataagagatgcatttttattcacctacatatttatacttgctcgccgtaatacccgttatggtgctcatgatggcatgggcagaatggagacgcagaaggaatataaagaaactgggcgacaaacaactcatcaatgccctgatgcctgatgcatcggctaagcgcagatggggaaagttcatgttgatacagataatcattgctctcgtagtaattatggtggctcgtccacagatgggaataaaggtgagccatgagaaacgtaacggcatagaggcactgatatgtctggacatctctaattccatgcttgctaccgatgtggcaccaagccgactgcagaagagcaagatgctgatagagaacctggttgaccacttcacaaaggataagataggactgatagtctttgctggcgatgcctatgtgcagttgccaatcaccagtgactatgtatcagccaagatgtttttgcagaatatagagccatcgctgattcagactcagggcactaatataggtgaggctatcaatctggctgcaaacagtttcacccaacaggagaatataggtaaggcaataatcgtaatcactgatggcgaggaccatgagggtggtgctatggaggctgccaaggaggcaagcgagaagggctataaagtgtttattctgggcataggcaaccccactggtgcaccaataccagtagcaggtggaggattccttactgataatacgggcaacacagtgatgacctcgctgaatgagcagatgtgtaaagacatagctgctgctggcaagggaacatacatacatgtggacaatacctctgctgcacaggaaagcctgaataacgaactcagcaagatgcagaaaggcgatatggagagtgtggtatattctgagtttgaggaggtatatcagtggtttggtatcttagccataattctcttgatacttgaggtagtaatctctgaaacggctaatccgttctttaagaagttctcgctatataagaagcgcaatgtcacggttttggctctgcttctgttgtgttccctctctgcaaatgcgcagaaagctgacagacattttataagacagggcaaccgtactttccatcagaatgttcaggagagtcctgcaaaggctgaggtgcagtatcgcaaggctttgacggctaaccctaataattctcaggcgatgtataacctgggatgcgccctcttggcacaaaacaaggactcgcttgccatggagatgttccaggcttcggctaaggctgaaacgagcaaacagagaaaagctatgtcatatcataatatgggtgtgataatgcagagacaacagcagtatggtcctgctatagagatgtataaggaagcgttgaggctcacacctcacgacaacgagactcgctataacctcgtattgtgccaacgtcagcaaaagcagaatcagaaccaaaatcagaacaaccagaatcagcagaataaaaacgataaaaacaaagataagaataaggacaaagacaataaggataagaaccaagataagaataaagacgacaacaagcagaataacgaccagaagcagcctcagcagatgagtcgtgagaatgctgaacagttgttgcaggcagctatccaagaggagaaggctacccagcaacgcctgaataaggctatgagtcagccccgtcgtcgtaacatacagaaaaactggtaagttttgaaaaaatatattacacatatcatattggctctcctgatgccccttgtagcctttgcacagaagataactgtgcaaggacctacccatgtggctgtgggcgagcagtttcagttgcgttatgtggtaaacaccacagacgtgaagaatttccacatgggtaatgtgcctgatgccttcgatgtgctgatgggaccaagcaccagtacccaacagagtttctcattcgtcaacggacatgcctctcagcagtcgtcagtcacctatacctatgtgttgatggcgaataagaacggcacattcgtcattccttcagccaggggcactgtagcaggcaataatgtggcttcttcagccctgaagattacagtcagcggaaaggctcagcaaggtggtggaggaaactcttaccctcagcaacaggctcgcagagtggatagagcaggagctcgtatctcaggtaaggacctgttcctgagagtttcagccaacaaacagaaagtgtatgaacaggagcctatacttcttacatataaggtatatactcaggtagaactgacagccctggagggtaagatgcctgacctgaagggtttccatactcaggagattcctttgccccaacaaaagacattccacatagaacgtgtgaatggcaaaccatataactgtgtcacatggagtgagtatgtcatgttcccccagatgacgggcaagctgacaattccgagtctgacgtttaagggaatagtgatgcagcagaatcctaatgttgacccctttgaggcattcttcaatggtggctcaggctatatagaggtgaagaaagacttcactgctccaagtgtgaatattgaggttatgcctctacctgccaagcctgctgggttctcaggtggagtagggcatttcaccatcacttcgtccatagacaagaacaaggtaaaggctggcgacccagtcaatgtaagggttgtggtcagcggagtgggtaatatgaaactcctcaagcagccagaactcaatgtgcctaaggactttgagaagtatgatgccaaggtgactgacaagaccaaactcaccacagatggtgtgacaggaagcatgatatatgacattctggttgttcctcgcaatatgggcaactacgttttgccaggcatcaagttcatatatttcgacacccagagcaataagtaccagacccttaccacccaaccgtttaatatagaggtagagaagggtaatggcagcagtggctcaggcagttactcacagtataacgataacgacattcacgacataatgtttggtgagaccaacagacaacacccttcactcaccttctttggctctaaggtttatcatggtgttatagcatccatctttgcagccttcgtggtattgtttatcatattccgcaagcgggctctggagttccgtgatgttatcgctatgcgaagcaagaatgctaacaaggtggcaaccaagcgtttgcgtaaggcaaacaagtttatgaaggcaaacaagaaggatgatttctatgacgaagtgttgcgagctctctggggatatgtcagcgacaaactcgctatgccaagcgaacagctgtctcgtgataatatctctgagacactcacccagcgaggtactccagaggaaactatcaagtcattcattacagctatagacgagtgtgaatatgcccgttatgctcctggcgaccctatgggcaatatgcagcatacctaccaactcgcctctgaggctataacaaatatcgacaaactatgaaccagatatatagaaaaaagactttacccttgagtctttacatattactttttattttttacttcttacttcccgtcagggggtatggggctcaagacaaggcgaatgcagatgctgcctttagctctggacattatcagaaggcgataacccactataatgctgccctgaagcagggacagagtgctgagacctattataatatgggtaatgcctatttccgtatgggcgattatccagaggctatgatagcctaccagagagcagcaagactaagtcctgccaatggtgatattaagcataacatagaaattacagccaacaagaccatcgacaggttgccagtaagttctgatgtattctttgttgagtggtacaaggcatttgtctgtcttctttccatcgataactgggctgttatctccattgtggcatttgctttgtcgctgatatgcttccttctgtatctgtttatggagcagataggtattcgaagaatatcgttttattcctcagtggtgcttacccttaccttcctgttttccatactctttgcctggcatcagcataaaatgctgctggcaaaggacaaaggtgtggtgacagcagagatggtgacagtaaaggcttctcccacacacaaatcctctgatgcctttgtcattcatgaaggaacatcagtaaacataaaagattcagacataaaaggatggtatcagatagaactctctgatggaagacaaggctggatgccatcagcctcagtagaagtaatttaagggttcaaaagttcaaagggttaacgttcccgtttaatagaaaatatgatagagcagatagacagatatttcattgattcgctgtttggcagtcagag

SEQ ID NO: 1666 - DNA, 15685 bp, synthetic construct
  source 1..15685: mol_type = other DNA
  misc_feature 1..15685: note = Synthetic
cggaggcaatgtcatgcgcaggcagtaagcatcgggacgcctgggagacatcggggccaaaagaattgcacggcgttggtgtatcagctccgtcatcttttgtccgtatcggtatgcagtggaatcaacgttgtatctccacgagatatgggagaacagttcggtgctgtctgtccttgatgttgctttgccaagatactgtgtactatcctgttgtatgtcagcatacgtggagctggaggataaggccaaggccaaacagaggatatgtcctttatacatggtcgatagtctacttggatatttcgaattgataatgcgtgctacatgcaagcaatcgcgtgcaaagttataacattatttttactttgtgtgccccgcgcccgttgaattttaacgaaagcggcctatttgtttcgtctcgcacccttggcacgccatataggttgttccacgaggcgtttggccttttcccgcgtggtgtgatagtgctccctgtggcatgtacgatttataaatcggtttattcgtttcggtaaacaggtttatggcgccgcatattccggttctttggggtagataaacccgaatatacggtcttattgccgtgtgtcgtcgcctctgttgtcatggtgtgccgttcctgtttccgcaggacaaaacaagtatatgtgtggatgttaaagtttgtcacaatgggccatagcctaaattaaagtatgttttgtttgcacattagcccgcttcttcgtacctttgtacacgtattatgtacagacaccaaacaataacttatggataaaaacactattacgggctttgcgctcattgctcttgtgctcataggcttcggttggtacagccagccctctgccgaggaagtggcacaggagcgggaacagatgcgccaggacagcatcatgcgtgcacagaagcagcaactggaacaaagggaggaagaaaggaaaacactggaactgttggccaagtcgcaggacagcacgtcgctcttcttcgaggcacgcaacagggcaggcgaggaggtggttctcagcaacggcctggtagacctcacgctgaacacaaaaggcggcagcatacagagtgccgacctccctcagtacaggaatcagcaaaaggagaatgtgcacctgctacgcaaagggctcagcgcgctcagctatacgctgacaggcaagggggacaatatcgacacccgcgactatacgttccaagccatcaatcgcacggacagtaccgtgaccatgcgcctgggcaacgaggcatcccatctggatatctgctacagtctgttgcccaacagctatgttgtgaagataggcatacaggcccatggcatgggtgccgtgttgcatccatccgcacgttcgttgaacatcgactggcatagcacggcggcacagcaggagaagggattctcgtttgaacaacagtattcggcccttacctataaggacacaaacggtgataccgagaagttgtccgaaggcaaagaagatagcgaggacgtggatgtgccggttcagtgggtggtattcaaaaatcagttcttcagctgcgccctgattgcgcaggattcattcagcaaggctacattcaagagcacaccatgccagaagggtacgggtgacttgaaacagtatgttgcaaccatggactgtgcctttgatcccagtggcgcaaaggcaacggagcttagtctctatctcggtcccaacgatttccacattctgaaggaacacgacgatatcattgctgctgacaaggacctggagctggaagacctcgtgtatctcggctggcccattgtgcgcatcatcaaccgctggttcatcatgcccctgttcgacttcctgaccggtttcggcatgaacatgggcatagtgcttctgcttctcacggtcattgtcaaggcggccgtatatcccaccacccgcaagagctatctcagcggtgcccgcatgcgtgtgctcaagcccaaggtggacgccctcagcgccaagtaccccagacaggaggacgccatgaagaagcaggccgagatgatgcagttgtatcgtgaatacggcgtcagcccgatgggtggctgcctgcccatgctcatgcagatgcccatctggatagctctgttcaattttgtacccaatgccattgagcttcgtggcgaaagtttcctgtgggccgacgatctttcggcatacgactcactgctgagctggaacacggatctatggctcattggcgaccacctgagcatcttctgcctgttgttctgtgccaccaatatcatcaacacctggatatccatgcgccagcagcagaatcagatgtcgggcgaacaggcacagcagatgaagatgatgcagtacatgatgtacattatgccgctgatgttcttcttcatgttcaacaactattccagcggcctgtgctactattacttcctgtccggcttcacaagcatactcatcatgtggttcctgcgtaagaccaccgacgacaagaagctacttgcccgcttggaggaatatcgtgccaagcacaggaacgaccccaagaaaccgggcggcatggctgcacgcctcgaggctctgcagaagcagatggaggaacaacagaagagaaacaaccgttaaggcgtgatttgcgccgtctccctatggcaagccattggacggggacggcgcaaatgcgttgtaatgcccgtcgggcaccgtcattcatgtaccttatattatattaaagacatatcattccatgaacaagatactaacagcaactctcatgtcatgcacccttgcagcctgtgcccctcagggcaccaacgacggtgcgaaggaccaaccgataggcaagaccattgagtttgccgactcggcccgttgcttcacacccgaggtcatgtggaagatgggccgcataggcgcctatcatctgtcggcagatgccacacaggccatctatggagtcacatactatagtgtggaacagaaccgcagtcactcggtgatatatgtctctgccgctgatgggcaaggcgaaccacgtttgctgaccacctcgaccggatccgagatgtcgccgtctttcattcccggcaccgaccgtgtggcataccttgctcctggcgaggatgaatcaggtgctatgcaactgtggatgatgagtagcgacggcacggatcgccgtcagatatcattcgagaccacgggagacgtgcaggattacctattttcgccatgtggcaagaaggtgatcctcatcaaggaggttgaacatgatgcatcggtaagtcctgtggaaccggaccttatgcaatccacgggcatcgtggttaatgacctgatgtataagcattgggaccactacaaccgtaccgcacctcatccgttcgttgcagacttcgacggtaacagggtaggaggggccaaggacttgttggagggcgaaccatacgagtgccccatgctgccattcggtggcgtggagcagttggcatggagcccggacagccgcagtatagcctacacgtgtcgcaagttgacgggtgtggactatgccatcagcacggacagcgacatcttcctgtacgatctggaaagcggttccgtcaccaatctgtgtaagcccgagggctatgtccgtcctgtctgcgaccccacacgctcattgcaacaccaggctgtcaatcagttccgggaagatgtcaatgccggctatgaccagaacccggccttctcgcccgacggaaagtacattgcctggagcagcatggaacgtgacggttacgagagcgatcgcacccgtctgtgtgtctacgagttggccacaggccgtaagtcatacgtcacagagtctcttgagacaggcgtcaacgagtttgcctgggcttccgacaacagcaccctctacttctccgccgtatggcacggacgcaccaatctgtattccaccaatctgcagggcgaggtaaaggccatcaccaatgatgtggccgattataccctgctcggagtgcatcccaacggtcggcagctcctgaccaagcgtcattccatgagccgcgccgacgaggtgtttcttgtgaacatagcagatggacaggcacagcagctgacccacgagaacgaggctttctatactcacttccgtttcggcacggtgcaggagaggtggatcaagaccaccgacaacaaggacatgctggcgtgggtcatcctgcctccagactttgattctgccaagaagtatcctacattgctcttctgcgagggtggcccacagtcgccggtcagccagttctggagctatcgctggaacttccaggtgatggcctcacaaggctacgtcattatcgcccccaaccgtcgtggtctgcccggcttcggcatggagtggctcgaacaaatctcaggcgattactccggccagtgcatgcaggactacctgtcggccatagacgacatcgcccgcgaaccgtgggtagatgccgaccatctgggcgccgtgggtgccagtttcggtggttacagtgtttactggcttgccggaaatcacaacaagaggttcaaagtcttcatcgcccacgatggtattttcaacacacagcagcagtacgtggagaccgaggagatgtggtttcccaactgggacatggggcaggcaccgtggcacaaggatgccaacggtcgacgtgccaaagtattcgagacttcaccgcacctatatgtcgatcgttgggatacgcccattctgtgtatccatggccaaaaggatttccgcatagaatacacccaggcagagagcgcattcaccgcggcacgcctgcgcggtgtgcctgcacagttgttgctgttccccgacgagaaccactgggtgctgcgtccgcagaacgccatgctgtggcagcgtactttctttagctggctggacaagtggctgaagcctgacgacggagttgcaaagaagacggaataacacactaacaaacataacctgatgaaacaacaaaagctaagcgattctccggcaatgcgctggacagccctcatcatcgtgtccgtgacgatgatgttcggctatttctttactgacgtcatgtcacctctggaacctctgctcacggcggccaaaggcacggaagacggtatggggctcggatggagttcttcggaatatggatggttctcaggcgcctacggcctgatgaacgtcttccttttgcttcttttcttcggaggcattatccttgacaagtacggtattcgtttcaccggcctgctctccacgtcgttgatgttctgcggtgcactcatcaagtattgggcagtgtcacgtgacttcggcgatgctacaatatgggttcctttcggtggtgatatacaagctcaggtggcatactccggacttggttttgccatatacggtgtaggatgtgagatggccggcattacggtgagtaaggtcatcgtcaagtggtttactggttacgagttggctatggccatgggattgcaggtttctttggctcgtataggttcagccgcaacactggccttctcactgccactggctaaagctttcgggggggtcagtgcatcagtaggactgggtgcggcctgtctttgtattggcatgatatctttcctggtctataatgtaatggacaagaaatatgataagtcatcctctgcatcgccggaggcaaagagccaagacgatggcttcaagttctcagagcttggcttgttgttcaccaaccgtggtttctggtacatcacgcttctctgcctcatgttctatgctggagtatttccgttcctcaagttcgcgaccaagttgatgatcttcaagtatggcgttgatcctggacttgctggaagtattcccgccatgttgcccttcggtaccatcttcctgacgcccttcttcggtggtgtgtacgacaggaaagggcatggtgccacacttatgatcattggttcagtccttatgacactggtacatgttacctttgccctgcctgtcagcaacgtgggtttggccattggtgtcatgattgtgcttggtgtagcttttggccttgtgcctgcggctatgtggccatcagttcccaaaattatcccaatgaggttgcttggaacggcctatgccgtcatcttctatatccagaacatcggtctggccatggtgcccatgtggataggttcagtcaacaataagaataccgatgccgctacaggcttcatagactataccgagtccatggccatctttgccggttttggcgtagtggccatcatcatatccgtgttgctgctcattgaggataagaagaaaggctatggccttgagaaggcaaacatggcccaatgatgttgtcataccgttctacctactgacctaatctatgatacacactatgaataagcgattcttatcagcactaatgctcctgctggtggtgatgaccaccatgggagccaaaaagccaaagtacatcttctacttcataggcgatggcatgggcatgtcgcccgtattgtgtgccgaaacgtataaccgtacagtactccacaacactcagcctctgctgatgctgcagtttccggtggtgtccatggctaccacatattcggccagcaataccatcacggactcggcggcagcaggtacagctttggccaccggacacaaaaccaacaatggtatgctgggacaaactcctgacaatcagtctgtgcagagcattgccacagagctgaaggagaaggggtatggtgtggccattgccacttccgtggctccggatgatgccactccgggagctttctatgcacatgtggcaagtcgtggcatgttctacgacatcaccgaggacatggcccgcagcaacttcgacatgtttgcaggaggaaaactgcgtggaaaggcaccggaaggcaagcccgatgtgcgtagcgtactgaccgatgccgggtacagtctggtggacggatccaagcagtggaaagagaagaagcatggtgataaggtggtgttgcttaatgctccttatcatcttgatcacatcggatatacaatagacagcctgagcgagaacctctccctgccgttcattactcaggcatgtatagaccatctggagaaggtgtcaccaaagcagttcttcgtgatggtggagggtggcctcatagaccatgccttgcatcccaacgatgggggtgccgcagtgaaggaggtgctgaactttgatgagtccatacgcttggcctataacttctatctcaagcacaaggatgagacacttatagtggtgactgccgaccacaataccggtggtatggtggccggagtaactggcggttcgtacaacttgaagttccgtaactacgacgcacagcgcatctccatgcaggccatgcagcacgagtgcaacaagatgaataagggcggacagatcatcacttgggagcagatgaagcaatacctgcaggacaaacttggattctactctgccatcaagctgagtgaaaggcacgaccaagcgctgcaagaagcattcagcaatacctttgtacagaagcaggacaagaagaagcagacgctttatctctctgttaaccaattcgtggaacgagccttccagattatggatcagattacaggcataggttggactacaggcggccacaccggtgatgtggttccggtatgtgccataggcgttggtagcgaactgttccaaggcttccaggacaacactgacatccccaataaaatacgccgtctctgtggaatagaggagcatggcggcaagtaagtcattgctctataccataacacaagtacccggacatgttcacatggtcgggtacttgtgtattatagccatgcaaccatcatgtgcggtaatggcatttgtcctttcatcttaaaaaagtcaccccggcattgtcacttccaatggtcattcctatctgttgaagagcatttcttggctcttttatgtgacggtctcatggcttttatctaaatttgccatggacaggtcatgttaaggtcagaaatataaacagactttgtgatatagtacggtgtggcaatggataagtcgtttatcaatagtaaatatcaactaatactaaactctgttactatgaagattaaggaagtacatgcaagagagattctcgactcaagaggtaatcccactgtggaggtggaagtaacgctggaaagcggagtgatgggacgtgcatcggtaccgagtggtgcaagcaccggtgaaaacgaggccttggaattacgcgatggtgataagaaccgctatttgggcaagggtgtccgcatggcggtagataatgtaaacacaaagattgcccctgtcgtcattggcatgagcgcattggagcagcgtagaattgacacaagaatgataaggcttgatggaacggataccaagcagaacattggtgccaatgccatacttggcgtttcattggctgttgccaaggctgctgccaattatctgaaacttccgttgtaccgttatcttggtggcacaaatacctacacgttgccagttccaatgatgaacatagtcaatggtggtgcccactccgatgctcccatagcgttccaagagttcatgatacgccctgttggtgccacatctgaaagggaaggcatccgtatgggggccgaagtgttccacaatttggccaagctcttgaaagcgcgcggtctctctacggcagttggcgacgaaggaggttttgccccggcattcaatggtatagaggatgctcttgacaccatcatagaggccattaaagcggctggatacgaaccgggaacagatgtgaaaattgccatggattgtgctgcttccgaatttgccatacagaagaatggtaaatggttctacgactatcgccaattgaagaacggcaagaaaaaggatcccaatggcaggcttctctctgctgcggaacagattgactatctggaacagctaatcaccaaataccccattgactccatagaggatggcctggacgaaaacgattgggacaattgggtggagttgaccagacgcataggtgacagatgccagctggtaggtgatgatttgttcgttaccaacgtgaagttcctggagaagggcataaagatgggagcggccaattccatacttatcaaagttaaccaaataggaacattgtctgaaactcttgacacaatagaaatagcacaccgccatggttatacgactgtaaccagccatcgttctggtgaaacggaagatactacgatcgctgacattgccgtggcaaccaactcggggcaaatcaagacagggtccctcagccgtaccgatcgaatggcaaagtataatcagctgatacgcatagaggagcaacttggtgaagaggtacgttacggatatagactcctttgattttggccatgcttgctatggtctctgatgattttcactgacctcaagtgttagagtgctgaccatagcgcacatttgtccctaccagtctttctgcgaaagtctattggattttctgccaaagactggcaggttttcattcttgttgctacattatacttgttttctaaataatcaagatatacctcaagaccataaggccgtttcatttataccctaattgctctataaatatgttatgcagcaatgtcgggattgatattaggtaatttacttggttatgtgcctatatatttatacctttgacagaaaaccttattggtttgatgcattcaatgcatgggagtacagatgtactaaggccgatgtcatacaaaaactccctccgaagagggagtataggaaaaatccttcggcatatagccttattgtgataagatgatgaataatgaatcttatacgctgcaaaaataaggataaatacttgaatagacaaataaataattgggaaatatcatgaaacaacgtattttaggcctggataccggcactaacagtttgggatgggccattgtggaccgctatgatgacaatcattatgaattggtaaagcaaggtgtgctcatctttcaggagggagtaaaaatagagaagggtatagagtccagcaaggcagcggaaagaacatcacatcgtgctttgcgtcggcagtatttcagacgcagattgcgcaagatagaggtgctcagggtattgtatcggcacgatttgtgcccggctatcggcgaggaagacctcagattgtggcggtcccgtaagatatatcctaccaagcccgagtttatggaatggcaacgtaccagcgatgatgaagaccgtaatccgtatcgttgccgatatatatgtcttaccgagaggctggacttggataaacgtgctgaccgctatgtgcttggcagagccatgtaccatctggcacagcgcagaggtttcctaagcaataggttggatacaagcgaggacaatgcagagaatagcccggtcaagcggggcatagcagagctggacaacaaaatgtctcaggccggttgccggtatttgggcgaatacttctaccatatatataaggaaaaggggaataccgagaggatacgtgtgcaccataccgaccgggagaaacattatcgtgctgaattcgatgctatatgcaggcagcagaacttgtctgaggagttgcggaacgagttggagcgtgccctctatttccaacgtcctctcaagtcccaacggaaaagtgtgggatgctgtaccttcgagaagggcaagccgagagcctgtacatcacactatgcttttgaggaatacagaatgttgtccttcataaacactatccgcatattgacgccatacgacatggaacctcgtccacttagcgagacagaaagaaatacgatagagcctttgttctatcgtaaaagcaaggaaaactttactttcgaagatatcgccaaagccattgccggcagaggcaattatatgactatgggggataggggagatagggcttacagattcaactaccgtatgacacagggtgtcagcggctgccctactatggcacaattgcgttctgtttttggcgatgactggatgcgtgggatagccgaaacctatgtctgcaacacacgcaaggacggtacacaaaagactgtggaggagatggccgatgatgtgtggaacgtacttatgttttttgacagcaaggagaaactgaaggaatttgccataaacaaacttcaattggacgaagagaaggccgataagtttgccaacatacgcttgaagcatgattatgcatccctttctatcaaggcaatacgcaacatattaccgttcttgcgccgtggcatgctgtacagtcatgctgcattcttggccaaagtacccgaaatacttggccaagaccgatggcaagatacaattgtgcagcaacgtattttggatgagatggataggctcatagatgctgccgccaacgaaggcaaagagagagggactgtaatagaaacagctctcaaggattttctgaataaagagttcagtatatccgtgcaggctttggagactatgtaccacccgtcaatgatagagacctatcctgacccgcgcccaaatgaggatggggtcattctgttgggcagcccgagaaccaatgcgctgcgcaatcccatggctatgcgttctatgcatcagttgcgtaggctcataaacagtttgattttggaaggtcttatagatcacagtaccatagtgcatatcgagtatgctcgtgaactgaacaatgccaatcagcgtgctgccatatatgattggcaacgccaaatggacaagaagcacaaagaatatgccggcactatccgaaaggaatgtaatatagagcctacagagatggacatactgaagtaccaattgtggaaggagcaggaacgcatttgcctgtatacaggaaagcagataggtgtcaatgactttttgggacccaatcctacctacgacatagaacataccattcctcgtagtgtaggtggggatagtacacaagagaatatgacgttgtgcagtttggactacaaccgtaatgtaaagaaggcacgtataccatcggaattaccaccgcaagaatatgaggccatcatcgaacgcatccagggatggaaagagaaaatcgaagaactctccaagaaggtggaccgcctttcgcatggaagcgaaacgaccaaagaagccaaggacaagcgtattcaaaaaagaaatctggtaaagatagaactggcttattggcggggtaagtatgagcgttttaccatgagggaggttccagagggctttgcacgccgccaaggagcaggtgcaggcctgatatcaaagtatgcgggtttgtatctgcaaagttatttcaagtccgtggagcatcctgagcgtaggcagatttatattataaagggaaccgcaacagccgaattccgtaagatgtggggaatacaggaggcttatgaaaagaaatcgcgtgataatcatactcaccattgcatagatgccatagtaatcgcatgtataggtaaaagagagtatgatgcaactgccaagtactatcatcagcaggaagaatatagatttggccaggatacaaaaccgaatttccctaagccttggcctactttcacagaggatgtaaaacgcatatccgatgaaatagcagttgtgcataatacaccggataatatgccaaagaaggcttcacgctgcattgatgtcacaggcaagggtaaggtggtggcaaagggtgattgtgcgcgtggcagtttgcacaaagatacctattatggcgccattaaacgtaatgaagaaatacggtatgtggtaaggcgcgagttatcttcatttgagaagctttctgacatagacaatattgtggattacgcagtgcgtgagaaagtacgtagtgctgtggagggtagggattttaagaaggccatagcccaacctatatatatgaacaaggagaaaggtatactcataaaaaaggtaagatgctacgcaggaaagccaacgcttgatattaggcatcaccgtgaccaaagtactaaaccatataagcagcggtaccatgttgttaatgacgagaattattgtatggcaatatatgagggcgtagtaaagggcaaagcgaaacgtagcttcctattggtaaatatgctggatgctgcatctcatttcaaacaaagcaatgacgataggacggaggagattgtccccttgtctaatgcgtcggattggccattgaagtatgtactcaagataggtactaatgtactgttttatgaaacctatccacaggaggtgcatgaggctgataataaggaattggtacgaaggctgtataaggttgttgggatgagtaggaagaatgtaagcggttataaatacggagagatagtattgagacatgtggcggaggcaaaaccctctaaagagataaaatatcagaatggggtatatcgccaaggggaagaacctcgtgcgggaataacaatgctccatactcaaatcaacgctcttgttgagggatatgactttgacataactcctattggtgaaatcaaattcagatgatatactatgcttaagcgaacccttgtattttcgtcaccgatgcagttgtctttgcgtaatgctcagttggtggcttccattaaggaagctcccaacgagcaacgcactgttcccatcgaagatatcggaatggtgatgatagagaatcagatggtgtctattactatgcctttgctcaatgcattggtagatgggggagtggctgtcatattgtgtgatgcaaagggcatgccgcatgccatgatgcaaaatatggatggaaataatctgcagggggcttgtcttcgtaaccagattgctgtcggtgaggtgatgcgcaaacaactgtggaaacaaatcattgaatccaaaataaggaatcaagctgccttgctggataaagtccatggtactggtgatgtactgaaaccgtattacaccaatgtcaaaagtggtgatgtggataatagagagggcattgcggcacggatgtattttgctcaattgtttggcgatgagttcgtcagggataggaaccttcctggtattaattcattactcaattatggctatagcgtattgcgcgcagccacggcacgtgccttggtatcgtccggacttactccgtctttgggtatatttcatcataatcgtagcaatgcgttcccgttggcagatgatttgatggaaccatttcgcccgtttgtagatgaggctgcatacggattgtgtgaacgcggaatcatggatgtcaccaaggaggcgaagttcgacttgataagcgttctctcctctgatacatactatgttaaggtgacgcgtccattgcagatcggattatcaatcacaatgtcatctctggcaaaatgttttgcgggtgagcaaaaacaactgtcattgcctatgttgaaatagacttgtcgcccatcccacacggatatcgtatagtaatgatgtgctaaacaaagcgcagttaaatccgccccaagagtgagtactatcagattaaacgcatataaaataatgtggctcatagtaatgtttgacctgcctacgcagaccaagaaaaacaagaaggactctgctctctttcgtaagaacttggaaaaatcaggctttgtcatgcaccagtatagcgtgtatatgcgtttttgcgcatctttggagtcggcggaagtgtatataaaacgggttcgttcttttatgccatctgcagggagggtcagtatcattactgttactgacaaacaatactccaatatagtaaatatatggggtgcgactgagcaaaaaatacagaaaaagcctgtacaattagagtttttttgatatctttgcatacagaatatcggtcctcattccacttcatataagtaaatgccattgctaatgtgatgatatatgcgtaaatacaggctatatgttgtggtttgatgatgaattaggatatacagcaacagcaaagccggcaacgtatgcacacatttgttgtggtttgatgatgaattaggatatacagcaacgtatttgtctccattgtgataccctttggggttgtggtttgatgatgaattaggatatacagcaactggtatggggtacaaggtgatttcacaagtgttgtggtttgatgatgaattaggatatacagcaacttatatggccggcggccacatcatcggccagttgtggtttgatgatgaattaggatatacagcaaccgcccaaagtcaggacacaaaccttcgccagttgtggtttgatgatgaattaggatatacagcaactaagtacggcaaaggcgtgaaggtatccgcgttgtggtttgatgatgaattaggatatacagcaacttacttaaaagataggctatggatgaattgttgtggtttgatgatgaattaggatatacagcaaccgaagaattatcctctagtcgttctttatcgttgtggtttgatgatgaattaggatatacagcaacttagtccagcaacaaaggaattaggattagttgtggtttgatgatgaattaggatatacagcaac

SEQ ID NO: 1667 - DNA, 15609 bp, synthetic construct
  source 1..15609: mol_type = other DNA
  misc_feature 1..15609: note = Synthetic
atagaaaacttaatattccttgcataatgttattacgcatactctgatcgttgatacattcgaaagggaatcccattacaaaagttttgtggcgttcagtatcacatgcaactgctgcagaagttccattactatatgtcatagcacagaaagcgttatccgtaggctgtaatatatcagtgtgtgttgcagcatagtggtcgggattgatatttctataaaaatcaaaatttaatcctaagccagtcgcgccattaatagaatcagttttaatttgtttgtcgtaagtaacgtgtaacgttttattaagccactctgtttcttcactatttgtcatatcagagccgatgtaagctccgctggcaaatattcgccccccactatgtatataagatgataataatctttgcattgtgggcgtaaaacttttataatagctaacagcgtctggtgtatacttttcaagtccaagaattaaatcaaccacaggataattctcaagtttaacactcccattttcgattgctgttgacgagcaacttgcaacattatattgtggtgttgatgtaatcgcagacacgtggctcatgatatagttaaagtcgtttcctgctacaaattttccagctaattcatttccactatagcccagtccgctgctcccctctatgcccatacgcgacttatcaaagttgatttgttggccgttccaaccagctgtagctccatagctaacaccgatatcgctatcaagatcaaaaccttgctgggtatcattattaataattgcaggggcggacaaacggtgaaagccattgacaactaacacagtctttgtagccattgggctataaaatgcagatacgatttcagatgaaaaactttcgccacctctatttgcagctgtgaccttaaaattatattgcatggaaggtagaagttcaatagtaatagaattttcttttactttaataccattgtcaaaaccaacgcctccaatagatgtgtaaagaatatagtgagatggttcagctgttggctctagttcgtcaacttttctattccacgaaatagtggccttatttccatttaattgtacagaaatattctggggtgcaagtggagcaatgattgtagcattgccatgcatgtcgtttacgtaacgtgcaatagttttataaactgagcgtgctaacgtaaagcgaaagttgggatcttgccccaaaatcatatcagggaaattttgatgtgacaacgtttcaaggatggcagaaggcacttctggtagccttgtttcagaatagtttttatcccatagatatcttctgttccattctttatacttataactaagatctctagtaacgccattaagaagcatatctgcaaaaatcttagagctttgacgtgttatacctgatgcaagacgcccgtcattgaaatcggttgtgcaaatagttaaggagcctatcaagccttgtccgtcttttgcatatcctgcatcgctatgtacagcaagagataattccatgggaacacctttgccttcggttgtaggaacatatacagagccacctgctaaccagtttaacatctttgatcgtgcattaatatcatctgcataatcgtctgtgccttgtcgaccgctatagatagagtagggagcgcctgcccattgtgcgtagtaacgtgctccttcaagcgcacgaggatagttgctaagtgtacctcctctttcaacattacccattcctccaccaaatctaacagcatctgctgtaactattccttttttatgactttggtttgtaagcataacacaattgtttatgctactacctgcatcaaaggtgaaagtaccaagataaacccatgttccaccacccattgtttggtttaccttaaattctgtagcctgtccttgatgaaagactgtataatgtgcgtcatcaatgctcttaggaagtgtttgataactaacgtatacagcgtattggtcagtctttgaaaaatgaggttgccactttgcataggctttactattttttttagttgtctttatctgacgaaaatatccagcttgaaaagggttttcattatcaagataattgccattgtgagctgcaaagcctgaaatagaagaggtttgccaggctgataattcggaatactctcgatagttatctgcagatgtgtttaaccctccatcaggatcaacaatatactccattgtttgccaatcgcgttcacgtggcgtgaaaacaatagccccagccttttcaagcatgggtataagataaggcacaactatagtttgtgtataaagatcttctgtggttccaaataatgcaggcctctgccaggtccattcgtttttgttattgttaaagtaacgtccatgagaagcccatactgaaatatggcgtccttctaagccgtgtgaaaagttaataggtcttgaaatattggtaacccacggctctccttcatatttaattttaccccaaagtgcatatccatcattaactttcttagtgtgaccaggaacataatattctatgggcataccattacatttaatggaaagatcatatttccttatatgctttggtaaaatctttgtaatatgcttatagattttactaactaacttgtcagtaaagtcttgttgagcaaaactaccatctacaataacagtaattttttgtttgttttcatcaattaacagctctttaaaataagatgaatgctgagctgttgttatatctttagatgtgtaagtagagaaatatgttttaatatccctttctagagtgctccgcaggtcagaaacttgggcataagaattaacagaaagggctaccaaatagaggaaccaaataagttttttcttcatttattatatattacctatcataaagttctcgggatatttccctttgaaatttttaaaataagttttaacttctttcatttctgagtcaatatcccctgtaggaattatactttgtgtgcattgtatgagtttcttctcatagtcaacaccataaagaagaattgggatttgtgcttttaaagcaatataatagaatccctttttccaatctgtattaggtgagcgagttccctctggggtaatgcatattttaaaagagtcgcgtgtacttgcttcatgagcgatagcatctgtcatactagtatgttttgaacggtgtacggggataccacccatatggcgaaaaatgacgccaagcggccagaaaaaccactcttttttcatcagaaagtttattttcattcctaatgaatgcatgtacaactgtcccaacacaaaatcccagttgctcgtgtgtggggctaaagctataacaaatttatcgggatgatcaactgttacgtccagcttccatcccatttttttgaatagaagccagctacagaacttttttatcatgatttggaaacttatccaaaagttttaatctgttcaatgatttctaatgcctgagcattgaatcccttgataatctcaccataataatgacgtggtgtcatacctggttcagggtgagatacacgcttaatataatcattacgtaaaacaataattgccgctagagtatggtctacttcgtctttgttatgtttgttgccatataaagaggctgcaactgtttctgcaaataaatcgctacatacataattaatagcgcgctttaaatctcttttctttgccatgttataatgcctttaagttagaaaataccttttcaagttcaaagataaagaaaaaaaaggaaatgcaaaactgaggttgcaaaaaatgttcgaaaaaagccttttcttagcttttcatttcctcatttcgtttaaatcgcgtacttttgcacagaaaaatatataactaaacagaaaatacaagaaaaatgaaaatgagtcttttgcagcaagctcgcgctcagtatcagccgaagcttccaaagggtcttcagggtgccgtaaaggtaaaggaaggcgaacctacacagagcgtaggtgatcaagatgaaattaaaaaactgttcccaaacacttatggcatgcctcttattgagtttgtttctggtgatcaagaggcaacaaacgaaattaatgtaggtattattctatctggcggccaggcacctggtggtcataatgtaatcagtggtatcttcgatgcagtgaagaagatgaatgccaataataagatttatggtttccttatgggaccaggcggattggtagatcatgattacatggagttgacaaaagagattattgacgaatatcgcaacactggcggcttcgatttaattggttcaggccgtacaaagcttgaggaagaagctcagtttgagaagggttacgaagttattcgtcaactgaatattaaagccgttgttattattggtggtgacgactctaatacaaatgcatgtgttttggctgagtattatgcagcgaaaaactatggagtgcaggtaattggttgcccaaagacaattgatggtgacttaaagaacgaccagattgaaacatctttcggtttcgatactgcaacaaaggtttattcagaagttattggtaacattgagcgcgacgccaattcagctcgtaaatactggcattttattaaattgatgggtcgttctgcttcacacattgcgttggaatgtgctttacaaacacagccaaatatttgcttaatttcagaagaaattgagaagaaggacatgacgctgaaccagattgtagaggagattgctacagctgttgcgaaacgtgctgcagatggtaacaacttcggtgtagtacttatacccgaaggtcttatcgagtttattcctgcaattggtcgtcttattgccgaacttaatgacctccttgctgcacatggttctgattataaggacttagacaaggacgctcagcgcaattatattcttgctcatctcagcaaggagaacgcagaaacattctcaacactcccagagggtgttgcacgtcagctgtcacttgatcgtgaccctcacggaaacgttcaggtttctttgattgaaactgaaaagttgctttctgaaatggtagctgcaaagcttgatgaatggaaacaagcaggtaagtttgctggtaacttcgcagcattgcatcacttctttggttatgagggacgttgcgcagcgccttcaaactttgatgccgactattgctatgctttaggtacaagtgctgctaaccttattgcaaatggcaaaactggttatatggctattgttcaaaacttgtcagctcctactgacgaatggagagcaggaggcgtgccaatcacaatgatgatgaatatggaacgtcgtaacggtgaaatgaagcctgttatacgcaaagcacttgttgagcttgacggcgctcctttcaaggagtttgttgctcatcgtgaagagtgggcttacaagacttgttacatctaccctggtccaattcagtattggggcccaacggaggtgtgcgatcgtgagaccgtaactctcgctcttgagaacgcatctaagaagtaattaagatgtaatacaacttttatatagaagggatatcatggtcttgatgagtgtggtatcccttcttgcttattccttaaaccttttatttcgtaaccacagctttaatgtctaacaaaaagcctacacaatatcataggacatcttctgcaaggcgtaggagaccagctccacgtcagcgtcaggcgttgttgcgaggcgttccgttcttccccaaaagaggtcgaagagcgtggtatttaggtgcgttggctgtgattgcaatctatatttggatcttctattatttctttgtaggacctactggtttccgttggcgtgcgttgtatggacctccaagttaccccgaaggttatgagattcatggtattgatatctcacattttcaaggtaaaattaattgggatcgtttacataccaatgctacaatagatggaagtccgcttcgctttatcatcgttaaagctacagaaggctcttcaaaagttgatgtaaacttcaatgataatttctttcaggtacgcgaatatggttttattcgtggtgcttatcatttttggagtaataagtcaacggcacgcgaacaggcttatttcttcttgaaaaaggtacatctcgaaaagggagacttgccaccagttctcgatattgagcatgcaccttctaatctgagcattgaagagtttcaaactgatgtactaacttggttacatatagttgaagataaatatcacgttaagcccattatctatacctattttaaatttaaggaaaaatatcttagtgtaccagtttttgacgattacccttattggatagctcattattatgtagataaggtgcaatataagggcaaatggaagttctggcaacatactgaccgtggcgtgcttccgggcatcgaaggtaatgtagaccttaatatatataatggttcatactacgatcttattcgtcttacgataggagaacaagatcaagttgaaatttccgagtaaaagcatcaacacatagaactttaaagataaaggttatatgtccttatgttgtgttgcttgttatttcatttccttttaatctcgtttgtgaatcaatttgctttgtataatgcaaacggtttaaaactatgatattcagtattttgtgatttatattttgttgtatatctcgttatagttaattgaagttttgaacgatagtatacgtattgcagtgtgcaagtctatttgtcaaatggctgcgagtagccttttatcttctcgtttttcttctcttttgttatttggattaagaacattcccttctatcttgttgtcataaagagtagggtgtggcggtcgccatacagccagtactacggctgtcatacaatctgtactatggccgtgtaataatgtgtattacggccgtcgtacatcaactaaaattccaaaatattatcacctttttgtcgagcacgcaatagcaaaaagaaagaattaaagtgggaataaaaaataaggggatgtgtaaagcaaagctttaacacacccacccataggtccttagaccttcggcatatagccttattgcggtaagatgtagattcttacgaggcaaatatatataaattatttggaatttaaaaattttttgcctatttttacgcaaaaatttactactaagtgatgaaaaaacgaattttgggactggatacaggcaccaatagtttaggttgggctgttgttgatcgtgatgagtatgataactatactttggtaaagcatggtagcttaatctttcaagaaggtgtaaagatagagaagaaagtagagtcatctaaggctgcagagagaacggggtataggtcacttcgcaaacattattttagacgtagacttcgtaagatagaggttctccgtgtgttaattaagcataatttatgtccctatttgagcgaagagttacttcatgcttggcatgtgcataaaacatatcctaagactgatgacttcatgttgtggcaacgaacaagtgataatgaggataaaaatccttattactatcgtcatttgtgtttgcatcaaaagttagatcttgagcgtcaagatgaaagatacatacttggacgcgctttttatcatttggctcagcgcagaggatttctaagtaatcgccttgatagtacctctgaacaagagacgggtaaggtgaaaactggaatttctgatcttacacgtgagatggaagttgcaggatgtgaatatcttggtgactatttttatcaaatttattcagatcctaataatcatgagcgtatacgaacgcgttatacagatcgcgaacaacattataaaaaggagtttcatgctatttgtgaaatgcagcaactctcccaagatttagtaacggaacttgataaagcgctttatttccagcggccattgaaatcgcaacgtaagggtgtaggtaagtgtacatttgagcccaaatgtccacgttgtgctgagtcgcatcccgattttgaagaatttcgcatgctgagctttattaataatattaaaattaagacgccacgtgatcttgaattaaggtgtctaagtctggaagaaaaagcaaaaattcggtctcttttttatcgtgttagcaaaccaaattttgattttgaggatattgctaaagccttagcaggtaaaggacaataccaatatataaaggacgtaagcgacaaaccatataagtttaattaccgtatgacacaaggagttccggcttgtcctactacggctcaacttattaagatttttggtgacgattggaaagatgctatagcagaaacttatcgtttaaataatacacgttttggacagaagtcggtagcacaaatggtagatgatatgttgaatgtattatctactttttcttcagacagtaaactacaactgtgggcagagaagaatttgcaacttaatgaagaacaatgtaaaaagtttgcaggaataaaactttcacatggttttgcgtcacttagtcttaaagcaatacataaaattcttccttttcttcgccaaggatatatttattcgcatgcagttgaattggctaacatacctacaattgtaggtgaggaaatatggaataatattgataagcaacgttttatagtaaggaatatacaacagatgttacagtgtcaggaccagtgtacaaaggatttctgtataaaagattttctgttagataacttcaatctgaatcctggtactgttgataagctctatcatccatcaatgatagagacttacaaagacgcggaacagaaagaaggaatttatcaacttggttcgccgagaacaaatgctatacgtaacccgatggcaatgaggtcgctacatgaaatgagaaaggtggtaaacaagcttctaaaagataagattattgattctgatacagaagtgcatatagaatatgcgcgtggtttgaatgatgcaaacatgcgtaaagctattgctgattaccaacgtggtcaggataagaagcaccaaaattatgaaacatctatcaaggatttgtatcttcaagaaacgggaaagaacattgatcctacagaaacagatattcgaaagtatgagctttgggaagaacaaaatcacaaatgtttgtatactggagcagaaatcggaatagctgatttcttgggtgataacccgaaatatgatatagaacatacaattcctcgaagtattggtggtgatagtataatggaaaatcttacactttgcgatagtcgatataatcgagatgttaaaaaagcaaagatgccttcagaattagctaatcatgaagaaatacttacaaggatagaaggctggaagaaaaactatgaaacgcttacataccaaatagacaaatgtcgcacacacgcaggcatgtctaaagagcaaaaagatccgattattcaaaagagacatcgtcttaaaatagagcggaactattggaaagataaatatgagcgctttacaatgacagaaccacctagcgattttagtcgtcgtcaaggggcgggtatagggcttatatcaaaatatgcaggcctttatctaaaatcgttattccacgatccaaagaatcataataaatcacgcgtatacactgtcaaaggaactacaacggctgaattccgccgtatgtggggattacaaagtgaatatgagaagaaatgtcgtgataaccattgccatcactgtattgacgccattacaattgcatgtatcgggaagaaacaatatgaagatatggcatcattctatcatgatgaagagctttatgatgatggcaggggaaagaaacctcagtttagaaagccatggccaacgttcacagaagatgttcttaatttggagaaaagcctgataattgttcatgatactcctaataatatgcctaagaaggctcgcaaatatgttagaaccgctaacggcaaatttattgcaaaaggtgactgcgcacgcggtagtttgcataaagaaacatattatggcgctattgagcgcgacggtgaaatcaagtatgttgtaaggaaagcacttacctcttttgaaaaagaagcagatattgataatatagttgatgatatagtaagagagattgttcgcgaagctgtacgagggaagacatttaaagaggcaatagctcagcctatttatatgaataaggagaagggaattcttattaaaaaggtgaggtgttttgctcaaggaataacgagaccgctaaatataaggcaacaacgcgacacatcattaaaagaatataagcaaacctttcatgtagcaaatgatactaattattgtatggccatttatgaaggcttagtaaaaaataaaataaaaagagattttgaattagttaagacacttgatgctgttacgtactttaaagatagtaattgcaaaatagaattcccaaccttagtgccttcaaagacgaatgcagaattaccattgaagtcaataataaaaataggcacaatggttctgctatatgaaaatacgcctgcagaaatagatttttctgataaaaaagatttggcacggagattatataaggttgttggactttcttctatggttattagtgggtatacatatggagtaacgtcacttcgacatcatcaagaagctcgtcaaacaaaagatcttaaatataaaaaaggaaggtataaaaatggagaacaatatcgccctcttattgggttgttgcatactcaatttgacgtattagttgaagggtttgattttcatattaatgctcttggtgatatagaattattaaaccgatagtattatgctaaaacgaagccttgtgttttcatctccagcaaacctgtctttaaaagataggcagatagtgatatctttaaaagaaagtccagaagataaaattacggctccaattgaggatataggtgtcgttataattgataatcctgcagtttctataactattccgttacttaattatcttgcagataataatgttattgttgtaatttgtaattctaaaggtgttccttcctctactttacttagttttggtacaaaccattaccaaggtgaaatattgcaaagccaaatagatacaacagaacctcttaagaaaggattatggaaacaaatagtagaatcaaagattaaaaatcaagcagctttacttaataaattaggaaaaaatggcgataaattgaaatcttattattgtaatgtaaaatcaggtgacacagacaatcgagaaggaattgctgccagaatatatttccaagaactttttggcaagggttttgttagggaacgtagtcaagagggcataaatgcacttctaaattatggttatacgatactgcgtgcagctactgcgcgagctgtagtaggttcaggtctttttcaaggaataggattacatcatcataatagaagtaattccttccctttggtagatgatcttgttgagccttatcgtccttttgtagatgaggctgtataccaattgttattaaataattgtctggaactatcgaaaaatgtcaaggctaagttaattagcgtactctatgcagatgtttttttcaagagaacctcaaggccgcttgaacttggccttacctttacaacctcttccttaacacgatgcctaaggaaagaggataaagaacttttattgccattactgcgatgagttttaaccgtttaaatgcttatcatattatgtggctctttgttatgtttgaccttcctacacaaacaaaaaaggagaagcattgttctgctctttttagaaagaatcttgagaaggacggatttgtgatgtatcaatttagtgtctatgctcgtttctgcggttctcttgagagtgcaaaagttcatgtaaaaagagtaaaagctcttgttcctgaaaagggacttgttagtattttgcagataactgataaacaatactctaatattataaatatttggggcaaaatagaagaaaaacaacgtcaaagtcctattcaattggagtttttttaatatatttgcatcgtaaatactacttcatttcgttttatatatagtcttttgaatcatatcctattgaaattcaataagataatatgtataagttgcggtttgatgtagaaacaatttataaagcaactcgataaccgggcataccattatcgcgagcgttgcggtttgatgtagaaacaatttataaagcaacagaaacgagaaaatagaacaaaacacgattgttgcggtttgatgtagaaacaatttataaagcaactcattcttaattttctgctcctctgcctggttgcggtttgatgtagaaacaatttataaagcaacttctctttataccaaatagtacggcaaatcgttgcggtttgatgtagaaacaatttataaagcaacagaacctaattctttacctgattgattagcgttgcggtttgatgtagaaacaatttataaagcaacatctacttaaaagttatattatatgtttgagttgcggtttgatgtagaaacaatttataaagcaacaattttataggtggtggcacggcttatgcgttgcggtttgatgtagaaacaatttataaagcaacccgataacggagtatgccgaatttcgaagagttgcggtttgatgtagaaacaatttataaagcaacaaaacaataagtggcgcgctgtcacagcggttgcggtttgatgtagaaacaatttataaagcaacaagcagataccaacacggagcgcggatatgttgcggtttgatgtagaaacaatttataaagcaacgacaaaagccgtagaatttaaaggcatagtgttgcggtttgatgtagaaacaatttataaagcaaccctataacctggcatgccattatcacgagcgttgcggtttgatgtagaaacaatttataaagcaacccatcagcaattaattgacgttggcgctgagttgcggtttgatgtagaaacaatttataaagcaacccacaagatgcgactgcaatcgctaacgctgttgcggtttgatgtagaaacaatttataaagcaacttgcctgctacaatctgttctcttacacccgttgcggtttgatgtagaaacaatttataaagcaacttttcagcgcgccccaaatacagaacgcatgttgcggtttgatgtagaaacaatttataaagcaaccaatgtgaaaatgaatggtattgattgccagttgcggtttgatgtagaaacaatttataaagcaacgcaagcgaaaaatattcgaaattgtgttcagttgcggtttgatgtagaaacaatttataaagcaaccaattcgtttaggcttaacggtatgagcgtgttgcggtttgatgtagaaacaatttataaagcaaccttgtatagtcgcttgtattttatacgaatgttgcggtttgatgtagaaacaatttataaagcaactaacatcataatcttcgtactgagtgttagttgcggtttgatgtagaaacaatttataaagcaacacattaataaactttttcatatacttatagttgcggtttgatgtagaaacaatttataaagcaacaggaatacgacatgagtttttctcttgatgttgcggtttgatgtagaaacgattaatgagataacttgcagactggtaggaatatatttgtaacaaagatgtgatatccagcctatgttggataccaactatctttttctgatactgtaaccttgcattgctcgtattaggataaggggtttacaatacctgttgatcgcccattctgggagaaatatcattaacaggacagatggaactttaaatattgccttgaggctaccgataaacctgcttcactggcggactaggtgtgggatattttgactccgaagccctaacgcggattggacaacaatcacgcacgaaacggatagctcattaatgacatgcatcccaacttccctaagaactgtgtttgctgctattctgtaaactgtaaggggaggtacaaacttaaggcggtatttctgaatcgtaagaaggattattttctgatgctaagctgcaggacaataagagtattattctgtagaataagtacaagaatggtggtgcattatccattcttgaattcgtagataagaaaaaggctgtctatcacgatatgatatcggttgttcagccatttactaagtaaggggagcaaagtggaaataatgccatcagtacactttaattcgacagggtacaagcagatatatggatcacttatcagtacgaagtacaactgaaaatgtcccaattttcgagtagatgacgtcttctgcgagtacgagagctttatcagatcgtggaacaaaaagaaagaaagtatgaagaatgttgtcacgtggaatggaacaatcgccatatattgtaattaataacataaaaggatgcagtgataggtttatctgtaaaaatattattgcacgaacaaatgtcaataccgatatacaagaggtgtgggtttatgaaaaaggcaaaataagaccattcttcaaggcaggagaatttataaaataacaacggggaagcctgaacttccccgcgaggcaacgtgccgtagcacatgctaacccttaatgggctgttgcaaagatatgaaatattttgttgcgaacaaactattaagtgattatttttatgaatgctaaacaaataatcgatattattactcgtgcaccgaagtaggtagaggtggctatatgtgataaaatactgcgcagggcagctgttatatttttagataataaagcctttttcgtgcattagtttttgatttttgagcacaccaacaacttatacgatgcacgtcgctttatattttagccccaatcatgtcgttataaatcttgattagtataagacacgtttgagcggtggtttatattttaaccccaatcgtgtttatttctcccatgcgcccttataatatattaaggtgtattttgcggcaaaaacctcctgtcggcctgttttgcgaaaaacttatgcatttcttttaattttttcttcaaaaagcttgctggtgtataattttctatatacctttgcacccgcaaatcaggaaacaaatcacttacatggttaacgtaatgattgccgagggcctctcggaaggagagtttcgcccttgtatgaaacgagttctttgagatatttacataaacagaagaagtagtacaagaagcggtctttttctatttccgccttcgggtggtagttatttctgccttcgggtggtgatataatagtataaagactgggtaaaaacaaacgaaccgtccattccctctttttagtcttagaagacgtataagagtttggattaattcattaccttaaacttcagtatacggataatcgtactgagacagacattacatagaaattgacattttacaatggagagtttgatcctggctcaggatgaacgctagctacaggc

SEQ ID NO: 1668 - DNA, 15540 bp, synthetic construct
  misc_feature 1..15540: note = Synthetic
  source 1..15540: mol_type = other DNA
tcatccatatttcatttttagccttgctataaataattgcacttgcacacaaacgtgcttcaggctgtgcggtctgaattgtgccatgattggaatatttgttgaaaatttctttggtaataccttcacaaaactccgatagggtaacagcagcatgtagacaacgtatataatctgaaatgagtttcatgcagtattgtccatttgacatttctgatttaaagtgatgtgtcgttttactggtgctaccatcaataacggcaataaagttatcggtgataacaataccatcttcgcatgtatcctgtgtgtatttgcctacaaggttttgctcaataattttcatgttgaaaggtatcgatgtcaacttttcttcagcctataatgtataagataggctccaaaagaactgttgtttatctttttttatttcgttgacggcgtggaccatccgtttggaaattaggattatatgatttacgttttcctttatttcgtcctatatctggagaacttcccactgcctttgcatcgtaatgtacatgtccgcgaaacggtattccattataaagctttgcaataagatcggctcgtccaatgcgtttaagctctttttcaatattgcgccgctcttcaggcttataccaaaagaagaacatacgttgagcaagtttctccttaggcgttttagcgcagaagataggctctaatgtatagggatcgtaacctgtgtaaaaggctgttgtgctaacagtcatgggcgtaggagtaaaatcttgaacttgctccaaatgaaagtctaagttctttgtaataactgccaattcggccatatcttcctcttcacaaccaggatgactgctaataaagtaaggtataatttgctgttttaatccttcttcttgatttattttgtcaaataaacgcttgaactcatagaaaagtttaaaagacggcttcctcataaattttaacactttattagaagtgttttcgggagcaacttttaaacgcccactaacgtgtttagaaattaattcacgggcatatgtaatagcattagcatttgagcgttcgtctttacttttgtgtaagacaagatcatatcgtacaccactgccgatgaaacttttttttatccctggcagattatcgaccgcacgatatatctctaatagtttagcatgatcggtaatgagattaggacaaatagctggatcaatacatgatgggcgtttgcaatgttcacaagctttgatattacgcccatgcattccatacatattagcagaaggaccaccaagatctgaaatatatcctttgaagtcgggcatttgtgtaatttgctgtgcctcgcgaagtatactttccttagagcgacagacaacaaattttccctgatgcgcagaaatagtacaaaaagcgcatccaccaaagcatcctcgatgcatattaatggagaatttgatcatttcgtatgcagggatcgtcttccctttgtacttagggtgaggaagtcttgtgtatggaaggtcatatgctgcatcaagttcctctgttgttaaaggtggaaacatggggttttgaacagcatagaggtttcctactggttgaagaatgcgctgagcgtgtattcgattcgattcttcttcaatgtgtctgaaattctctgcatgtgatttcttattgtgttgacattcttcaaaagaatgcagtacaatatcatcactttttattccaccaaatatattttctttttttctaaggaatacagtttgcggaatatcatctatctcagaaattttacgccctttttccaactcgcgacataacagaagtgtgtttttttcacccataccataaagcaaaatatccgcaccgctatcacataaaataggcttcatcagtttgttttgccagtaatcgtagtgggtgagccttcgaagagatgcttcaattccaccaagtgctacaggaacatcgggataaagttttttaaggatttgtgtgtaaacaactgatggataatcaggacgcaagtcgtgtcttgaatcaggactgtacgcatcatcatgacgcatacggcgatttgcagtatagtgattaaccatgctgtccatattgcccggagatacagcaaagaataatcgtggtcggcctaattttttgaagtcgcgataatcaccatgccagtcgggttgcgaaacaattgcaactcgataaccttgtgcttctaagacgcgtcctatgacagcggatccaaaagctgggtgatcaacgtaggcgtcaccagaaaaaaggataacatcaagttgctcccagccacgaaggttacattctttttttgtagtgggaagaaaatccgtcagttggtattgttgcatattattccttagactcctgtgaatctacttcttctttaggctcttgttggttcttccagtcaatgtaaagaagtacgagttgatgtaggccaaaggctttcatattgttgttatagataatatctaagcaaagatcaagtagttctttatctttgccagcttctgactctagcattgaacgtacattgagtttcaatttgtccagcacgctttcgtcaatgaaaccattgctgtcaacaagattgcgaagcagtgcatatttatctaacgttttaagatgttgttctgttacctcgatacttcttgtaccagaatgatttgcttgaatcttcatattagataattttaaaaaggtttatatgtcattattttaataggaaacttaatattccttgcataatgttattacgcatactctgatcgttgatacattcgaaagggaatcccattacaaaagtcttgtgacgttctgtatcacatgcaactgcagcagaagttccattactatatgtcatagcacagaaagcgttatccgtaggctgtaatatatcagcgtgtgttgctgcaaagtggtcggaattgatatttctataaaaatcaaaatttaatcctaagccagtcgcgccattaatagaatcagttttaatttgtttgtcgtaagtaacgtgtaacgttttattaagccactctgtttcttcactatttgtcatatcagagccgatgtaagctccgctggcaaatattcgccccccactatgtatataagatgataataatctttgcattgtgggcgtaaaacttttataatagctaacagcgtctggtgtatacttttcaagtccaagaattaaatcaaccacaggataattctcaagtttaacactcccattttcgattgctgttgacgagcaacttgcaacattatattgtggtgttgatgtaatcgcagacacgtggctcatgatatagttaaagtcgtttcctgctacaaattttccagctaattcatttccactatagcccagtccgctgctcccctctatgcccatacgcgacttatcaaagttgatttgtcggccgttccaaccagctgtagttccatagttaacaccgatatcgctatcaagctcaaaaccttgctgagtctcattgttaataattgcaggggcagataaacggtgaaaaccatttacaactaaaacagtctttgtagctattgggctataaaatgcagatacgatttcagatgaaaaactttcgccacctctatttgctgctgtgactttaaaattatattgcatggaaggtagaagttcaatagtaatagaattttcttttactttaataccattgtcaaaaccaacgcctccaatagatgtgtaaagaatatagtaagaaggttcagctgttggctctagttcgtcaacttttctattccacgaaatagtggccttattcccatttaattgtacagaaatattctggggtgcaagtggagcaatgattgttgcattgccatgcatatcgtttacgtaacgtgcaatagttttataaactgagcgtgctaacgtaaagcgaaagttgggatcttgccccaaaatcatatcagggaaattttgatgtgacaacgtttcaagaatagcagaaggcacttctggtagccttgtttccgaatagtttttatcccatagatatcttctgttccattctttatacttataactaagatctctagtaacgccattaagaagcatatctgcaaaaatcttagagctttgacgtgttatacctgatgcaagacgcccgtcattgaaatcggttgtgcaaatagttagggagcctatcaagccttgtccgtcttttgcatatcctgcatcgctatgtacagcaagagataattccatgggaacacctttgccttcggttgtaggaacatatacagagccacctgctaaccagtttaacatttttgatcgtgcattaatatcatctgcataatcgtctgtgccttgtcgaccactatagatggagtagggagcgcctgcccattgtgcgtagtaacgtgctccttcaagcgcacgaggatagttgcttagtgtacctcctctttcaacattacccattcctccaccaaatctaacagcatctgctgtaactattccttttttatgactttgatttgtaagcataacacaattgttaatgctgtttcctgcatcaaaggtgaaagttccaagataaacccatgttccaccacccattgtttggtttaccttaaattctgtagcctgtccttgatgaaagactgtataatgtgcgtcatcaatgctcttaggaagtgtttgataactaacgtatacagcgtattggtcagtctttgaaaaatgaggttgccactttacataggctttactattttttttagttgtctttatctgacgaaaatatcctgcttgaaaagggttttcattgtcaagataattgccattgtgagctgcaaagcctggaatagaagaggtttgccaggctgataattcggaatactctcgatagttatctgtagatgtgtttaaccctccatcaggatcaacaatatactccattgtttgccaatcgcgttcacgtggcgtgaaaacaatagccccagccttttcaagcatgggtataagataaggcacaactatagtttgtgtataaagatcttctgtggttccaaataatgcaggcctctgccaggtccattcgtttttgttattgttaaagtaacgtccatgagaagcccatactgaaatatggcgtccttctaagccgtgtgaaaagttaataggtcttgaaatattggtaacccacggctctccttcatatttaattttaccccaaagtgcatttccatcattaactttcttagtgtgaccaggaacataatattctatgggcataccattacatttaatggaaagattatacttccttatatgctttggtaaaatctttgtaatatgcttatagattttactaactaacttgtcagtaaagtcttgttgagcaaaactaccatctacaataacagtaattttttgtttgttttcatcaattaacagctctttaaaataagatgaatgctgagctgttgttatatctttagatgtgtaagtagagaaatatgttttaatatccctttctagagtgctccgcaggtcagaaacttgggcataagaattaacagaaagggctaccaaatagaggaaccaaataagttttttcttcatttattatatattacctatcataaagttctcgggatatttccctttgaattttttaaaataagttttaacttctttcatttctgagtcaatatcccctgtaggaattatgctttgtgtgcattgtatgagtttcttctcatagtcaacaccataaagaagaattgggatttgtgcttttaaagcaatataatagaacccctttttccaatctgtattaggtgagcgagttccctctggggtaatgcatattttaaaagagtcgcgtgtacttgcttcatgagcgatagcatctgtcatactagtatgttttgaacggtgtacggggataccacccatatggcgaaaaatgacaccaagcggccagaaaaaccactcttttttcatcagaaagtttattttcattcctaatgaatgcatgtacaactgtcccaacacaaaatcccagttgctcgtgtgtggggctaaagctataacaaatttatcgggatgatcaactgttacgtccagcttccatcccatttttttgaatagaagccagctacagaacttttttatcatgatttggaaacttatccaaaagttttaatctgttcaatgatttctaatgcctgagcattgaatcccttgataatctcaccataataatgacgtggtgtcatacctggttcagggtgagatacacgcttaatataatcattacgtaaaacaataattgccgctagagtatggtctacttcgtctttgttatgtttgttgccatataaagaggctgcaactgtttctgcaaataaatcgctacatacataattaatagcgcgctttaaatctcttttctttgccatgttataatgcctttaagttagaaaatatcttttcaagttcaaagataaagaaaaaaaaggaaatgcaaaactgaggttgcaaaaaatgttcgaaaaaagccttttcttagcttttcatttcctcatttcgtttaaatcgcgtacttttgcacagaaaaatatataactaaacacaaaatacaagaaaaatgaaaatgagtcttttgcagcaagctcgcgctcagtatcagccgaagcttccaaagggtcttcagggtgccgtaaaggtaaaggaaggcgaacctacacagagcgtaggtgatcaagatgaaattaaaaaactgttcccaaacacttacggcatgcctcttattgagtttgtttctggtgatcaagaggcaacaaacgaaattaatgtaggtattattctatctggcggccaggcacctggtggtcataatgtaatcagtggtatcttcgatgcagtgaagaagatgaatgccaataataagatttatggtttccttatgggaccaggcggattggtagatcatgattacatggagttgacaaaagagattattgatgaatatcgcaacactggcggcttcgatttaattggttcaggccgtacaaagcttgaggaagaagctcagtttgagaagggttacgaagttattcgtcaactgaatattaaagccgttgttattattggtggtgacgactctaatacaaatgcatgtgttttggctgagtattatgcagcgaaaaactatggagtgcaggtaattggttgcccaaagacaattgatggtgacttaaagaacgaccagattgaaacatctttcggtttcgatactgcaacaaaggtttattcagaagttattggtaacattgagcgcgacgccaattcagctcgtaaatactggcattttattaaattgatgggtcgttctgcttcacacattgcgttggaatgtgctttacagacacagccaaatatttgcttaatttcagaagaaattgagaagaaggacatgacgctgaaccagattgtagaggagattgctacagctgttgcgaaacgtgcagcagatggtaacaacttcggcgtagtgcttatacccgaaggtcttatcgagtttattcctgcaattggtcgtcttatagccgaacttaatgaccttcttgctgcacatggttctgattataaggacttagacaaggacgctcagcgcaattatattcttgctcatctcagcaaagagaacgcagaaacattctcaacactcccagagggtgttgcacgtcagctgtcacttgatcgtgaccctcacggaaacgttcaggtttctttgattgaaactgaaaagttgctttctgaaatggtagctgcaaagcttgatgaatggaaacaagcaggtaggtttgctggtaacttcgcagcattgcatcacttctttggttatgagggacgttgcgcagcgccttcaaactttgatgccgactattgctatgctttaggtacaagtgctgctaaccttattgcaaatggcaaaactggttatatggctattgttcaaaacttgtcagctcctactgacgaatggagagcaggaggtgtgccaatcacaatgatgatgcacatggaacgtcgtaacggtgaaatgaagcctgttatacgtaaagcacttgttgaacttgacggcgctcctttcaaggagtttgttgctcatcgtgaagagtgggcttacaagacttgttacatctaccctggtccaattcagtattggggcccaacggaagtgtgcgatcgtgagaccgtaactctcgctcttgagaacgcatctaagaagtaattaagatgtaatacaacttttatatagaagggatatcatggtcttgatgagtgtggtatcccttcttgcttattccttaaaccttttatttcgtaaccacagctttaatgtctaacaaaaagcctacacaatatcataggacatcttctgcaaggcgtaggagaccagctccacgtcagcgtcaggcgttgttgcgaggcgttccgttcttccccaaaagaggtcgaagagcgtggtatttaggtgcgttggctgtgattgcaatctatatttggatcttctattatttctttgtaggtcctactggtttccgttggcgtgcgttgtatgggcctccaagttaccccgaaggttatgagattcatggtattgatatctcacattttcaaggtaaaattaattgggatcgtttacataccaatgctacaatagatggaagtccgcttcgctttattatagttaaagctacagaaggctcttcaaaagttgatgcaaacttcaatgataatttctttcaggtacgcgaatatggttttattcgtggtgcttatcatttttggagtaataagtcaacggcgcgcgaacaagcttatttcttcttgaaaaaggtacatctcgaaaagggagacttgccaccagttctcgatattgagcatgcaccttctaatctgagcatcgaagagtttcaaactgatgtactaacttggttacatatagttgaagataaatatcacgttaagcccattatctacacctattttaaatttaaggagaaatatcttagtgcaccagtttttgacgattacccttattggatagctcattattatgtagataaggtgcaatataagggcaaatggaagttctggcaacatactgaccgtggcgtgcttccgggcatcgaaggtaatgtagaccttaatatatataatggttcatactacgatcttattcgtcttacgataggagaacaagatcaagttgaaatttccgagtaaaagcatcaacacatagagcattcaatataaaagttatatgtctttatgttgcatctcttattgttttaccttctgtttatcctgtttgtttgccaattttcattgtataatacaaatgattaaaaatattggttttcaacgttttattatttttattttgttgtatatctcgttatagctaattgaagttttgaacgatagtatacgtattatagtgtataaagttcttagtataaaaaccgcgtgttgcctttgctctttctgcttttagtccctcttgacatgttaattaggaatattctattatatctttttgttataaagagtagggtgtggcggtcgccatacagcctgtactacggccgtcatacaatccgtactatggctgtgtaacaatgtgtattgcggccgtcgtacatcaactaaaattccaaaatattatcacctttttgtcgagcacgcaatagcaaaaagaaagaattaaagtgggaataaaaaataaggggatgtgtaaagcaaagctttaacacacccacccataggtccttagaccttcggcatatagccttattgcggtaagatgtagattcttacgagtcaaatatatataaattatttggaacttaaaattttttcgcctgtttttacgcgaaaatttactactaagtgatgaaaaaacgaattttgggactggatacaggcaccaatagtttaggttgggctgttgttgatcgttatgagtatgataactatactttggtaaagcatggtggcttgatctttcaagaaggtgtaaagatagagaagaaagtagagtcatctaaggccgcagagagaacggggtataggtcacttcgtaaacattattttagacgtagacttcgaaaaatcgaagtattacgtgtgttggttaagcacaatttatatccctatctgagtgatgagttgcttcatgcttggcatgtgcataaaacgtatcctaagactgatgacttcatgttgtggcaacgaacaagtgataatgatgataaaaatccttattactatcgtcatttgtgtttgcatcaaaagttagatcttgagcgtcaagatgaaagatacatacttggacgtgctttttatcattttgctcagcgtagaggatttctaagtaatcgccttgatagtaccccagaacaagagacgggtaaggtgcaaacaggaatttctgatcttacacgtgagatggaagctgcaggatgtgaatatcttggtgactatttttatcaaatttattcagatcctaataatcatgagcgtatacgaatacgttatacagaccgcgaacaacattataaaaaggagtttcatgctatttgtgaaatgcagcaactctcccaagatttagtaacggaacttgataaagcgctttatttccagcggccattgaaatcgcaacgtaagggtgtcggcaagtgtacatttgagccaaaatgtccacgttgtgctgagtcgcatcccgattttgaggaatttcgcatgctgagctttattaataatattaagattaagacgccacgtgatcttgaattaaggtgtctaagtctggaagaaaaagagaaaattcggtctcttttttatcgtgttagcaaaccaaattttgattttgaggatattgctaaagccttagcagggaaggggcaatgccaatatataaaggacgtaggcgataaaccatataagtttaattaccgtatgacacaaggtgttcctgcttgtcctactacggctcaacttattaagatttttggtgacgattggaaagatgctatagcagaaacttatcgtttaaataatacacgttttggacagaagtcggtagcacaaatggtagacgatatgttgaatgtattatctactttctcttcagacagtaaactacaactgtgggcagagaagaatttacaacttaatgaagaacaatgtaaaaagtttgcaggaataaaactttcacatggttttacgtcacttagtcttaaagcaatacataaaattcttcctttccttcgccaaggatatatttattcgcatgcagttgaattggctaacatacctacaattgtaggtgaggaaatatggaataatattgataagcaacgttttatagtaaggaatatacaagatatgttgctgtatcaggatcagtgtacaaaggatttctgtataaaagattttctgttagataacttcaatctgaatcctggtactgttgataagctctatcatccatcaatgatagagacttacaaagacgtggaacagaaagaaggaatttatcaacttggttcgccgagaacaaatgctatacgtaacccgatggcaatgaggtcgctacatgaaatgcgaaaggttattaaccagttactaagggagaagataattgattctaataccgaagtacatgtagaatatgcgcgtggtttgaatgatgcaaacatgcgtaaagctattgccgattatcaatgtgcccaagaccaaaaacaccaaaaatatcagaattctatcaaggaactatatcttcaagaaacgggaaggaatattgatcctacagaaacagatattcgaaagtatgagctttgggaagaacaaagccataaatgtttatatactggagcagaaatcggaatagctgatttcttgggtgataacccgaaatacgatatagaacatactattcctcgaagtgttggtggtgatagtataatggaaaatcttacactttgcgatagtcgatataatcgagatgttaaaaaagcaaagatgccttcagaattagctaatcatgaagaaatacttacaaggatagaaggctggaagaaaaactatgaaacgcttacataccaaatagacaaatgtcgcacacacgcaggcatgtctagttgcggtttgatgtagaaacgattaataaagcaatatagtgtaattttagtgtttatggtatggtgatataaataattgccatgccaacaaatgcccaatattatatttggggataaaatattaattacttaaatttgcaaaattatgagaaaagacgaatctatgagaaagaagtacgatgtacccttcaacgagactatacctctgtgagaggaaaagtttgatgttagcaacttgaactatcgtcacaaaatttgctatttcccaaaagaaaatagcatagttataaagtcaggttatcttgctgtaaaggtcgacacaagcttgaaacaaataggagagtttgaagagttgagcaagttggacgctccgcaaatatacccagagattttctacgacgcatcacttggagaactgtacgatggcgacaaggtttatacagcaagcgttcagctaaacgcaaaagaaatgctgttttgtagaaaacacgggaaaatagccacttatatgcgctccctaataagagaagaaatgaaaaaagagaactttaaataaaatggagtacgaagtaaaatttatcggcgagaaagaaaatgtcgacaaggccacaaacgctttgcgagattttaattccgtattgcctgcccctgaagaaattcaaatctacaaaatgattcccatttcagaagattacttttactatcttctttctactcgaggacttgttagcgagaaacaaggagaaaaatcactaaaaagatttgaagacgaaactgccaacatgaatgaaagtattaagacttgttataagtttatggcagaacacatgctgtatctctatgacaagtacgatgcgtgtacattggaagcgtggagaaaaaagaactgggacgtttcagagcaaccttctgtaagcatttgtgagaatggcacaataaagctatgtagcgacacttctctgccaaaaactataattgactacatctgcgagaaatacggcgttacggcgcaaataaatacgtaagtataaaatatctcacaatcaagacgggtgtgataacccgtcttggtgcatctataaacatataaacaatttggaatatgaaaaacaaaaagatgacgtttgagaagttttacaaagagtgtaataatctctacaatatgtacgaacctcatttctttctacaaggctgtgagattttcaccaattttgagagaaatgaaatagacaatgggtgttggtattgtgtcgtaaaaatacgtgaccacgttcatactgtacttgcttatgaccatactggggacagcgatgacgacgcttttgtggtaaattgtgactggtctttgcaaggttgcgccaacaaacttggttattatgcagaatgtaaagattttgataatttagaagaagccttttattttatggtacaagaaccctctcgatattatcaaaactgcacgaattttgttacaattgaagacaaaaatgttcctgaagaaatctacggctggcgagacgggtgcgccctcataaaaggcatagaatttataaaagaacacgaagattggtttgctggcaaaaccatgcaaattaagctggcagacaacactgtactctatcagaggaaaatcaattaggagcattgtactacataggggagttacaacccctatgtagtgatattaattataatttgcaattgtatgaaagcacaaaaatatgtaggttgttggtactgtgataatattatagaccaccccgaccaagtaggattactgtatcttggtttcccaagatgttttgtgctaattcctgttgcggtttgatgtagaaacaattaataaagcaacttacaccaaatagattaattatcgttggatgttgcagtttgatgtaaaaacaattaatgagataacttgcagactggtaggaatatttttgtaacaaagatgtgatatccagcctatgttggataccaactatcttttctggtactgtaacctcgcgctacttgtattaggataagaggtttacactacctgttgatcgcccattctgggagaaatatcattaactggacagatggaactttaaatattgccttgaggctactgaggaacctgcttcactggcggactaggtgtgggatatctcgacttcgaagtcctattgcggattggacaataatcacgcacgaaacggatagctcattaatgacatgcaccccaacttccctaagaactgtgtttgctgctattctgtaaactgtaagagggggacaaactcaaggaggtatttctgaatcgtaagaaggattatttcctgatgctaagctgctggacaataagagctttattctgtagaataagacaagaatggtggtgcattgtccattcttgaactcgtagataagaaaaaggcctgactattacgatatgatatcggttgttctgtcatttgctaagcaggagagcaaagtggaaataatgccatcagtacactttaattcgacagagtacaagcagatatatggatcacttatcagtacgaagtataaccgaaaatgtcccaattttcgagtagatgacgtcttctgcgagtacgagagctttatcagatcgtggaacaaaaagaaagaaagtatgaagaatgttgtcacacggaatggaacaatcgccatatattgtaattaataacataaaaggatgcagtgataggtttatctgtaaaaatattattgcacgaacaaatgtcaataccgatatacaggaggtgtgggtttatgaaaaaggcaaaataagcccattcttcaaggcaggagaatttataaaataacaacggggaagcctgaacttccccacgaggcaacgtgccgtagcacatgctaacccttaatggactgttgcaaagatatgaaatattttgttgcgaacaaactattaagtgattatttttatgaatgctaaacaaataatcgatattattactcgtgcaccgaagtaggtagaggtggctatatgtgataaaatactacgcagggcagccgttatatttttagataacaaagccttttccgtgcattagtttttgattttcgagcacaccaacaacttatacgatgcacgccgctttatattttaacctcaatcatgtcgttataaatcttgattagcatgaaacacacttgcgcggcactttatattttaattccaatcgtgtttatttcttccatacgcccttataatatattaaggtgtattttatggcaaaaacctcccgtcggcctgtt

SEQ ID NO: 1669 - DNA, 15521 bp, synthetic construct
  misc_feature 1..15521: note = Synthetic
  source 1..15521: mol_type = other DNA
tcatccatatttcatttttagccttgctataaataattgcacttgcacacaaacgtgcttcaggctgtgcggtctgaattgtgccatgattggaatatttgttgaaaatttctttggtaataccttcacaaaactccgatagggtaacagcagcatgtagacaacgtatataatctgaaatgagtttcatgcagtattgtccatttgacatttctgattttaatcgaaatgttgttttactagtgctaccatcaataacggcaataaagttatcggtaataacaataccatcttcgcatgtatcctgtgtgtatttgcctacaaggttttgctcaataattttcatgttgaaaggtatcggtgtcaacttttcttcagcctataatgtataagataggctccaaaagaactgttgtttatctttttttatttcgttgacggcgtggaccatccgtttggaaattaggattatatgatttacgttttcctttatttcgtcctatatctggagaacttcccactgcctttgcatcgtaatgtacatgtccgcgaaacggtattccattataaagctttgcaataagatctgctcgcccaatgcgtttaagctctctttcaatattgcgccgctcttcaggcttataccaaaagaagaacatacgttgagcaagtttctccttaggcgttttagcgcagaagataggctctaatgtatagggatcgtaacctgtgtaaaaggctgttgtgctaacagtcatgggcgtaggagtaaaatcttggacctgttccaaatgaaagtctaagttctttgtaataactgctaattcagccatatcttcctcttcacaaccaggatgactactgataaagtaaggtataatttgctgttttaatccttcttcttgatttattttgtcaaataaacgcttaaactcatagaaaagtttaaaagacggctttctcataaatttcaacactttattagaagtgttttcgggagcaacttttaaacgcccactaacgtgtttagaaattaattcacgggcatatgtaatagcattagcatttgagcgttcgtctttacttttgtgtaagacaagatcatatcgtacaccactgccgatgaaacttttttttatccctggcagattatcgaccgcacgatatatctctaacagtttagcatgatcggtaatgagattaggacaaatagctggatcaatacatgatgggcgtttgcaatgttcacaagctttgatattacgcccatgcattccatacatattagcagatggacctccaagatctgaaatatatcctttgaagtcgggcatttgtgtaatttgctttgcctcacgaagtatactttctttagaacggcaaaccacgaattttccttgatgtgcagagatagtacaaaaagcacatccgccaaagcatcctcggtgcatgttaatggagaatttaatcatctcatatgcagggatagtctttcctttgtatttagggtggggaagtcttgtgtatggaaggtcatatgctgcatcaagttcctccgttgttaaaggtggaaacatgggattttgaacagcatagaggtttcctactggttgaagaatgcgctgagcgtgtattcgattcgattcttcttcaatatgtctgaaattctctgcgtgtgatttcttattgtgttgacattcttcaaaagaatgcagtacaatatcatcactttttattccaccaaatatattttctttttttctaaggaatacagtttgcggaatatcatctatctcagaaattttacgccctttttccaactcgcgacataacagaagtgtgtttttttcacccataccataaagcaaaatatccgcaccgctatcacataaaataggcttcataagtttgttttgccagtaatcgtagtgggtgagccttcgaagagatgcttcaattccgccaagtgctacaggaacatcgggataaagttttttaaggatttgtgtgtaaacaactgatggataatcaggacgcaagtcgtgtcttgaatcaggactgtacgcatcatcatgacgcatacggcgatttgcagtatagtgattaaccatgctgtccatattgcccggagatacagcaaagaataatcgtggtcggcctaattttttgaagtcgcgataatcaccatgccagtcgggttgcgaaacaattgcaacccgataaccttgtgcttctaagacgcgtcctatgacagcggatccaaaagctgggtgatcaacgtaggcgtcaccagaaaaaaggataacatcaagttgctcccagccacgaaggttacattctttttttgtagtgggaagaaaatccgtcagttggtattgttgcatattattccttagactcctgtgaatctacttcttctttaggctcttgttggttcttccagtcaatgtaaagaagtacgagttgatgtaggccaaaggctttcatattgttgttatagataatatctaagcaaagatcaagtagttctttatctttgccagcttctgactctaacattgaacgtacattgagtttcaatttgtccagcacgctttcgtcaatgataccattgctgtcaacaagattgcgaagcagtgcatatttatctaacgttttaagatgttgttctgttacctcgatacttcttgtaccagaatgatttgcttgaatcttcatattagataattttaaaaaggtttatatgtcattattttaataggaaacttaatattccttgcataatgctattacgtatactctgatcgttgatacattcgaaagggaagcccattacaaaagttttgtggcgttcagtatcacatgcaactgctgcagaagttccattactatatgtcatagcacagaaagcgttatccgtaggctgtaatatatcagcgtgagttactgcatagtggtcgggattgatatttctataaaaatcaaaatttaatcctaagccagtcgcgccattaatagaatcagttttaatttgtttgtcgtaagtaacatgtaacgttttattaagccactctgtttcttcactacttgtcatatcagatccgatgtaagctccgcttgcaaatattcgccctccgttatgtatataagatgataataatctttgcattgtgggcgtaaaacttttataatagctaacagcgtctggtgtatacttttcaagtccaagaattaaatcaactataggataattctcaagtttaacactcccattttcgatcgcagttgacgagcaacttgcaacattatattgtggtgttgatgtaatcgcagacacgtgccccatgatatagttaaagtcgtttcctgctataaattttccagctaattcattaccactatagcccagtccgctgcttccttctatgcccatacgcgacttatcaaagttgatttgtcggccgttccaaccagctgtagttccatagctaacaccgatatcgctatcaagatcaaaaccttgctgggtatcattattaataattgcaggggcagataaacggtgaaagccattgactactaacacagtctttgtagccattgggctataaaatgcagatacaatttcagatgaaaaactttcgccacctctatttgcagctgtgaccttaaaattatattgcatggaaggtagaagttcaatagtaatagaattttcttttactttaataccattgtcaaaaccaacacctccaatagatgtgtaaagaatatagtaagaaggttctgctgttggctctagatcgtcaacttgtttattccacgaaatagtggccttatttccatttaattgtacagaaatattctggggtgcaagtggagcaatgattgttgcattgccatgcatatcgtttacataacgtgcaatagttttataaactgagcgtgctaacgtaaagcgaaagttgggatcttgccccaaaatcatatcagggaaattttgatgtgataacgtttcaagaatggcagaaggcacttctggtagccttgtttcagaatagtttttatcccatagatatcttctgttccattctttatacttataactaagatctctagtaacgccattaagaagcatatctgcaaaaatcttagagctttgacgtgttatacctgatgcaagatgtccgtcattgaaatcggttgtgcaaatagttaaggagcctatcaagccttgtccgtcttttgcatatcctgcatcgctatgtacagcaagagataattccatgggaacacctttgccttcggttgtaggaacatatacagagccacctgctaaccagtttaacatttttgatcgtgcattaatatcgtctgcataatcgtctgtgccttgtcgaccgctatagatagagtagggagcgcctgcccattgtgcgtagtaacgtgctccttcaagcgcacgaggatagttgctaagtgtacctcctctttcaacattacccattcctccaccaaatctaacagcatctgctgtaactattccttttttatgactttggtttgtaagcataacacaattgtttatgctactacctgcatcaaaggtgaaagttccaagataaacccatgttccgccacccattgtttggtttaccttaaattctgtagcctgtccttgatgaaagactgtataatgtgcgtcatcaatgctcttaggaagtgtttgataacttacgtatacagcgtattggtcagtctttgaaaaatgaggttgccactttacataggctttactattttttttagttgtctttatctgacgaaaatatccagcttgaaaagggttttcattgtcaagataattgccgttgtgagctgcaaaacctggaatagaagaggtttgccaggctgataattcggaatactctcgatagttatctgcagatgtgtttaaccctccatcaggatcaacaatatactccattgtttgccaatcacgttcacgtggtgtgaaaacaatagccccagccttttcaagcatgggtataagataaggcacaactatagtttgtgtataaagatcttctgtggttccaaataatgcaggcctctgccaggtccattcgtttttgttattgttaaagtaacgtccatgagaagcccatactgaaatatggcgtccttctaagccgtgtgaaaagttaataggtcttgaaatattggtaacccacggctctccttcatatttaattttaccccaaagtgcatatccatcattaactttcttagtgtgaccaggaacataatattctatgggcatgccattacatttaatggaaagatcatacttccttatatgctttggtaaaatctttgtaatatgcttatagattttactaactaacttgtcagtaaagtcttgttgagcaaaaccaccatctacaacaacagtaattttttgtttgctttcatcaattaacagctctttaaaataagatgaatgctgagctgttgttatatctttagatgtgtaagtagagaaatatgttttaatatccctttctagagtgctccgcaggtcagaaacttgggcataagaattaacagaaagggctaccaaatagaggaaccaaataagttttttcttcatttattatatattacctatcataaagttctcgggatatttccctttgaaatttttaaaataagttttaacttctttcatttctgagtcaatatcccctgtaggaattatactttgtgtgcattgtatgagtttcttctcatagtcaacaccataaagaagaattgggatttgtgcttttaaagcaatataatagaatccctttttccaatctgtattaggtgagcgagttccctctggggtaatgcatattttaaaagagtcgcgtgtacttgcttcatgagcgatagcatctgtcatactagtatgttttgaacggtgtacggggataccacccatatggcgaaaaatgacaccaagcggccagaaaaaccactcttttttcatcagaaagtttattttcattcctaatgaatgcatgtacaactgtcccaacacaaaatcccagttgctcgtgtgtggggctaaagctataacaaatttatcgggatgatcaactgttacgtccagcttccatcccatttttttgaatagaagccagctacagaacttttttatcatgatttggaaacttatccaaaagttttaatctgttcaatgatttctaatgcctgagcattgaatcccttgataatctcaccataataatgacgtggtgtcatacctggttcagggtgagatacacgcttaatataatcattacgtaaaacaataattgccgctagagtatggtctacttcgtctttgttatgtttgttgccatataaagaggctgcaactgtttctgcaaataaatcgctacatacataattaatagcgcgctttaaatctcttttctttgccatattataatgcctttaagttagaaaaaaccttttcaagttcaaagataaagaaaaaaaaggaaatgcaaaactgaggttgcaaaaaatgttcgaaaaaagccttttcttagcttttcatttcctcatttcgtttaaatcgcgtacttttgcacagaaaaatatataactaaacagaaaatacaagaaaaatgaaaatgagtcttttgcagcaagctcgtgctcagtatcagccgaagcttccaaagggtcttcagggtgccgtaaaggtaaaggaaggcgaacctacacagagcgtaggtgatcaagatgaaattaaaaaactgttcccaaacacttatggcatgcctcttattgagtttgtttctggtgatcaagaggcaacaaacgaaattaatgtaggtattattctatctggcggccaggcacctggtggtcataatgtaatcagtggtatcttcgatgcagtgaagaagatgaatgccaataataagatttatggtttccttatgggaccaggcggattggtagatcatgattacatggagttgacaaaagagattattgacgaatatcgcaacactggcggcttcgatttaattggttcaggccgtacaaagcttgaggaagaagctcagtttgaaaaaggttatgaagttattcgacaactgaatattaaagccgttgttattattggtggtgacgactctaatacaaacgcatgtgttttggctgagtattatgcagcaaaaaactatggagtgcaggtaattggttgcccaaagacaattgatggtgacttaaagaacgaccagattgaaacatctttcggtttcgatactgcaacaaaggtttattcagaagttattggtaacattgagcgcgacgccaattcagctcgcaaatactggcattttattaaattgatgggtcgttctgcttcacacattgcgttggaatgtgctttacaaacacagccaaatatttgcttaatttcagaagaaattgagaagaaggacatgacgctgaaccagattgtagaggagattgctacagctgttgcgaaacgtgctgcagatggtaacaacttcggtgtagtgcttatacccgaaggtcttatcgagtttattcctgcaattggtcgtcttattgccgaacttaatgacctccttgctgcacatggttctgattataaggacttagacaaggacgctcagcgcaattatattcttgctcatcttagcaaagagaacgcagaaacattctcaacactcccagagggtgttgcacgtcagctgtcacttgatcgtgaccctcacggaaacgttcaggtttctttgattgaaactgaaaagttgctttctgaaatggtagctgcaaagcttgatgaatggaaacaagcaggtaagtttgctggtaacttcgcagcattgcatcacttctttggttatgagggacgttgcgcagcgccttcaaactttgatgccgactattgctatgctttaggtacaagtgctgctaaccttattgcaaatggcaaaacgggttatatggctattgttcaaaacttgtcagcccctactgacgaatggagagcaggaggtgtgccaatcacaatgatgatgaacatggaacgtcgtaacggtgaaatgaagcctgttatacgtaaagcacttgttgagcttgacggcgctcctttcaaggagtttgttgctcatcgtgaagagtgggcttacaagacttgttacatctaccctggtccaattcagtattggggcccaacggaggtgtgcgatcgtgagaccgtaactctcgctcttgagaacgcatctaagaagtaattaagatgtaatacaacttttatatagaagggatatcatggtcttgatgagtgtggtatcccttcttgcttattccttaaaccttttgttttgtaaccacagctttaatgtctaacaaaaagcctacacaatatcataggacatcttctgcaaggcgtaggagaccagctccacgtcagcgtcaggcgttgttgcgaggcgttccgttcttccccaaaagaggtcgaagagcgtggtatttaggtgcgttggctgtgattgcaatctatatttggatcttctattatttctttgtaggacctactggtttccgttggcgtgcgttgtatgggcctccaagttaccccgaaggttatgagattcatggtattgatatctcgcattttcaaggtaaaattaattgggatcgtttacataccaatgcaacaatagatggaagtccgcttcgctttattatcgttaaagctacagaaggctcttcaaaagttgatgtaaacttcaatgataatttctttcaggtacgcgaatatggttttattcgtggtgcttatcatttttggagtaataagtcaacggcgcgcgaacaagcttatttcttcttgaaaaaggtacatctcgaaaagggagacttgccaccagttctcgatattgagcatgcaccttctaatctgagcatcgaagagtttcaaactgatgtactaacttggttacatatagttgaagataaatatcacgttaagcccattatctacacctattttaaatttaaggagaaatatcttagtgcaccagtttttgacgattacccttattggatagctcattattatgtagataaggtgcaatataagggcaaatggaagttctggcaacatactgatcgtggcgtgcttccgggcatcgaaggtaatgtagaccttaatatatataatggttcatactacgatcttattcgtcttacgataggagaacaagatcaagttgaaatttccgagtaaaagcatcaacacatagaactttaaagataaaggttatatgtctttatgttgcgtctcttattgtttcattttctgtttatcctgtttgtttgctaattttcattgtataatacaaatgattaaaaatattggttttcaacgttttattatttgtattttgttgtatacatcgttgtagttaatagagcttttgaacgatagtatacgtattatagtgtataaagttcttagtataaaaaccgcgtgttgcctttgctctttctgcttttagtccctcttgatatgtgaattaggaatattctattatatctttttgtcataaagggtagggtatggcggtcgccatacaacctgtactacggccgtcatgcaatccgtactatggccgtgtaacaatgtgtattacggccgtcgtacatcaactaaaattccaaaatattatcacctttttgtcgagcacgcaatagcaaaaagaaagaattaaagtgggaataaaaaataaggggatgtgtaaagcaaagctttaacacacccacccataggtccttagaccttcggcatatagccttattgcggtaagatgtagattcttacgaggcaaatatatgtaatttatttggaacttaaaaattttttgcctatttttacgcaaaaatttactactaagtgatgaaaaaacgtattttaggactggatacaggcaccaatagtttaggttgggctgtagttgatcgtgatgagtatgataactatactttggtaaagcatggtggtttgatctttcaagaaggtgtaaagattgagaagaaagtagagtcatctaaggccgcagagagaacggggtataggtcactccgtaaacattattttagacgtagacttcgtaagatagaggttctccgtgtattaattaagcataatttatgcccctatttgagcgaagagttacttcatgcttggcatgtgcataaaacatatcctaagactgatgacttcatgttgtggcaacgaacaagtgataatgatgataaaaatccttattactatcgtcatttgtgtttgcatcaaaagttagatcttgagcgtcaagatgaaagatatatacttggacgcgctttttatcatttggctcagcgcagaggatttctaagtaatcgccttgatagtacccctgaacaagagacgggtaaggtgcaaacaggaatttctgatcttacacgtgagatggaagctgcaggatgtgaatatcttggtgactatttttatcaaatttattcagatcctaataatcatgagcgtatacgaacatgttatacagaccgcgaacaacattataaaaaggagtttcatgctatttgtgaaatgcagcaactctcccaagatttagttgcggaacttgataaagctctttattttcagcggccattgaaatcgcaacgtaagggtgtaggcaagtgtacatttgagccaaaatgtccacgttgtgctgagtcgcatcccgattttgaggaatttcgcatgctgagctttattaataatattaagattaagacgccacgtgatcttgaattaaggtgtctaagtctggaagaaaaagagaaaattcggtctcttttttatcgtgttagcaaaccaaattttgattttgaagatatcgctaaagccttagcaggtaaaggacaatatcaatatataaaggacgtaggcgacaaaccatataagtttaattaccgtatgacacaaggtgttccggcttgtcctactacggctcaacttattaagatttttggtgacgattggaaagatgctatagcagaaacttatcgtttaaataatacacgttttggacagaagtcggttgcacaaatggtagatgatgtattgaatgtactgtctactttttcttcagacaataaactaaaactgtgggcagagaagaatttgcaacttaacgaagaacaatgtaaaaagtttgcaggaataaaactttcacatggttttgcgtcacttagtctcaaagcaatacataaaattcttcctttccttcgtcaaggatatatttattcgcatgcagtagaattggctaatatacctgtaatcgtaggtcaagaaatatggaacgatactgataaacaaggttttataataaggaatatacaacagatgttacagtgtcaggaccagactacaaaagatttctgtattaaagattttctgttaaataacttcgaactgaatacaggtgctgttgataaactgtatcatccatcaatgatagagacttacaaagacgcggaacagaaagaaggaatttatcaacttggttcgccgagaacaaatgctatacgtaacccgatggcaatgaggtcgctacatgaaatgcgaaaggttattaaccagttactaagggagaagataattgattctaataccgaagtacatgtagaatatgcgcgtggtttgaatgatgcaaacatgcgtaaagctattgccgattatcaacgtgcccaagaccaaaaacaccaaaaatatcagaattctatcaaggaactatatcttcaagaaacgggaaggaatattgatcctacagaaacagatattcgaaagtatgagctttgggaagaacaaaatcataaatgcttatatactggtgcagaaataggaatagctgatttcttgggtgataacccgaaatatgatatagaacatacaattcctcgaagtattggtggtgatagtataatggaaaatcttacactttgcgatagtcgatataatcgagatgttaaaaaagcaaagatgccttcagaattagctaatcatgaagaaatacttacaaggatagaaggctggaagaaaaactatgaaacgcttacataccaaatagacaaatgtcgcacacacgcaggcatgtctaaagagcaaaaagatccgattattcaaaagagacatcgtcttaaaatagagcggaactattggaaagataaatatgagcgctttacaatgacagaaccacctagcgattttagtcgtcgtcaaggggcgggtatagggcttatatcaaaatatgctggcctttatctcaaatcgttattccacgatccgaagaatcgtaataagtcacgcgtattcactgtcaagggaactacaacggcagaattccgccgtatgtggggattacaaagtgaatatgagaagaaatgtcgtgacaaccattgccatcacagtattgacgccattacaattgcatgtatcgggaagaaacaatatgaagatatggcatcattctatcatgatgaagagctttatgatgatggcagaggaaagaagcctcagtttagaaaaccgtggccaacgttcacagaagacgtcctcaatctggagaaaagtctgatagttgtccatgaaacaccggacaatatgcccaggaaagcccgcaagtatgtgaggacaaccagagggaagtttcttgcaaaaggcgactgtgcacgtggcagtttgcataaagaaacatattatggtgcaattgaacgtgatgggaaaatagagtatgtagtaagaaaagcgcttacctcttttgaaaaagaagcagatattgataatatagttgatgatacggtaagagagattgttcgcaatgctgtacgagggaagacatttaaagaggcaatagctcaacctatttatatgaataaggagaaaggtattcttattaaaaaggtgaggtgtaaagcacccaaagtcttaaaaatattttctgttaagccttgcagggatacctctttccatcagtataaaaaggatatttatgttgctaatgatagaaattatatgatggcgatatatgaaaaaggggcagataagaaaataggctttgaaattgtaaaaaatatcgaagctgcaaacttttataagaaaagtatggatagagaaaattatccatgccttgtaccacaaataaagaatggtgcaaagataaaatattgtcttaaatgcggaacggcagttctattatatcagaatgatgcagaagagattgattttaataacatggaagatatcattaagcgtctttattatataacaggtcttagtttgagcgaatcatatggaatggtaactctgacacatgcacaagaagcaagagacaaattagatatacagaaaggtgcatttaaaatgggtgaagtttatcgccctaaaataaacttaaggcagactcaattccaaggcctgatagaaggagttgattttaatattagtattttgggtgatataaaaccactaaataaataagatagtgttatgttaaaacgaagcctcgtattttcatctcctgcaaacctgtctttaaaagataggcagatagttatatctttaaaagaaagcccagaagataaaattacagctccaattgaggatataggtgtcgttataattgataatcctgcagtttctataactattccattacttaatgatcttgcagataataatgttattgttataatttgtaattctaaaggtgttccttcctctactttacttagttttggtacaaaccattaccaaggggaaatattacaaagccaaatagatataacagaacctcttaagaaaggattatggaaacaaattgtagaatcaaagatcaaaaatcaagcagctttacttaataaattaggaaaaaatggcgataaattgaaaccttattattgtaatgtaaaatctggtgacacagacaatcgagaaggaattgctgccagaatatattttcaagaactttttggaaaggattttgttagggaacgtaaccaagagggaataaatgttcttttaaattatggttatacgatacttcgtgcagccactgcacgggctgtggtagggtcaggtctttttcaaggaatagggttgcatcatcataataggagtaattcttttcctttggcagatgatcttattgagccttatcgtccttttgtagacgaggcagtataccaattattatcaaataattgtctggaactatcgaaaaatgtgaaggctaagttaatcagcgtactctatacagatgtgtttttcaaaagaacctcaaggccacttgaacttggtcttacctttacaacctcatctctaacaaggtgcttaaagaaagaagataaagaacttttattgccattactgcgatgagttttaaccgtttaaatgcttatcatattatgtggctctttgttatgtttgaccttcctacacaaacaaagaaggagaagcatcattctgcactttttaaaaagaatcttgagaaggatggatttgtaatgtatcaatttagtgtttatgctcgcttttgtggttcacttgaaagtgcaaaagttcatgtaaaaagagtaaaagctcttgttcctgaaaagggacttgttagtattttgcagataactgataaacaatactctaatattataaatatttggggtaaaatagaagaaaagaaacgtcaaagccctattcaattggagtttttttaatatatttgcatcgtaaatactacttcatttcgttttatatatagtcttttggatcatatcccattgaaattcaataagataatatgtatatgttgcggtttgatgtagaaacaatttataaagcaacgtgagggtaagaaagagcaatctgcgctttgttgcggtttgatgtagaaacaatttataaagcaactcgatgcgggcacggggtgaggcagaagtagttgcggtttgatgtagaaacaatttataaagcaacttaacgttaagaggattctgtgtgtgaacggttgcggtttgatgtagaaacaatttataaagcaacgtagatagggttaggcatttcgacctcgcagttgcggtttgatgtagaaacaatttataaagcaactagtagacgccatttaaagcgcccctctccgttgcggtttgatgtagaaacaatttataaagcaacgacatgtggcgcaaccttgcatcacaactgttgcggtttgatgtagaaacaatttataaagcaacggatgtacccatatcaccttagagaacatgttgcggtttgatgtagaaacaatttataaagcaacagatgaaaacaccagtcggcaagcagtcggttgcggtttgatgtagaaacaatttataaagcaacaaactttcca

SEQ ID NO: 1670 - DNA, 15161 bp, synthetic construct
  misc_feature 1..15161: note = Synthetic
  source 1..15161: mol_type = other DNA
tcaggacatcaaatatacaatggcgtccgccaacatcactcagacggacatcgtatgtcggaaggttaagagctgtcatctgaaaaatcttggagttttattttgacttttgccttttttaaattaactttgcccaaaaatgcagggcaaagttagcgcttttattccatacagccaatcattttgcccagaaaaacatttgtgttacccaaaaacatatacgtacatggcagataaacaaggctctgtcacattcgacagcataatgagagacctcagggcgggtaactaccgtccggtgtatcttcttgccggtgacgagccctattatatagacaagatagccgactatatcactgagaacgccttgaagcccgaggagcgcgatttcaaccagaccatattctacggcctcgacacatcgcccatgcaggtcatggactctgcacgcgctgtgcctgtcatggccgagcggcaggtgatagtagtgcgcgaggcgcagctcatgcgtggcatagagaatatggagaaatatctcaggaagccagtcccctccacgatactcgtcttatgctacaagaaagagccgccgaaggcaaagaaggggtgggcggcagaggcggcaaagaatggcgtatgctttgagagcaagaaactgcgcgattcaatgcttggtcctttcgtcgcaggatacctcaagcagaagggtgtcgatatagaccagaaggcttgtgcgatgatatgcgattcgataggtgcagacctcagccgtatcgtgaccgaactcgacaagctccttatttcaatgccagaagggacgaagagaattgttccagaattcgtagagagccagataggcataagcaaggattataatgtctttgagcttcgcgatgccataatcaggaaagatgtcatgaaggctaaccgtattgcgaaatattttgacagtaatcctaaggcggcaaatcttcatatgatagttccgcagctcttcacattcttccagaacatgatgattgcctggtactgtccgcaccgcacagacgagcgtgagctatacctgtggcttgagttgagaggtgcctggcaggcacgcgagtatatctcggcgatgaggctctataatgcggtcaaggttatgcagattatacgtaagctgcgcaccgtcgctgccaagagcaacgggcttgataaccgtaatgcgactgagggtgagctgctgcaggagcttatcttcttcatcctccactgaatgtcagcgtgcagaaagacgattctgcacgttcagccagaatgttctatttatcataatataagcgtctctcccaaaggctggaagctatggggtggggcgcttcttcgtatatataggtatggctgagttttcatatttccgagccgtgcggcggatttctgccataatctgcccatctgtcatattgtaagcgttggatgggtttgtccccattctgtggtatgtgccattgtctgggcagtcaggactggcgggatggcttggaagaagccctgagatatatgttaatcgggaaaataggtaattaacatatttttacagtgattttacccctttatagccccttaattggctgctgagagcaggaaaacaggtaaagaaatggctatacaggagattttaagcatgaaaaacacatgaaatagagacttttcacgtacagggaaaaatgcgtctcagccctttgtttataagggtttctgctgctttttacccccaaatcctgagcgtagaagtcagcgagccaaccaattgccgggaaaatcgcggaatttctgaaaatcgtcggttttctgttacgtgaatttatatttcacatttattattatttagaaatgttattaatcgtcttgtgttatacatttacaaatgtaaaacaataaatcaaaacacaataccacatgccacatttatgcatattcaataatctaaattattacattgtacatttaaatctactaatcaagaaatctaaatgtatatttatgcaccatcccttttcacataaaagtcgttgaaaaccaacgatatagtccaatacgcctataaaaatgacatctgtgatgcccatacaatcacccaaatgccgcctgatacctataaaatccttataatataggctttgtaagcccaaaaaactcagaatgttagacaattatgataaatctatattaatcttccattattactatgtaaatatcaatatctatatcgataacaattttacatgtaaaaacttacataacaatattatatcttgtgtgacatctgtaaatataaaaagtgataaaattaatatcaatttgttggtcgtctcagattttatgtttacctttgtaaatgctaagaatcaccccatatataccgtcatatagcggcaacagccgtgaagacgtgtgccagccgatgtatacgagaccctctcgttaacaaattcataacccctggtccatactcgcacactgcatcccatggcctttaagggactaaatcgcccgcttacgatttgtaacaatttaccattatatatatatgaaggacagaataatccagctgatggagtcgcagcacatgaaccagcagagtttttcaaactttataggtataaaccctgctacactcaacagtatcctaaaagaacgcacccgccctacgctcaacatcgttgaggcgatatgcgagaagatgccacgtgtcagtatgacctggcttgtcaagggacagggcgatatgtatctgcccgaccctacccctactgccgacaacgacggtctgcttccgttcacagacgacgagctcagcgccccctcttcctccccctcctctccctctggacgccagtcacaatatactgtcggcaatctcttcgatgcaagcagcgatgagccggccagcccccagactcccaccagacaggcacagcgcatgacacgccaaccgcttcagcagattcaggtaactacgaaaaatattgacaaacagccacggcgcattacagagatacgcgtattctatgatgaccagacttgggagtcgtttgtcccgaagaaataaaccgtcccaaataagactattccattttccatatatagcttatgttaaatagaaagagccttcttgacatcttaatcactcttttcttcttcctcgtgacgcccacgcctgccatctcccagaccatggcgggctcattccgcgttatggaatacaatgtcgagaacctgtttgacagcgaccatgacagtctgaaaatggacacccagttcacacccgacggagattaccattggactcacggacgttactggcgtaagcttaacgccatctcccggagcattgtcctcgcatcgacagacagcctcacactgcgtcttcctgacattatcgggctgtgcgaggtggagaatgacagtgtcctcatgtctctgacacgacgctcgctgctgcgcggggcacgttatgagtatgtgatgaccgcctcgcccgacctccgtggcatcgatgtcgccctgttataccagcccatgacgttccgctgcatcagccatcacccactgcgtgtcgaccctcttccctccatgcgccctacgcgcgatatcctgtacgtgaagggtgagacgctctatggcgaccttcatgtctatgttctccacgctccgagccgcagtggcggcgagaagctgactcgcccacaccgcatggctgtcatgacccgccttttgtcaagtatcgactcgctctgctgtgtggagacctctccgcgtatcatcgtcatgggcgacttcaacgattattctgctgacaagtcactccgcaggctctccgcggccggtcttgtggaggtctcagccccaggctatctcaccgcctcgcccgatgtccgcggcacataccgctaccaaggcgtatggggcagtctcgaccatatcttcatctcctcttcccttcttcccttcttctcccgctcacgtgtctccgccccgtctgagctccttgagcccgataccagatatggcggcatgaagcccttcagatacatgcgtggccccatatataatggtggttacagcgaccatctccccttagtggccgatttcatgttcccgtaggcagcgttatccgtaatgcctgcgagcgccttttgatagtattcgtggcttgtgtctgtaaaaatatttcttgtttttatagtatggttctattccgctgaatatagggtatgtgatactttattatccaccattcagccagaatacagagcgtatttccccacacattatggattgctcatgaattcaccaaaaatccttatttatataatagattgatacatagtgatatgcatggagtataatcagcctgtatatttcccctggtgtttaagggtaattggtattctcctgatagatacttaatgagcttcccattgctactgaatgagcaggccaaaggtactgaatgacgagcccaaaggtgttgaatgagcattattgtaaaaaactttcgttttgcatttataggttagttttccagacttttctgtcagtcatccttgagccatcctgtaaagtcataaaagagatgctgtttcgtattgttttgtcgtcagtagaccaccttccgtcccgttccgcctacattttttatgaaaatccctggatgtttgttccttctccgcaatgtatagccatctcgtatcctctatgcatctgaatatttcccactctggcctcctgattctgtttctcccggctttattctccgtttctgtcggctcatattctccgtttctgtcggatcatattctctgtttctctcggctcttactctgtttctgtcgcctcatttactcgctttccctactcttcaacccatttccttgtatggaaatgccccttttgtcctgcatctcgaaaagtatcatccatccttcgctcttccacttttcccgcatcccttcagctctcctttccccgtcagtcgctgcgcgccattttttcgtgtcctgccatacctattccactgtgcccttccatccagcttcctcccctgttctcccctgccacacctcgtcattaaccgtgttcacctatccatccctgtcctcgttggccggttgaaagcccaataaacagagaggccggcctcttttcatgtgaaaagaagtcagcctctctgtctgtctcttgaaatctcataccaggcgacactgtcaatatttttcatccgccctgtggctttatccgtgagcggtcggtcagacgtaatgtttcaccctgggctcatcttgtccctcatccgtgcttatcctacgctcattgttcgcggttggtaagccattttgtggtgtcatacagccggcagtcgtcgccttcacataaccaatccttgtagcctgttatccgttgtttatgcattcttccacaagccgtacaatctcctcgggcgcctcgacaatcctgtgcctcatattcttgtcgtcgaaagcccgcaggtagtcaatcgtatagtcgactatgctgtcagagaacaccccttttgaggtgtatatctccctgtcacgctcaagttcgtcggcagcttccacgcagcatcctggcagctgttcgagcgactgttgcagctcgctgttgcccttcttgtggatatccactccgagtccgacatacgtcttctctgctatgtcgagcgcattgtccatctcgaagccatgtcttgccgcacagcatagggccgacatcaggagatatgtgtcagcgaagccgtcagaggctctccactcgaatgtctgctttatgctgaagtcgctgtcagagtctttctcgttagggttcaccttcctcgccatgtccatctttgttgtccatcccaggggcactctcacgagtgctgagcggttggagaaagaccagcacagtgatgtaggcgcctcctggttaggcacgagtcgcatgaaggagagagggtgggggttgccgaatgctggcagtgatgtccccgcgtccatccatcccgctatggctttgcgtgccgcgtcggtcaggttgccgtcctcaagcatcatcgagtcgcccttcctcgtcagcctgcagtggacatgcatgccagaaccagccttgccgatagtaatctttggcgcgaaggtcagctccacgccatatttataagccagctgtctcatcacccattttgctatcacgagctggtcggcggcgtcctctatgtcgcatggcaggaactctatctcgttctgctcgtataccttgccgtccttcgtgaagttccccacttctgagtggccgtactttattatgccgccacactgggctatcatcttcatcgcctccaccctcaggctggtgaatttgttgaaaggctcgctctcgtggtatcccctctggtcggccactctgtatagctcctcctccttggctatgacataatactccagctcgcccattgtctccatcgtcattcccgtcgtctccttgaaagccttgtgggccttgtgcagaatatactgtgggcttgaggcgaaaggctcgccatcacggtccatgaatgcgcataggatgtccagtgtaggaatctcacagaatgggttgaggaatgctgtgtggtatctcggtatgacatacaggtctgaccgtccggcttcgacaaaggggaacaggcttgacccgtcgacgcgctcgccagcctcaaggagtgttgtcagatgctcctcgctgtttatgacaaagttgagggtcttcagtcttccaccccatccgcagtagtggaagtttatgaaccgcacgccattctcgcgacagtagcgtatgatgtcgttgcgtgtgaagtcatgaggtgacttctgcagatactgaaccagcacattggggttcatcgtgaaacgtgtcttcattttgattggttgttaagattattggctttttgccatgttgtgtaattttgaagcaaatataaagaataattacaaaatgtcagaattattaccgtgaaatattgttaatgcgctgcaaataacatgttctcgtgtcgtgattggcggtttatggtgacattatgactgttaagggcggctctttccgatgcccatgaaacattgtcggcaggtggtctcttgataccatagttcatatttagggtcattggtgcccctctctgccccctcttgtgtatacctctcctttccctggcgtgaatggcagacaccgccatccaatctccccaaaaaagcccaaaatatacatcgggcaagcctcttccgcaccatatcgcataccccatcctgtggctacagataatgaagagaacactggtcttcagaaaaaatcaagttttcttttggccaaaccatattttttgattatatttgcatgattattttccttgccatctgctgcccatcacgcgtcaaggcgcccttgtctccgtccctcactcttggggctctaagccgtgaacagcaatgacaggcatctgaacaatgattataaaccaatcaaaaacaaacatcatggacctcataccaagctttgctgtcgaccacacccatctcagaccaggcatctatatctcacgtcaggacactgtcggcagcgatgtcatcacgacatacgatatccgcatgacagcccctaaccaggagccagccctcgccccggcagccatacatacaatagagcatcttgtagcgacatatctccgcaatgaccccgtatggcgcgaccgtgtcgtctattggggtccgatgggatgcctcacaggcaattatctcatcctcaaaggctgttatccttgtgctgaaatccgcgatttgatggtccaggccttcagctatgtggccgattacgccgatgtcgtccctggcacgacccctgccacgtgtggcaactgcctcctgcatgacctccccatggcccagtgggaagcacgcagatacatccgccggctgacagaggagttctgctcagagtaccctggagtagcccgtcctgccgatgccaacggcaaggaattcttcgacgcctgaccccccgttatgcatcctgcccgtccacatgaccggcaggacaggatacacgaatccccatgccacaatccctccatcccccggaagcctttaggcgtgttctgtgagtcattttccctcagggagggttcgcccacaggacaagtcctcccacctttgtcggattatatgcctccgctttcggattggtcattgtggcatggggattcatgcttttgtcttccccaattatctattcagcctgttttctttttctcccctgcttcttcttcctgacaaatttattcatatccctcagagagttcctttcccagaacacaccatcggcatatccctgtattgtcttgtcctcgtcagcgttcatgagtctttttgctgcccatagacagtattccctctctatctctattccacagaaatgtctgtcaagttttttcgctactacagcagccgtcccgctaccgaggaaagggtccagtattctgtctccaggcattgacgaggccagtatcagctttgcgtacagcttctcaggtttctgtgtggggtggtccgtattctcgtgcatcgaccagaatggcacgcttatgtcgtcccagaagtttgagggatgcgtcattctgaaattgccgtcatcagtctcctcccagtcctttggcataccctccaccctgtatggagcgttcaccctccttctcatcattacggcgctgacatcgaagtggtagtcgttaggattcttcacggcgaaccatatatcctccatcgagttcttccagttacgcttggctccgcgtcctttctccctctgccatgatatgcggttcatgaccgtcatcttctcctccaccactctctgtatcgacgctgtacatttccagtcgccacagatatagagtgagccgtccggctttatcttgtcacacaccttatagaaccatcctctcagatagtcctcatattctgtgctcgacatggccccgaaccgtgtgccgttgaagaccttgtcggtattgtatggtgggtctattatggccaggtcgaagtgtgcgtcaggaatatcgtctatacactccatcatgtcagcgtttatgaccatgtcgtccctgaagccagccttgaggctgtcagcgtcagagatgagccgccccagcgtctctcgctcttgttctgtcagggtgacagtcctgttccttcctgccctgtttttatttgtcgttgtcatggttatattgtttgggataagcctcggccgctgtcccgccctgcttcttcccagtcaggttttagtgatttctttgttcttccttgtccatgtggagcctccgctgcctcgctctgttctgctcctttccctgttctgctccgttccctgttccgctgcctttccctgtttccgctgcctcgctctgttcagatgtcttgcactctctgctttttctccatccgcaccgatgtttgcgatgcaaaagcgtggagttgatatattcttcacatggatgacatccataaatcagcatggatggagagtgtagcccgcttatgcaatgtcaggtctggtctggcgagggcagaagccatgccaatagagattcaatctacagctgctctataaaaatataaacacgtggaatcggtgtcacacagcgatgcggatatggccaacccaatctgtgtcatgcggcggtgaatccctgatagagtattaacatgttatgaagatataccaacaaaaaagccctccgaagagggctattaggaatatatccttcggcatatagccttattgtgataagatgtagaattatcttatgggcacaaatttaatatttttttctttatcatgcaattatttttatgcaaaatttgcggttttcctgcaaaatatttaattttataccccaaaatcaaactatatatcagaaatgaaaagaatcttaggaatagatacaggcacgaacagccttggatgggctgtggtagatagagacgagaacggtcagtgtactctcttgaggaagggtagcctcattttccaggagggagtgaaaatcgaaaaaggcaatgagtcttcaaaagcagcagagcgtaccgcatacagggcgtcgcgcaagcactatttccgtcgccgcctgcggaaggtggaagtattgaaagtgctcgtgaaatacggatggtgcccatatctctcacccgaagccctccatgcctggcatgtggataagcagtatcctatggacgaggagttcctccaatggcagcgtacagacgacgctttggacaagaacccttatgcctatcgccatatctgtctccatgacgagctcgatctcgacaacgaggcagagcgttttattcttggcagagcaatatatcacctcgcgcagcgcagaggattcaagagtaaccgcctcgaccaaagcgaagaggacggcaaggagactggagcagtgaaggagggtatcaacaatctatcggaagagatgaaagcggcaggatgcgagttcctcggcgattatttctggcatctgtaccgtgagaatgagcatgtacttgagggtggcaagcaccgtatccgtacacgatacaccgaccgcgaagaccaatacaagaaagaattctatgccatctgcgagaaacaacgtctctcaaaggaacagattgcagaacttgagcgtgccttgtatttccagcgcccgctaaagagccagcgccacagcgtcgggaaatgcacgtttgagaagaagaagccacgctgtgctgactcacatccagcttacgagcttttccggatgctcagcttcgtgaacaacataaaggttatgggaccgtatgatgtggaactgcgacctttaacctcagaagagtttgagaagataaagtcgcaattcttcagaaagagcaagccttcttttgactttgaggacatcgctaaggccctcgccggaaagaataaatatcagtatatcaaggatgcaggagaaaagccatataagttcaactaccgtatgacacagtctgtcagcggttgtcctaccatcgcttccctgataagcctgttcggcgatgactaccagaacgccattgctgaggtctatactctttcagaaggcaagacgaaagagcagatggtggaggatgtgtggaatgtgctttacagtttccaagacaaggagaacgtgaagcgatggggaatggaacgcctgcagctctcagatgaagaagcggagaaattctcaaagattcgtctgtcccgtaattttgcttctctaagcctttccgctattcgtcgcatactgccatggttagagcaagggcttgtatactctcgtgcggcccttatggcaaagattcctgatatcgtgggaagtgagatatggcaagagcatggggagaggatacagagcgagatgcttgagttcattgacaatttcaacgcctctgacgagaatatgcagggcactcttgacttctgcataaaagactatctgctgagcaatttcgaacttaagccaggagcggcagatgctctttaccacccctcaatgatagagacctacgaggatgcgaagaagaattctcagggtgtatatcagttaggctctccgaagacaaactccgtgcgtaatcctatggcgatgcgctctctgcataagctacgcaaggtcataaacatgttgctgcgagagaaaatcatcgaccagaacacggaagtgcacatagagtatgcccgtgaactcaacgatgccaataagcggtgggctattgccgactggaataaagaccgtgagaaagcccgtgcaaagtacgctgaggaaatcaccaagctttacaaggcagagaccggacgtgacattgtacctacaaaagaggagattctgaaatacgaactctggacggaacagaaccatatctgtctctataccggaaaagagattggtatatcagacttcatcggtcctaatccacgcttcgacattgagcatactgtgccgagaagtgtcggcggtgattctacaatgatgaacatgaccttgtgttgctcgcagttcaaccgcgacgtgaagaaagcgagactgccccaggaactctcgaacatagaggatattatggctcgcctcgcagactggaaagagaagataacccagctgagaaaggatgcagacaaggtgcgcacatattctggaatggcaaaggatatgaaagaccgccaaatacgcaagcgccataagatacgtatcgaacttgattactggcaggagaaataccgccgtttccaaatgacggaagtaccggaaggcttcagcaggcggcagggggccggcatcggacttgtagggaaatacgccggattatacctcagaagcctcttccacaagctggaagaccgtcagaagagcaatgtgagagtagtgaaaggcactacgacagccgaattccgcaagatgtggggagtgcaggatgaatacgaaaagaagtcacgagacaatcatatccatcactgcatagacgccattgtcattgcctgcatacagacaggcgactacaatgccgtagcacgctactaccagcaatatgaagaatacgaacggcaaagggcacagaaaccgacattccctaaaccgtggcctacattcactgaagacataaaggcgctggcatcgcagatgctcgtggtacacgataccccagacaactttgcgaagcatgccagcaagaccgtctacacgccaacggggaaacatgtggcacaaggagactctgtgcgcggttctctacacaaggagacttattatggtgcaatagagcggaatggcaagattgagtatgttgttcgtcggtcactctcctcgttcgagaaagcttctgagttggaatctatcgttgacgagacagtgaaggaaatagtcaagaaggctgttgcggaaaaaggactgaaagaagctcttgcaagtccaatatatatgaataaggagaaaggcatactgataaagaaggtacgttgtaaagtggatagtgtgaagaatcctgtagatatccgtacacaccgggatatcagcagaaaggaatacaaacgcaccttccatgtccagaacgacgagaactatctccttgccatttatgagggtattgtaaaggggaagccgaagagggaattcgaacttgtaaggaatattgatgctgcaaagtatttcaaggcaagcaccgaccgtgcagattatccttcaatcgtgccagagaagagccctaatggctatccgctgaagcataagcttaccgtaggaaagatggtgattctatatgaggcttctcccgaagagatagacttcgggaatattgaagacctcgggaaaagactgtataagattacgggattaagcattaatcctgttggaaatggctatggctcaattgtcatgcgccatcatcaagaagcgagaatggcaaaggaggtaaagcagaagaatggagcttataaaaacggagaagaataccgagctgctattatcatgctccacactcaattccacgcccttgtcgagggtgaagacttcgaaatcaacgccttgggtgagattacgctcaaacactgatgcctatgcttaagcgatcccttgtcttttccaatccaatgtcactgtctttgaaaaactgtcagcttgtcctggctttcaaggatgacccagacaataaaatgaccatcccgatagaggatatcggggtggttataattgaaaaccagcaagtaagcattactgtcccattgatgaacgcactcatcgaagggaatgtgcaggtggtggtgtgcaacgaccgtggcatgccatcagcaatgctccagagctttgaaagcaacaaccttcagggggagaacctgagaaaccagatgaatgctggagaggtgctgaagaaacaactgtggaagcagatagtcgaggctaaaataagaaatcaagccgcactgctcaataaggttggacaagagggagacattctgaaacaatattataggaatgtgaaaagtggagattctgataatcgagaagggattgcagcacgtgtatatttctctgaattgtttggcgaatcatttatacgggacagaactcttcccggaataaacgctctcttgaactatgggtataccgtcctccgcgcagcgacggcaagggcattggtatcttccggactgcttcctgccattggtatcttccaccacaaccgtagtaatgcctttcctctggctgacgatattatggagccttaccgaccttatgtcgatgagattgtatatgctctctctatgcaggggaagatggaacttacaaaagatgtaaaggctgatttgattcaagtattatatgcagacacacacttcagcaaggttatacgcccgctgagtgtcggacttacgttcacctcctccagtctttccaagtgcttcgcgaaagagcagacaagactctccttacctttaatgaaatgagctacgaacgattaaatgcttatcatgtcatgtggctattcgtgatgttcgatttgcctgtaactacgaagagagagcgtaagaatgccaccgccttcaggaagaaccttgaaaaggatggatttgtcatgcatcagtttagcgtttacatgagacactgcggttctcttgaaagtgctcaagtacatataaaaagagtaaggtcgttgtctccagaaagcggacatatctctatcgttaccataacagacaagcaatattcaaatattgttaacatttggggaaaagtagagaaaaaagcacgcccattgccattgcaactcgaatttttttagtatttttgcaatataatatttagaacatctgccacttcatatattctgctattagctaatatgctgattagtaggtttatagataatatatgttgtggtttgatgtagaataacgatataagacaacttattagccattattgccaatggattagttgttgtggtttgatgtagaataacgatataagacaacatgccaacggttagcatcatcaaagtcaatgttgtggtttgatgtagaataacgatataagacaacccaat

SEQ ID NO: 1671 - DNA, 15088 bp, synthetic construct
  source 1..15088: mol_type = other DNA
  misc_feature 1..15088: note = Synthetic
acactattctccaaagtgcattcttccgtattacagaagtaattcctgttgacctcgcagtagaacagatgaagaaattcatcgttaagagctacggaaagaaaggccaggacgtagtagataagaactatgctgccgttgaccgcggtaatgaatacaaacagctcactgttgaccctgcatggtctaatctcgcttgtgaaggtgaagttgcaaatgatgaccctgaattcatcaacaaactcgttcgtcctatcaatgcacaagatggagacctccttaaggtttcagacttcaagggtattgaagacggcacatggatgcaaggtactgcagcatacgaaaaacgcggtgttgccgcatttgttccggaatggattgcagaaaactgtatccaatgtaacaagtgtgcattcgtttgtcctcacgctgctatccgtccgttcgtggctgatgcagaagaaatgaaagcagctccatttgcagaggaagatactctcgcagcaattggcaagactttcgcaggcatgagattcatccagtctgttgacgttatggactgtcttggttgcggtaactgtgttgacgtttgtccgggtaagaaaggcgaaaaggctctcgttatgaaacctcttgaaactcagttagacgttcagaaagaatgggactactgtgttaagaacgtttcttcaaaacagaacctcgttgacatcaaagctaacgttaaaaacagccagtttgctcagccactctttgaattctcaggtgcttgctccggttgcggtgaaactccatacgtaaaactcatttctcaactctttggagaccacgaaatggttgcaaacgcaacaggatgttcatctatttattccggttctgttccatccactccttatactactaatgaacgcggacacggaccggcttgggcaaactccctctttgaagatttcgcagaatttggtcttggtatgactatcgctaatgagaaaatgcttgctcgccttgctgagcttatgcaaaaaactcaaacttgcgactgctgctcagacgaaataaaagcactcgctgctcagtggcttgaaaatcacaacgattatgccgtaactcgtgaagtagcagacaaactcattcctctttgcgaagcttgcggatgtgacctctgcaaagaaatcattgctcacaaacagtacatcgtaaaacgttcacaatggattattgccggtgacggtgctgcttacgatatcggcttcggaggtcttgaccacgtggttgcttccggcaaaaacatcaatatcctcgttgtggatacagaggtttactcaaatacaggtggccaggcatctaaagcaactcctgttggtgctattgctaaatttgccgctgctggtaaacgagtacgcaaaaaagacctcggtctcatcgcttctacttacggctacgtatatgtagcacaggtggctatgggtgcagacaatgctcagactctcaaggctatccgcgaagctgaagcatacgacggtccatcactcatcatcgcatacgctccatgtatcaaccatggtcttaaagctggtatgggtaaatcacagcaggaagaagcaaaagctgtagaatgtggctactggcacctctggcgttacaatcctgcacttgaagctgaaggcaagaacccattcactcttgacagcaaagaaccggattgggacaaatttgaagaattcctcaaaggcgaagttcgctacgcatctgttctcaaacagtacccgaacgaagccgcagaactcttcgctgccgctaaagctaatgctctctggcgttacaacaactatcgccgccttgcacagcaacagtggggtgttgaccctgaagcaaaatagtaaaattgtttcataataattatttggtaaggtgttcctcggttatcggggaacactttatttttagacatttattagaaacaggttcttagacatttgttatgaaacaggttcctataatagcttggcatataataacaaaaaatgccgccacaggtttccccgcagcggcacatattttttattctatgacaaatacttttatttgttcttatacattattaaggcggaacaaggctcaacaatgactttacctccttttgaagtaccaagaccatcttgatttatcttgccgtcttgtgcaactatagtccactcgcctttcttaacctttacttctcttgcttcttcggagccattgaagataagtttaatctctttccattcatcgccatttgcattattgcagatagaataagatataaggcatggagcatcaaccttgtcaaacacaatgttttgtgcaatttcttccgcagttgtcattcggaacgccgggtgattgcgacgcatacggatgagttcgcgataatacgcaaactgctctgcatttatggattttaaagtccagtctatagcattgatggaatccggtgatttatatgaattatgcacgccttttttgtcacggaacacttcttctccggcaaacataaacggagtgccttgcgaagtgaatacgattgtttgtgcaagtcttgcagctctcatacgctgttcttttgtagctccggtcatagattttgcaagcttatccgtgagcgtgaggtcatcgtggcatgacacatagtttataatctgcgtaggagcggaagcatacgcaaatttggagttgtttccttttgcataatccacttgcggatgtgctgtagaagccactataccaatttttacggtttcttcgttgcccggttttcctgtagcgaaaccacggtctgcagcattactgtagtgaccttttattgcatcacgaatatcgtcgctaaacaccgcaatacctgtcatttttgctacattttctttaagtgcacggcgttctacaggcagcggagaatctccggcagtccaaccttcaccataaacgaagattgatgggttaacttccttcagttctttagccacgcgtgacatggtttccgtgtcgtggatagccataaggtcaaagcggaaagcatcaatatggtattcttcagcccaatatttaacggaatttacaataaaattctgcatttggagtcgttctgatgctgtttcattgccgcagccggaagcatcactgtaagagccatctgagcgatgacgatagtagtaaccgggagccgtgcgagagaaatttgaatcatcttttccggctgtatggttatatacaacgtccataataacgcctattcctgcttggtgaagagccagaatcatctctttcatctcacgtacacgactgtatgggtctgcaggattagtagaatatgaaccttccggagcattataattgtatgggtcatatccccaattatactgatttgacggcaaattaagctcatctacactattataatcgtaagacggaagtatatgaacgtgtgtgattccaagttcctttaagtggtctatacccgttgcaagtccatccggagaaagggtgttttgctccgtaagtgccagaaatttacctttatttactattcctgatgtgctgtgcatagaaaaatcacgatgatgcatttcataaaccaccacatctgtgatatttttcacttccggacctttatcaccgtcccatccttcaggatttgtcttggaaaaatcaataatcgctgctctgtgaccattaggacccaccgctttagcccatacgccgggtgtttcatcaagccatttaccggcatatttaacactaaaggtgtagtaacaatcatttaaacgctgttttacggatgctcgccaaactccgtttgtgtctttagacatatccataaccttaaaaggtgtagatatgttgaaattgcgatagagtaggacttttacagaatcagcttccggtgaccacagtgaaaaatgattcccattagcatctgacacatactccaagtctgtaccattgtaagaagggagctgcaaatagtcagaatcgtttgatgctgcagacatgacaaaatttgaggttaaaatagctccggcaaatgctaccggaaggcaaaatttagtgattttattattcatttgtaatataataatgtagttaaattggcttttggtgcttacaaatatagtgttttttgtctaaaaacgcaaattatatatttttttggtcaaaattgccgtataaataaaatttttgataaatatcagtaaatcaaagtattaactgtaaatttagtggaaattaagcttatcagaattgaatattcaaatttacttttatggagtgtacgaatttcaaaaattttcaaaaaatctgtctatttgcaagttaaaatttataaacacaaataccaaattttgtcattttaaatagtttacaaatataattaccaacataattgtattttgtaaactgttcgaacaggattctctgtgtgaaaatttaatttattaaatagcaaaatcttacttttttcaattcaaattttgcaatagtcgttctcaaatttacattaacactttttaatagtgtatttatattgttgatatatagcaaattacaaatatctcttttaccaatactttagctatgtacctttcagcaaacaaaacctcgtatttctacattttagaagctctaaatagttacatattagctaaatacatatagatagttatactaatactttaatcaaatatttgcatttttgttacctgtttgattttataaacttttattttttcaaaaatttttcagataaaaatttgctatttacatttatacattgtatatttgcaatgcgtaatttaaaatcgtaaacacatggatttagtagaaagactcaatattttcacgaaatcacaaggaatcagctcttcaatccttgcggactcttgtggcataccccgccccacagtttctcagctgctcaatggaaggaacaaaaaaataagtgatgaaatcatcagtcgcattcatcgcgtatatcctcaactatctattatgtggctaatgtttggcgagggagagatgcttgtttctgaaaataatcaattctcagagcctcaaaatggcactaatgacggtttttctcagccctactcccctgaatcacagcaaggtaacttattttcaaacactgaaaatcctgttcagaatttaactccggataattcatctcctatctccggaatcatcaatatgatgtctaacggcgaaaaaagcaatttttttattgaaaactcagataaaaaagaatctatctccatcactccggatagccataagaaaatcactaacatagtggtgttctatagcgacaatagcttccagtctttctccccttctcaaaactaatattgataagattattctgaatcatttctatcgtacgataacatttcaacatacttttgcaactgacccttacaatatactttttttcatcatctaacaatttgtaaccactcatacaaaatataaaaaggagcctttcacaagactcctttttcgtttccaataggtacaatttctaaggtaaaaaagattgttttaggtttgcgatacaaaggtcgcagttttattttaccctacaaaatatttttttatgttatgcaacatagttttttatcaatttttgcgacttttcattgtttacgtttgcaaatagctgattttcagtaatttagcaaacttacaatttttaagttgtattagttaaaatttgttaatacttcaaagatatctacttttcagtggaaaatttgtccatttttaagcattttccgtcaaaaactgcgtatgaaaagtgagaaatccagtctcccaagataattaccgatgaatttttcatattttccggattatagtcaaaaatcacatgtctatgtccgaaaataaagtaatctacaaaagggttatttttattgtactgatatgcaaactgaacataattgtctgtctccgggtctttaacttcgtattttttaccggtttccctgctatgcccggaccacgcatgagcaaacgggacagtccagcatggtggaagctgtgcataaagccattggcaaaatttattgcgaaaaattgccctaataaatttaaagcccggctttaaactgccaagagcatcaccgtgtgcaaggtaaaagcgttttccggcaaattccgtcaccacttcgccatctacaacgtccatacctatctcatttttaagatagtcaaagagccaaatatcgtgattccctacaatccacgtaattttcactccggaatccgcaagtgccgccaatgctccaaaaaatcgcacatatcctcgtggcaccacggttttgtattcaaaccaataatccaaaatatcaccaaggagataaaggtgtgaagcatcatcttttatagaatataggaacttcaccaccctatcctcaaattctcggggtggattaagatagtttgcacccaaatgcaagtccgatatgaaatagacgtttttcattatagaaatccgagttcaagctttgcttcttcgctcatcatatccttattccattcaggttcaaataccacatttatatttacggacttaagtccctgaatagattcaagcttatatcttgcatcatctacaataaaatccgccatcgggcagtttggagccgtcatcgtcatatctatattaagttcggcatcatcgttaatgtcaattttatagacaagtccgaggctatatatgtcaacgggtatttccgggtcaaaaaccgtgcgaagcagttctatcaccttttcttccagtttgagtctttcttcagtagtcatgtttttacctattttggcataaattaacgcaaagttagcaaaaaaattgcaataatcgataatagtttttaactttgcaatgaattataattaaaaaagcaatatttatgaattggattaagaaaattttaatggttgtagcagtggctacactatttgcgtctccggcaatgggacagttccgtttcggtgttaaagccggtttggcaataaatgatatgaagtttaacacagacgctttgaaagcagacaatcagaaaggctttacaggtggtctcgttacagaattcacaatgcccgttatcggtatcggtgttgatgcctcactcctctatgctcgccgttcttttgaagctgtaggtgcgacaggcaacactactgacaaccgtgactaccttgacattcctgtaaacctcaagtggaaaatcggtattccgggtgttggaaaaatcgttactccttacatcaccaccggtccggacttctcattcttgctttctaagaaaaacattagcaatgcatgggaaaacaaaaccgttgacattgcttggactgttggtgcaggacttcaactttttgacaaagtgcaagtaggtgctacttacggttggggtctcagcgatgctgcttctacagagagcggcaacgagcatggtgcactctattcttcaaaaaaccgttgctggactgttacagcagcatatttcttctaaagaataatacaaattatcttgggaaatggcatgattttttgtcatttcccttttctttttttgaatagcacgaaaaattagtaaacaaatttactcctaaattggttatatctacagagtaatggaaaatttgctcagcattatgcttcttcaactataataacataactatgatatcgcataaagcaatacagtatctatacgaccattacaacaaacgtcctgagtcaccggactgcttggcactgaatctgctatttgagattccgcaagagtttcataatattagtattgatgaagaaaaattggaaatcggttctatttgcaataattctcctttcagaactattgctctgaaccacataaatgctatcatagaattagaagagactgtagctattgtcctttcatgctctattattttcttgagcaaactttcacaagatatttctatagacataaaaaacgttgcacccggtttttttgacaaattgtctaatattttccagggtagttgcgactaacaattgctttctatcattatcactaaacatttttatggctaactttaaaacaattatcctctgcaatatgggaataattttgctttccgcatcttgcaattcaaacgattacaaggaagaattcacagcaatcacatctgaactgtcttcaacggactattacggcagaagtaactatgccaacggtgacataaaagctgcaaagtacatcattgactatatttccggaattgaaggcatcactcctgtcggcaacttttccggcacccctactcccgcttttcctccgcacaaatcacaagttctcccgggagacgaaggtcgttggagagaaatcagcaacaatgaaaaatatctgccattcttgcagcatttttgtattcctatgaatgtgatgagaggagatatgagcatggccgtagatagtattcctttgcgtgcaacatttgatttcgtagcaaaagaattttctcctgcttgccacggcacattcccgctggaatacgttccggattcacttgtcacccaatttaatttcatcaaacacttgaatagtggggaatttgaaggcaaattcgctgtaatcaattgggaacaatacaaaaccctgccctgtcatccttttgaacgatacaaaccatacttaggagaactggattccacgaaaattgcaggcgtcattctgcgagacaaagaactcgttccatatttcaaggcccgctcatatttccaaacggaaatacccgtgtttgcagtaaatgaaaattttccgaaagatgcttcaaatattactattgccctagatgcagagtttttacctgcccacgatgcacataatattattgcatatcttcccggaacaaatcctgaaaagccgtgtattacattcattgcacattacgaccacctcggacttatgggacgcgacaatattttctatggtgcaaacgataatgccagtggagcagccatgctgtgtgtccttgccaaatatttcggtaaaaatcgcccggaatgtggtttgcaattcatttggcttgatgctgaagaagaaaacctcctcggctctttctactactgccaaaaccccactctgccgcttgataacgtcaaatttgtgattaaccttgacatggtggctgatgacagcgaccatctcgccactgaatgtagcgaaaacggtatggctgaacttgagataatcaaagagataaacagcaataacggtgaataccctccttttgacattgctctgcaagaactccttgacaatagcgaccattacgctttctctgaagcaggcgtacctgcactatatttttctacggaaggcagctaccttaaagattatcactcccctcgtgattcaaacagcaatttctcaaatgataatttcgacaggctattcagcttaattgtcaagtacataaacaagtaatctgttctcaaatacaatctaccaagagtctgatttagaaccttttcagcacaatcagttgttccgcaatcaccctaatcaccttaaaaactctaaacaccctaatcactctaatcaccttaaccaccttaaaaactctaaactccttaatcactctaatcaccttaaattccttagagccaaaagaataagaacatagtatcaaaataaagcgaaaagtttgtttatttgtgagaaagttataaatttgcagactgaatcagatatcataatttataaaccgattttaatcatccttataactatcttaaataataactatgaatttgaaaattctcaaacatatataaaaaaaacctctcctaagagaggtcgtaggaattcatccttcggcatatagccttattgtgataagatgatgaattgaattttcttctgcaaagttaaaatgaaaaaataataattccaaatatttatatataaaaatgaaaaaacgcattttaggtcttgataccggctcaaatagccttggatgggctattgttgaccgtgaagatgatggaaattatgccctgattgataaaggtgtagttatctttcaggaaggtgtaaaaatagaaaaaggtatagaatcaagcagggcggctgaaaggactgcacacagagcattacgtcgtcaatattttcgccgccgtcttcgcaaaatagaggttctgaaagtattagtgaagtataatctttgccctgcattgactatggatgagttgaatctctggcatacacgcaagatttatccgctcaacgatgatttcttgcagtggcagcgtacaaacgagaaagaagacataaacccttatcactcaagacatatttgcctcacggaatgcctaaacctgtatttggaatcacatagattcactctcggtcgtgctttataccatctggcacaaaggcgaggcttcctgagtaatagacttgatgccaacgaggaggcggaatccggtgctgtaaaaagcggaatttcaaaccttagcaaagaaatggaaactgccgggtgtaaataccttggtgagtatttctataaattatataaggagaaaggaaataaaattcgcatacgaacaaggtatattgaccgtgaaaatcattacaaagcagaattttatgcaatatgcgagaaacaaaatctttctccggagatgataaaagatttggaacgtgctctatatttccagagaccactcaaaagtcagcgaaatagcgttggaaaatgcacatttgagaaaaacaaatcaaggtgcagtgattcacatccgctgtttgaagaattcagcatgttttcatttctgaataatgtaaaaattcaaggaccatacgatgcaaaacttcgtccgcttaatgatgaagaacttgccaagataaagcctcttttttatcgagtaagcaaagctaattttgacttcgaagatattgcaaaaaaaattgccggcaaagggaattatcagtgcattaaagataagacggacaaacagtacaagtttaattaccgtatgacccaaggtgttcccggttgtcctacaatggctcaacttatggcagtttttggtgaagattggaaaaccggaatagcggagacttttgacctttccactcgcaaagacggaacgccgaaaactgccgacgaaatggcaaatgacatttggaacgtgctgtatttctttgacaataaagagaagctgaaggagtatgcacaaaagcacttgcaactatctccggacttggcagagaaattctctaaaatcaagctcagtcatgatttttcatcactctctctccgtgctatacgtagaatcttgccatttttaagatgcggcatgctttatagccatgctgtgtttatggggaaaattccggatatagtaggtaaggacgtatggaatgatgagtcacaacgggaatacattatcagcagagttgcggattttgcatctatgccttacgataaactcagagaaacaaaattgactcttgaacaatgtattaaagatttcctctgtgaggaatatggagcgagtattgcagacgtagagacactttatcatccgtctatgatagaaacatatccggatgctcgcccaaaccatgacggaattgttttgcttggcagtccgcgtacaaatgccataagaaatccaatggcaatgcgttcactgcacgaggtgagaaaagttgtaaatactcttatcaaagaaggtaaggtggaccgtgatacagaagtgcatgttgagtatgctcgtgaacttaataatgccaatatgcgtgaggctatcaaaaagtatcaggatgacaggcaaaagaagcataacgaatatgccggggaaataaaaaaactgtataagtccgctaccggaattgatatcgaacctacggaaacggatgtcctaaaattccaattatgggaggaacaaggacacatgtgcctttataccggtaagcagattgcaattacggattttattggggcaaacccgtcttttgatattgagcacacaattccgagaagcgtaggtggtgacagtacgcaagaaaatatgacactatgctcaagccactacaatcgttttgtaaaaaaagctttgttgcctacacaacttccggattatgagcagattattgaaagaataaagccctggcagcaagaagtgaaacatctcactgcacaaatagacaaaataagcacaagaggaatctgggataaggctaagaaagacaacctaatccgtaagaaaaataaattgaagatggaacgtgactactgggacggtaaatgcaaacgtttcactatgactgaagtgccggaaggttttgcgctccgccagggggcaggcattggactaatttcccgatatgcggcactttaccttaaaagttactttaattccggtgtggaaacgtcacatcgtcaggtttatagcataaaagggcctgtcactgctgaatttagaaaaatgtggggactgcaagaggaatatgaaaagaaatctcgtgcaaaccatattcaccattgtattgacgccattgtgattgcttgcattggtaataacgagtatgctcaaatgggacgctatcatcaccaaatgttcgattattatgagggaaaaggagaaaaacctgtttttcctaaaccttggagcacttttacgcaagacgtaaaaagtatcagtgatgaattgctcgtggtacatgatacacgggataatatgcccaagaaagcatgcaggattgttgacactccgcatggaaaaaaacaggcaaaaggagactgtgctcgtgccggattgcaccttgatacatattatggtgcaatcaaaaacaaagatgaaataaaatacgttgtcagaaaatccctttctcccgattttacgctcaaagaagcagaaaatattgttgacgaaactgtcaaacagaaagttaagtctgcgtttgttggaaataaacttcagcttccggtttatatgaatgaggagaaaggtattgaaataaagaaggtaagatgttttgccaacacaattaaaaatcctatacatattcgttcacaaagagacttgagcgacaaagactataaacaacacttccatgtgtctaacgacaccaactattgtatggcaatctatgagggcaaaataaaaggtaaagtgaagcgagactataaacttgttcgtactatagatgctgcgaaatatttcaaacgaagtacaaattatgaagctcaaaaaacattggttcaggaacttagtaataaaggttttgaacttaaacaattactaaaagtgggacaaatggttttgctttacgaaagcaatccggaagaaatttgtttttcagatttaaatgatatatccaagcgtctttacaaaattgtaggtttaagttatcttcctgttggagttggatacggtacaatagtaatgaggcatcatcaagaggctcgtaatgcgaaagatattaccattactaagggtgcttacaatgcatctcaaccaatacgcagttcaatatatctgctacatactcaattcaatgctcttgtagaaggtaaagactttgaaattactccaacgggaaaaattataaaaaagtagaaaaagagatgttaaagagaacgctttgttttactaattcactacagctttcactgagaaacgcacagttagtaataacttataaagacaaacccggtgaaaacgctactgtacctattgaggatatcggcatggtgattatagaaaaccagttggtaactattactatgcctctcctcaatgagttggtagataatggtgttgcagtaataatttgtgacaagaagggtatgcctcatgcaatgcttcaaaattttgattcaaataatctccaaggtgagtttttgagaaatcagataaatgtaggagaacctctcaaaaagcaactttggaaacaaattattgaagcaaaaatttttaatcaagcatccctattaaataaactaaacaaaaatggagatattctgaaacctttttatatgaatgttaagagcggagatagtgacaatcgtgaaggattggcttccaggttgtattggaaagctctttttggggaagatttcttccgtgagaggaatgaagatggtataaattctctcttaaactacggatacactattttgcgttctgcaactgctcgtgcattggtcgctgcaggtctaacaccggcgttaggtctttttcatcataatagaggtaacgctttccctcttgcagacgacttgatggaaccatttcgcccttttgttgatgaaattgtctatcatctatgcgaagaggaaaaatatcagttagacaaaaatacaaaagctgctcttatttcatgccttaactgtgatactttttatcctaaagtgatgcgtcctcttcaagtgggattatctatgacaatggcttcattggcaaaatgcttttccggacaacaaaaaaaactaagtttgcctaagtttgaatgagtgaaatacgccttaatgcctataaaattatgtggctcgttgtgatgtttgatttgcctacaaccaccaagaaagaacgaaaagactatacaatttttcgtaaaagtcttgagcgtgatggatttactatgcaccagtttagtgtatatatgcgtttttgttcttctttggaagcaaaagaagtacatgtaaaacgagttcgtggttttatgccggctaaaggaaaactcactattattacgattactgataaacagtattcaaatataatcaatatttggggtgagattgaacaaaaagtcaataaacctcctcaacaattacaatttttttagtaattttgtaccttaagacgtggtcatcattccatttcttattactattttcctatatatttggttgtatattagtatattatagcatataggttgtggtttgatgatgaataaagatattaaacaaccaattttgtagcaattagacttactcggcgggttgtggtttgatgatgaataaagatattaaacaaccaaat

SEQ ID NO: 1672 - DNA, 11551 bp, synthetic construct
  source 1..11551: mol_type = other DNA
  misc_feature 1..11551: note = Synthetic
tgaaaaagccatgcaaagtgcggcacttagccatgctttttgcatgaaaaagcatggctaaatgcatcaaaaagcagggaaatgaacgacagaggcgttgtttctgacggacaaaaaggcgttgaaagtcatgaaatgggtggaaaagtgggcaaaaacagtgaacagaaatcacgcaacggaaacaatctagcgaagcaaaacgatgcaaaaagcatgtctttggcctcagttcttaaccagaatgctatggccaaagatggaaaatgtaggcgttttgtggcttaaacaccctaaaaaacttctagaattgcgcgtggagaaaagttgtcttgtaaacaaaagagaataaaattgtgatgtctatgaattggattaggaaagctgtctgaacgcgttttgccaacaggacatgctccttttcttctgcccgccgctttgccacggcgcgtttggcgcatgtttttttgttacatctgttatgtctaggggaaaccgccaagaggaaggcgacaggttcataacagccattaatatgtcctccatgtgagtactgttttaattgcttatggttatgtatgagagatacattgccaagttcatctattataaatgcaccgagctcgcttttaattgtgaagactataagcaagatatttggctggcagcgtaagaccgcttaaagttcatctaagaaattaacgaaccactgatgttttgaaaggtaggctcaatcaaccttttgaaacaaaaaagcccctccgaagaggggcaatagagcataagcccttcggcatatagccttattgtgataagatgtagaaaatcttatggctgcaaaattagcaagaacatttggaactaccaaaaaaatgatgtaattttacgcctaaatcttaatttgataatttgtttataaattaacaaccataactaacgattatgactacacggatattaggccttgacacagggaccaacagcttggcttgggcagtggtagaacgcgatgaaaaaggcaattacaccttggtgaaacgcggtgacgttatctttaccgaaggagtgaagattgaaaaaggcatcgagtcttcaaaagcagccgaacgaacagggcacaaaagtttgcgcgtgcattattttagaaggcgactacgtaagatagaaacgcttaaaacgcttgttcggcttggtctttgcccgcatctctctgatgaacaacttagactttggaaaacaaagaaaacctatccgcttaccgcagacctcatgctttggcaacattctggctctgccgaagagaacaatccttattattgtcggtatgtttgcttaacacaaaagctcgacttaaccgaccaacgccaacgatttcttttgggtagggctttctatcatcttgctcaacgccgtggttttcttagcaacagactcgacaccagtgcagaatcagacgaaacgggaaaggtgaagtcgggcatttctcagctatcagacgagattgccaatgctgggtgcgagtatctgggcgaatatttctatcttctctacaagcaatacggcaacaacatacggctgagaaaccgctataccgacagggaggagcattataagaaagagttcttggccatctgtgagaaacagcaactagatgcagcgtgggttgacgcacttcaaagggctttgtatttccaacgtccacttaagtcgcagcgtaggggtgtgggcaaatgcacattcgaacccaagaaaccgcgttgcgccgagtcgcatcctgccaacgaagcgtttaggatgctttgttttctcaacaacatcaagatacaaaccccacatgatgccacgctaaggccgcttaacgaggaggaacgcgaaaagatatggtcgctattctttagaaagtcgaagcccaacttcgactttgaagacattgcaaaggctttggcagggaagaacaactacgcttactataaggataataacggaaaaccctacaaattcaattatcgtatgcagcagggagtgtcgggatgtcctgtcacagcccagctaatggatgttttcgggcacgattggcaagcgggcattgcagaaacctacaccgctgtagcgaagaaagacagcaagaaaacccttgacgaaatgggcgatgatgtatggaacgtgctttattccttctcttcgaaagacaagttgaaggcttttgccatcgaaaagttgcaactagacgaggctctcgccacaaagttcgccaacattaagcttccacacgcttttgcagcattgagtcttaaggccatacgcaacatacttccattcttgcgccaggggtttatctactcccatgctgtgcttctggccaagattccagatgttgttacaaaggccgtttgggagaatgatgatgcacgcgaacgaattttatcaggggtaatggatataattaccaactacaatcccaaagaccgaggcctggaggggacgatagacttttgcatcaaaagctatttgaaagacgttgtcgacttgaagcccggcgcaaccgataagttgtaccatccttcgatgatagaaacttatcccgatgcaaagcaaaataaggccggtgtgtaccagttggacagccctcgcaccaatgccatccgcaatcccatggccatgcgctcgctccatgtgttgcgtaaggtggttaacaagctgttgatggatggcattatagacagaaacactgaggtgcatgtggaatatgcccgcgaattgaacgatgctaacaagcgaaaggccattgccgactatcaaaaaaacttggagaagaaacgagccgactacagaaaacgcatcatagagttgtatgctgaagaatgccataaggccattgaccccactgacaccgacatattaaagttccagctgtgggaagaacaaaaccacaagtgtgtgtatacagacgctgaaataggcatctgcgactttcttggcaacaatcccaagttcgacatcgagcatacaataccacgaagtgttggaggtgacagtacacaaatgaacctaacgctctgcgactccgcgtttaacaggcaggtgaaaggcactaaactgcccactgcattagacaatcatgcagacatattgacacgaatagcccactggaaaagccaatgcgaagagttgcaaaagcaaatagataagatacgaacgtttgctgggatggaaaagggcatgaaagatcggcttatacaaaagcggcatcgcctgaaaatggaattggcttactggcaaggcaaatacgaaaggttcacgatgaccgaagtgcctgaaggtttcagccgccggcaaggtgcaggcattggcttggtatcaaagtatgcaggcctttatttgaagtcgcttttccacaatgtgtatgtgataaaaggtgttaccacggccgagtttcggcgtatgtgggggcttcagggcgaatacgaaaagaagtcgcgcaacaatcattgccaccattgcatagatgccatcaccattgcctgcatcggaaaggccgaatacgacaggatggcccaatattaccacgaagaagaagatttcttgtggcacggatctacctacaaaccccaattcgataaaccttgggaaacgtttaccgaagatgtcttggcacaggaacattcgctactggtgaagcatctagccaacgacaacatgcccaagcgtgccaagaaactcatacacaccgccactggtaagcattttgcgcaaggcgatgccgcacgtggctcgctgcataaggacacttattatggtgccattgagcaaaatggcgagatacgctatgtcttacgcaagaccattgctagcttcacgagcgaatcagaactggaaaacattgtggaccaagccgtaaaggagaaggttatggctgccgtggccggcaaaaactttaaagaagccattgccaaaccaatatttatgaacgaggaaaagggaataaggataaataaggtgaggtgttatgccaattcggtgaagaaaccactcaacattaggcaacaacgcgacttgtcgggcaaggattataagcaccagttccatgtggtaaacgacaataactatctcatggctatctatcaaggcgaagtgaaggggaggataaagcgcgacttcgtgcttgttaacaacattgcggcggcaacacactttaagcaatgcgcccgagaagataaatgcggtgcacttgttccccaaaacagccccaaagggcatttgccattgttggcaacattaaagataggaacgcaagttcttctttatgaggatgcaccagaggaaataaatttcgacaaccagcaagacttggtgaggcgactgtataaggttgttggctttagctcaatgacaataacgggcaacgactatggtgtgctgtcgcttaggcatcatcaagacgcgcaacaagccaaagatgtgaagtttaagaatggcaaatatcagcagaacgaagctttgcgccaaggcattacgctgctacatacgcaatttaaggcacttgtagagggcgtcgattttgagtttaacattctaggggaaataaaaaggaagactgcccatgcttaaacgaagtattgttttcacctctcctgctgccctttcgatgaaaaatgcgcagttggtgataactttgagggaacagcccgacgcttgtcggactgttcccatcgaagaactgggcgttgtgttggtggataaccctatggtatcactaaccatccccctgataaatgctctggctgacaacaatgttgccttgattttctgcgaccaaaagggtatgcccaacgccctttcgcttagcttgcacgccaacgcaatacaaggagaaagttatcgtgagcaggtgtctgcaggcgaggtcttaaaaaagaacttgtggaaacagcttgttgaggcgaagattaagaaccaagcacgcttgctaaacaaacggggaaagcggggagaactgctcaaaccgctttatatgaacgtgaaaagtggcgatgcagataataaagaaggtgtggcagctaaactgtattggaccgaacttttgggcacggactttcgtcgcgaccgagacttgccgggaataaacgccttgctcaactatggttatgctgtgttgcgagccgccaccgcacgtgcattaatggcttcggggttgcatcctgcatttggtttgtttcatcataacagggctgatgcctttcctttggccgatgatgtgatggagcctttccgcccctttgttgatgagattgtgtgtaaactggccgaagaacaagcacttaacctggacaaaaatacgaaaggacgactaataagcgtactgttttgtgatgtcacgttctctaaagttgttcgtccgcttagcattggcctaacgatgacaacagcttctctagaaaaatgtttctctaaagaaaccggcaagatgcaattaccaatactcgaatgacctacgaccgtcttaaccgctatcatattatgtggcttttcctaatgttcgacttgcctacaaacacaaaacaagagcgtaaagaagccgctcgatttagaaaagacctcgaacgagatggttttacgatgtatcagtttagtgtatatgttcgctattgtggctcgcgcgagagcatgaatgtgcatgtcaagcgggttaagtcgctcgcacccagcaccggtcgcattagcattttggccgttactgacaaacaatattctgacataattaatgtatggggagaaattgcagcgaaacagcatcctaaacccatacaattggagtttttttagtaactttgcagcaaacaacatcgcatcaaaccacttcttattgtccaattaaaaagcaacaaactggttgataatgaataatgtaagtggcataggttgtggtttgatgtagaaagaagatataactcaacagataagtaagctgatactttttcaaaaggttgtggtttgatgtagaaagaagatataactcaacgccagcatgtgctgtcagtttttccattagttgtggtttgatgtagaaagaagatataactcaacacaaaggccaacaaggacgataagccaaacgttgtggtttgatgtagaaagaagatataactcaactcggccgcctactcgatgcgtttgttacaagttgtggtttgatgtagaaagaagatataactcaactatcaaacaaacttctgatgaagtaaacaagttgtggtttgatgtagaaagaagatataactcaaccgaaggcgaaggcgggcaaaccaccgacgggttgtgctttgatgtagaaagaagatataactcaactgtgctgttacaaataggataagccattaagttgtggtttgatgtagaaagaagatataactcaacaagccgtcttctgtgaatgataagccactaagttgtggtttgatgtagaaagaagatataactcaactcgccctcaattcggcatgcccaataaggggttgtggtttgatgtagaaagaagatataactcaactttgactttatcgaactggccaaaaaactggttgtggtttgatgtagaaagaagatataactcaacatgccgttggggctgaacaaattgtatatgttgtggtttgatgtagaaagaagatataactcaaccgtgcgccaatatctgtatatccctatcacgttgtggtttgatgtagaaagaagatataactcaacagattgcgaacacgcttataacgtatgctgttgtggtttgatgtagaaagaagatataactcaactgcaatatatttttgcttatcgtgatggcagttgtggtttgatgtagaaagaagatataactcaacggcctatcttcacagacaagccgccacatggttgtggtttgatgtagaaagaagatataactcaacagccagcacggggagaagcattccgacggggttgtggtttgatgtagaaagaagatataactcaacacgaatagaaatcacccgtttcacatagttgttgtggtttgatgtagaaagaagatataactcaacaagtcacacgatacagatacgtccaagttgttgtggtttgatgtagaaagaagatataactcaaccttatagttttggttaaacgaggttaaaaagttgtggtttgatgtagaaagaagatataactcaaccagtgccttgtatgcaaaacaaaaggaattgttgtggtttgatgtagaaagaagatataactcaactttttagttggtttaaacgttcttgcgcagttgtggtttgatgtagaaagaagatataactcaacgtttataagtacaagtttcataattattagttgtggtttgatgtagaaagaagatataactcaacttggcctgtaatcgtaagtcttgtactacggttgtggtttgatgtagaaagaagatataactcaacttggcggaaatttccaacttatcatttgagttgtggtttgatgtagaaagaagatataactcaactattttttcaaaagcatatcaatatcaatgttgtggtttgatgtagaaagaagatataactcaacaactttcttttaattggttttctttcgtttgttgtggtttgatgtagaaagaagatataactcaaccctttgtgaaacatcatcgaaataattaagttgtggtttgatgtagaaagaagatataactcaacttagacgagctttcgaacacatacaccaatgttgtggtttgatgtagaaagaagatataactcaacgttagtgtcaagcgaaactacgccactacagttgtggtttgatgtagaaagaagatataactcaactacagtccgtcaattcactaccgttataatgttgtggtttgatgtagaaagaagatataactcaaccgttttcggtccgtactcgctggaaatgtagttgtggtttgatgtagaaagaagatataactcaacaaattgaaatctggggaggggggtgcgcggttgtggtttgatgtagaaagaagatataactcaacaacttgccaaagcggaacatgcttgttatcgttgtggtttgatgtagaaagaagatataactcaacactacgcgcaaatggcatcatcgggctactgttgtggtttgatgtagaaagaagatataactcaacgtctacgccgacggctcgtggagcgacaaggttgtggtttgatgtagaaagaagatataactcaacaagcttaccgagttcatgctgttcttcctgttgtggtttgatgtagaaagaagatataactcaacaaaggctcaacagaaagcacagcgcgagcagttgtggtttgatgtagaaagaagatataactcaacaaactcattaaaatcaaggatatggaagtagttgtggtttgatgtagaaagaagatataactcaacgcgagattttgtcagtgtccggggctatcagttgtggtttgatgtagaaagaagatataactcaacggactggacaaacagggtgatagcacaggggtgtggtttgatgtagaaagaaggtataactcaacttgaggagggcggcctatgaagaggctagagttgtggtttgatgtagaaagaagatgctctttttctctgcgcattgtaaaaaaactggcggaatatttgggtggttggcttttttttgcgaattttgccctgttaacacgctgtttgtggtgaaaggcacagacggcatcactttttgttgcgccggcaaccacgctggcggcataaggcgcaacagatgtgacaatcataagtttaaacccataaacaaccaccatgctcgaaatagaaaacttgacgttcgcttataaaaagtcgggaaaagtaatcttccaagacttctccgccactttttcacctggccatatctacggattgttgggtcccaacggagcaggaaaaacaacattgctctacctcatgtcggggttgttgaaggccgatggggggcaagtggcgttcaacgagattgatgttcgcaagcgaaggcccagcaccactgccgacattttcatcgttcccgatgaatatgagttgccccgcgtgtcgttgtccgaatatattaaggtgaacagcgtgttttatccgcgtttctcccacgatgacttgcgccgctatctcaacgtgtttggcatgtccgaaaacacacatttgggcagcctttcattgggacaaggcaagaaggtgttcatgagtttcgccatggcaacgcatacgcgcgtgctattgatggacgaacccaccaacggactggacattcctggcaaggcacaattcaggaaattcctcacagaggggcgcactcccgatagcattttcgtggtttccacccatcaggtgaaagacatcgagcaggttttggaccacatcgtgatgttcgacaacagcaagatattggccaatgccgacatcaagaccatctttcccaacgggcaagtggacctcgagagctttttcaacgaacgcattaaccaaaaaacggaaaggtagacatgaacaatacaacggataatttcagtgcggcacgcttcggtgcttactttacgaagctgatagttgagcgatggcgcaccaatgccctgcgcatgggtatcttgtttggctgcatggtgataatagagatgtggatggcttcagctacatacgactcctattcatgggactatgattctgttgcgggaatggttactcccgttttcgccgccatgtttttgctttcgggctgtttcttcgcctcggaaatgctctctggcgcgcgcagaaaggcagagcgaataggggcattaacctttcctgttacgccgtttgagaactggcttgcacgctggacaatctgcataccgctgtttctggtgtgcttcttggcgtgcatgtatgctgccgatgcgcttcgtgtggttaccttttcagcgcagtttccaaatgccaatatcaggtttatatccgtcttgccgcaaggttcattcgaaggaatagtgcttggaaaggcttggctttgctatttttggttaacggcagcctatgctttgggcagcgttctctcgccaaaacgctccatacttaaaacatcggtgacgctgttcatcctcttttggattatcgcttttattgtttttggcttgaccgttataggcgatacgacgttcggcagaatgtccgatttggtgcttgagggctatgggtggctttctgtgcctttcctttggtggctgtcttattacagtttcaaggaaatggatgtggtagacgacttttcgttctcgggttcaggtggcctggttatgggttataccgtcttttccttgttggtaataggtttcagtttcatgctgccagactcaatagaacatgtcgaacaggcggaagacatcggcgaaaaccccatatatatggaccgaacaaccgagcaacgcatcaccccggtgaaagtaattgtgttcactgaaggtaatgaagaggtgttaaccgacgttggcgagctttcgttctccatacaagtgaactatgttgacgatgcttccaaatgcaccgttatctacccggagcaaatacttcaggtacaccaacgtggagataccctttattatacgttcaaacacgacctatacaagcaagatgaatacaacctaaaccttgtgtatggccccgatggaatgacaagtatcgggcaagcaaccgatgcaggacagataacttaccaaataaaaggggcggacggaaaggtgcgtaaagccattgacaagcacttttctgacaggaatgcagtgcgtttagtggtgaacacgctgcctggaacgcttgttgtaagtaatgaaaaatacatgtcagtgtatgtcggcgcgggaaaaaccaccagtctagccgttgatggaccaggcggcgtggagctaaactcgagctcgcagatacacaagttgtcgctaaggggcgtaaattcacttgagttgaagggcgcaaaggtaaacagcctggaggcttaccttatggggcaagaaggtgaactctcggaaggagatttacattttgaagataacgattcggggattattaatcacatggtggtaaacggcaatggaaagatttatggtttgtctaaatatttatgcaaacgcattgaactgttgcccgacaagaagggacagataggtattcaactaaatgcagtaaaagacaaaatggtgatagagtagggcttaaagcgcctgcatccgtctgggataaccatgccagatggatgcaacctgttgatttaggttttgaacttataagttaactgctgatgaacgatgatgtgaacggcggcaaagcccgaatttgttttgaggttttaaggccgtgggtccacgagttgttacgagtaacgccttgttaactcgtaaacttgttatagtcaaaaggaattggttttggaatacacttacacatcttgatgcttcattagactcacgcagaggcgcagaggacacggagattagccccatcacagctt

SEQ ID NO: 1673 - DNA, 11017 bp, synthetic construct
  source 1..11017: mol_type = other DNA
  misc_feature 1..11017: note = Synthetic
cttcctgtgcgtagtgatttgttgccagtaagtcgtgataccatgaggctgacggagagtatcaggaaaaatgctgccgctccttgtgtcattcccaattcttctttggcatagatggcaaggtatgttgacaatactccgtatgaaaacgataacatagccagcatcaagcccacagaccagcccttcatgaggaagaatctgtcgagtgagaaaggacttttcttaggtggcacaaggcctgccgctatctttgacgggggagtatgctttactgtcttgctaatcaggaatcctgctgcagccatcagaaatgatagcaggaagatagcctggaaattcccccacacctcatatatatatataccgacggtgggcgatatggcggtggcaagattgtttgaaagtccgtagtatcctattccctctgcacgtctttctgccggcagtacgtcgatggctactgtgctgttggatactgtcactgtgccgaaaggtgctccgtgaagggtgcgtattatggcaaagagaatcagcgaaccgccaatgagatatcccaggaagaaggtggcaaagagtccgtaagacaacagtaatactgtttttcggttgtaagtatcaacgatatatcccgaaaacatacgtgccagaagggccatgatggtatatcctgacaatactactccgatggtgtgttttccagagccgaattcttcagagagataaaggggtagaatcggcataatcagcatgaacgaaaagaatatcatgaaatttgctgaccatacctttatataattatgattccatagcgtggacactactcaatgatgaaatttatctcttctttttctatgtcgatgcggagtggggaattgcctacctgcgtaggatgtccgtcaacggaaacggggagagtcttgttaccttctatctcgacctttgtggtgcgatacagtcttatgcgtttatggttcagcatctctcctttcaggaacagatatatgccattgatgagctgtgtcagtcctgaacggcgtactatcgtcacgtcaagcatgccattgtatggcacggcacttggtgtctgatgatatccccatgcactgccaatgcacatcgtcatgacacgatgattttctgtcatgccgttgatggtatatttcatttcgtatgccatacgttggaaaagcatcaaaatcagcgaaacggtaaaagaaagctttcttgagaacaatgcctttcgggtattctgcctgagggtatgaatgcgtgctaagagtcctacgtttacgcagttcagaaagtattgctgctgttcctgattctctctgtccctatatctcaggcatcctacatcaacagtgcgtatgcgatgattccgaatggcttttactgcctgctcgatattctttcgtgagaaaccccagaaggcagcaaagtcgttgatggcaccattagggattacgccaagactgattctttcgcgtacctgcttctctactttcatgaggcatttgacagcatcgttcaaggcactgtcgccaccaatgattacgatgtcttcataaccattatttatcatcatagtcaccagtcgcgatacactctgctgcttttcgctctgcacgatgtcatactctacttcatattcctgaagcagagactcaatcctctcgcgccgctttgcagcatcctcgtaaggactatgaaatgggcaatatattataccagtcttcaattcaattgttaattattaattgttaattgacaatcatatggtctccagtctattgtaaacccgcgccgttccattcctctgaaccatgtcatctgtctttttgcaaactgatgtatagctatttccagcaggtgaaccatttcgtcgtaggaatactcacccagaatgtatttagtcaaatatttatactccagtccgtatgctatgagccgttctgcaggaacgccttcgtcaagcagacctctcacctcgtcaaccattccctcttccagtcgggcatacagtcgttgcgtgatacgttctcttctcagttcgcgtggaatactgatgcctatcagggtgtatccgttaaactcattactccctaagtaacccttcagcactccttctatatatagtcctgtgccaccacataggataggttgcttgccacgtgctatgatgtcctcgtaagccttgtgaaaatcctgcaggtagcgatacaggttatagcgttctcctggttctgcgatgtctatgaggtgataaggaattttctttccatccacctcataatccttcaggtcctttcccgttccgatgtccatgcgtcgatacacctgtctggagtcagcagaaagtatctcgccaccgatttgtgctgccagctttgtagcaatgcgtgtcttgccacaggcagtaggacctgttatgacaatcaggttattgatagagataacgtttgatacttctctttggagtcttctcgaattcctcgtcgtgaatctctatctgtgccaccttgcagtatgcaggctgtgattcgttgagggtctggagattctggttcatcacgttgatgacgtcctcactcgacatattcttggcagcacatgtctcgatatcaggatgtacgagagccactagtttctggtcacgctgcaccacgatactctcatttacgagaggcagtgagttcagagcatcctcaatctcctcagggaagatattctgtcctgatgggcccagcagcatgttctttgagcgacccttgatgaagatgttgcccttgcggtccataatgccgaggtcaccagtatgataccatccgtccttgtcgatagcagcagcagtagcctcttcgttcttgtaatatcccaacatcacgttcataccacgagccaatatctcgcctggcttgcgatgagggtgcttgctgtcaatctttacctccatgtgtactacctgtctgccacaagaaccagccttgtgcgttgtccagtcagcatacgagatgataggagcacattctgtagcgccataaccaacggtgatagggaattttatccatttcataaagtgctccacctcctgattcagggcagcaccaccgacaataatctcgtagaggttaccaccaaaggcgtcataaacctgattcttgattttttcctttatcttacctcccaagataggagcgctcatcaatgcgcgaatgacaggcgaaacctttgggaatacctttttgcgtataatcttctcgatgatgagaggaacagcaatgatgatgacaggtttgatgtccttgaaagcctgtgctacgacagctggtgaaggaatacgtgtgaggtagaagatgtgacatccgctcatgaattcctttacaaattcaaacgccattccgtacatgtgtgccataggcaatatggaaatggtgttgtcgccagggtgcaggtgagcatccagtacctcacatgcaaagtcgaggttcgaccacatagcgcggtaaggaatcattacaccctttgagaaaccagttgttccggaggtgtagttgatgagagccagctcctcaggactctgctccttatagtagtttacgtcatccttacggaaatactttgggaatttctcaccatacagtctgttgagattctcgcgggcatagtagagcttttcggaacgagacaccatcagcgagaagtcagggatgtttatgataccctccagggcaggcatcttgtcaggtgttatctctcctgctacgacgtcgcctacgaagagcaggcgagcctcagagtggtttacgatgtggtgaatctggtcagccgtaaactcatgcagtataggtactgctacggcaccgtatgtcagagtagcgaggaaggcaacagcccaatggctcatgttgcgtccgcagagggctatcttgtcaccacgctgaacaccgctgttctcaaacaggatatgtagcttctcaatttttcttgccacatcatgatactgcagagtggcacccttgtaatcagtcagtgcgtccagttcccagtttttcttgatactgtcttcaatacactgattaaagctttttatttcttccatttggtagattttattgctcaaatttataaattctgtgcaaaggtatatttttttttgcacactagcaaataaaaatgtgcattttttacctaaatgacaaaaataatttgtttggtgagaaaagtgggccccttttacttgctctacgaaacgccgtttcgttgcctttgaaacgccgtatcgtggtccttgaaacgccgtatcgctagaggtcgtacgccgtttcgattttcttgataaaaagtgacaattaagtgagtacaattcgttgaacggtaaatatataaaaaattaaattatatagtccccctatatagagggggctatatttaattttattgtttataccgttacttttttctgtaaaatagaatcagttgtcttattggataagacactttgacctttgggacttcggcaaattccgagtctgtccgtaccctacataaaaaatttttcgctccatacggaaaataagcgttacaaagaacttctttttgtctccagaccatagtgtgataaaagaaaatgccctccgaagagggcatataggatgaaatccttcggcatatagccttattgtgataagatgtagaaaatcttacgactgcaaaattaagtattttgttttaaagtgacaaatttttttgccgaaaatttgcaataaggtttatttttttgtaattttgacctcgaaatctctaaaacttaaattatgacaaaaagaatattaggcattgatacaggaacaaatagccttggttgggctgttgtggataaggatatagacggaacttattccttaatccgtaagggtagccttatcttccaagaaggtgttaaggttgagaaaggtatagagtcatcaaaggctgctgacaggacgtcccatcgtgcgctcagaaagcaatattttcgtaggaggctcagaaaaatagaagttctcaaggtgcttgtggaatttggctggtgtccttatttatctcccgaggcgctccaccagtggcatgtaaagaagacgtatccaatggatgaagcattcatatcttggcaacgaactaatgataattttgaagaaaatccatattattatcggcacttatgcttgcataatcagttagacttaactgaagagtcagacagatatatgcttggaagagctatgtaccatcttgctcagcgaagaggttttcttagcaatcgtctggagcaaggtaatgatgatgaaacgggtaaagttaaggaagccatatcttcattatctaaaagtatgactgaagctggatgtgaatatctgggtgattacttctataggatatacaaagagaagggaaacacagaaagaatacgaacccactatactgatcgtgaggagcattataagaaggagttttatgcaatatgcaagcgacagaacctttctggtagtcagatatcaattttagaaaaagcattatatttccaacgtccattgaagagtcagcgacagggggtaggcaaatgtacttttgaacccagtaaacctcgtgtggcagattctcaccccgctttcgagatgttcaggatgctctcctttgtaaacaacatcaagataaaaggaccttacgatgtagaactccgtcctctgtcagcagaagaatatgaaaaggcaaagcctatgttcttcaggaagagcaaaccccagtttgattttgaagatatagcaaaagccattgctggcaagggcaagtatcagtacatcaaagatgtgggcgataaggagtataagtttaactatcgaatgacacagagtgttacaggttgccctactattgcaaatctgatgtctgtgtttggtgatgactacgttagtgctatcgctgaaaggtatgttctgtcggacggcaagaaaccagaacagatggttaatgatgtgtggaacgtgctatatagttttgcagataaagataatgtaaagcaatggggaaaagataaacttcaactgaacgatgaagaagccgagaagttttcaaagattaagctcacccatagctttgcatcacttagtttggctgcagtcaataaaatcctcccttggttagaaagaggccttatctattctcgtgctgtattaatggctaaggtaccagatatcgttgggaaagatgtatgggaaaatcgtggtgaggatataacaaaagagctactgaatcttatagaaaacttcaatccgaaggatgtttcaatgcagggaacgttggattactgcatcaaggatgttttaaaggatatgtgcgaattgcaatcaggtgtgactgagaaactatatcatccttcaatgatagagacatatcctgatgcgaagaagaatgcaaatggcatatatcaattaggttcaccacgtactaatgctgttcgtaatcctatggctatgcgttcacttcatcaactgagaaaggtaataaacactttgctgcaagaaggcactattgataatcaaacaaaggtccatatagaatatgcgcgtgagttgaatgatgcgaacaagcgtaaggctattgcacaatggaataaagatagagagtcacttcgaaaaaagtattatgaagacattcgtaaattatataaggaggaatgcggaaaggatattgagccaacagcagatgatgtggtaaaattccaattgtgggaagagcaaaaacatatctgcctatatacaggggattctataggaatagcagatttcgtaggagcaaatccaagttatgacatagagcatactgtacctcgtagtgtcggaggtgacagcactatggaaaacatgactctatgctctagcaaatttaatagagaaattaagaaggcaaaattaccgactcaattgtctaatcatgatgagataatgggacggcttgaagaatggcgagagaggatagaagaattacgtaagggcgtagatcgtgtgaagacatcttcgagtatggacaagactgttaaagaccgcttgatacaaaagcgccatctgctaaaattggaacttgactattggcttgggaaatataagcgtttccagatggaagaagttccagaaggcttcgctcgcaggcaaggagcaggtatcgggcttgtgggaaaatatgccggactttatctgaaatctctgttccataaggcagatgacagaacaaagagtaatgtgcgtgtcgtaaaaggcactactaccgctgaatacagaaagatgtggggcatacaggatgaatatgaaaagaagtctcgcgataatcatgttcatcattgtatagatgccatcactattgcctgcatagagcctggagagtataatgctaccgcaagatattaccagcaattagaggagtatgaaagaacgaacgcaatcaagccttcgttccccaaaccttggtcaacctttacagaggatattaaggctattgcgcaagaaatgctggttgttcataatactccagacaatatgccgaagcgagcccgcaaatatgtacagacatctaacggtaatggcaagaaacttgctatgggtgattctgcacgaggttcgttgcataatgatacctattacggagccatcgagcgtgatggagagataagatatgttgttcgcaaagaactgcatagcatcaaagaaactgatgttgaatatatcgtagatgatgtcgttaaggagaaggtaaagcaagctatcatggaaaagggttttaagagggcaatggaggaagatatctttatgaatgaagaaaaaggaataaagataaagaaggtgagatgctacactccgtccgtaacaaatcctttgcacattcgcacacatagagacctatcaagaaaggattataaacgtcagttccatgtcactttggatggaaattactgtatggctatttatgagggagaagtgaaaggaaagatgaaacgtacttatgaaatagtcaatatgattgatgctgcagcatacttcaaggaaagtgcaggtcttacaaatctgtatccaattgctccagaagaaaaaaatggaatgaagtttagatgtgtagtacgtactggtacgcagataattctcttgcaatctgacgatgaagaaatagaactggtaaataaaaaagagttatcaagacgtttctattatgttgctgttatgcagaaagatggcagaatagttcttcgctataatcaagatgcacgagaggctacgatattgaagaaagaacgcaaatcgggtgcatacaaagtaggtgagcaatatcgttctgagataatgctctccttatctgacttccatgctttggttgagggtgttgatttcaaaatcaatgttcttggtgagataacactgttaaagtaagattgttatgttaaaacgtacacttgtgttttcaagcccaatgaatctctcattgaagaattgtcaactggtgttgtcttataaagatatgccagatgaaaagcagactattccaattgaggatattggggttgttattctggaacatcagcaaacaagtatctcattacctttattaaatgagttgaccgaaaatgatgttcaggttgtcatctgtaacaacaaaggtatgccaagtgctatgcttcaagggatgaacaacaataatcttcagggagaggtgttaagaaatcagatagcgtgtggtgaagtacttaaaaagcagttgtggaagcaggtggttgagaagaagatacaaaatcaggccgctctgttagacaaaattggagaagatggcggagtgctaaagcctttctattctaatgtaaaaagtggtgatactgataatcgggagggcatagctgcacgcatttattttcaacatctgtttggtgacaattttgttcgtaatagggatgagtcaggagtaaatgctttactaaattatggatattcaattttgagagctgcaacatgcagggcaattgtttcgtcaggattgttgccggcaataggaatttttcatcacaatagaagtaatgctttcccccttgcagatgatttgatggagccttacagaccatttgtggatggtgtagtgtatgatttggccatgcatgggaatatggacttaacaaaagagacaaaaagtgatttgattagtgtattatatgcagacactactttcaaaacaacaaaacgtccccttagtgttgggctatcaatgacttcagccagtatggtgaagtgtctttcaaaagaacaaggtaaactgagtcttcctattttgcaatgaagtttgaacggctgaatgcgtatcatattatgtggttatttgtaatgttcgatttgcctgtaatgacaaaaaaggagcgtaaagatgccgcgttatttcgaaaaaacctggaaaaagatggtttcacaatgcatcaatttagtgtatacataaggtactgcggttctttggaaagtgcccaagtacatattaaaagagttaaaagctttacgccagacaaaggtcatgtaagcgttctttcaattactgataaacagtattccaatattgtacatatatggggagctattgagaaaaaatcaaagccgacaccattgcaattggaatttttttagtatctttgcagaagaaatagatctcattagaccacttcgtgtatggtgttattaggcgtaaataactaatattcaagagaataataagtatacgttgtggtttgatgtagaaaagagatataagacaacagaggacgcttggtgtgtcctgtataacaagttgtggtttgatgtagaaaagagatataagacaacaaaatccttaccaaaagcacgttttgaaggttgtggtttgatgtagaaaagagatataagacaacgatgcaccaacactaggaagatgctgcaagttgtggtttgatgtagaaaagagatataagacaacgatttggtttttttgcaggtgttgttggagttgtggtttgatgtagaaaagagatataagacaacccaagggagttctgtaccagcgtttgtacagttgtggtttgatgtagaaaagagatataagacaacctgagccagaagttaatagatgagtacacagttgtggtttgatgtagaaaagagatataagacaacgaacagaccgcgtaagtttggtcgcctcatgttgtggtttgatgtagaaaagagatataagacaaccgcctatgtttacatagccctcagtcataggttgtggtttgatgtagaaaagagatataagacaaccaaacggcaaaagggtaaagtgctgacctggttgtggtttgatgtagaaaagagatataagacaacatcaatgcaagaatttggtattagcagtaagttgtggtttgatgtagaaaagagatataagacaacaaagccatccttgacagtcacaatatcaagttgtggtttgatgtagaaaagagatataagacaaccgctcgctccgtcggaaacctccgtcgctagttgtggtttgatgtagaaaagagatataagacaacaaagagcaaaggaaacagcagctcaaagagttgtggtttgatgtagaaaagagatataagacaacggtactataaaccaactctgaatgtgcaagttgtggtttgatgtagaaaagagatataagacaacgtatggtgcttgggcacgtgcaggcaaaatgttgtggtttgatgtagaaaagagatataagacaacgtctatgcctgttgcaattccatagggacagatactgtcttaaaagaggtaagaatgtatgaagtaagatgtatgaagtaagatgtcggaaggcaagatttcttactctaaaaactctaatagaactctaattaaactctaattaaactctaattaaactcataaagaactcataaagaagtcataaagaagtctaatagaactctaaaagaaacata

SEQ ID NO: 1674 - DNA, 6550 bp, synthetic construct
  source 1..6550: mol_type = other DNA
  misc_feature 1..6550: note = Synthetic
tacacattgttcgacgatcgccgtacgcgttgctgacggccgacgaacaacgaccactatgttgaaatggtattaatatatggctataaaaaacataacaatatggtggaattgaaggggcattaaataaataaagggatgtgacagagcttaactccaacacacccccaacaggtctttcgaccttcggcatatagccttattgcggtaagatgtagatttcttacgttgcaaatatatataaattattttgatgacaaaaatatttttattatttttacgcaaaaattacaacttaatgatgaaaaaacgtattttaggacttgatactggcaccaacagcttaggttgggcagtagttgactgtgatgagtatagtaattatgaactcgtaaaatatggcgacctgatatttcaggaaggcgttaaaattgagaagggaatagagtcgtcaaaggcttcagaacgaacggggcatcgctctttacggaagcagtatttcaggcgcaggttgcgtaaaatcgaagttctgaaggttctggttaagcatggattatgtccttatctgagcgaagaacagctgcataactggcatgtacgaaaggtttatcccaaaacagacgacttcatgctatggcagcgtacaaacgataatgaagataagaatccctattactatcgccatttaagtctgcatactaaatttaaccttgaccgtcaggacgaaaggttcatgcttggacgggcactttatcacctggcacagcgcagaggttttcttagtaaccgccttgacagtactcctgaaaacgataatggcaaggtagatacaggcatttccaaactttctcataaaatggagttggctggttgtgagtatcttggcgactacttttatcaaatttattcagacccggacaaccatgagcgtatccgtacacgctataccgatcgtgagaaacactataaaaaggaattccaggccatttgtgagatgcaacaattatcgcctgagatggttagggatttggagaaagcactttactttcagcgtccgttgaagtcgcaacgacaaggagttggcaagtgcacttttgaaccgagatgtccccgttgtgccgattcgcatcccgattttgaggagtttcgtatgctttgtctgctgaacagcattaagattcaaacgccatacgacctcgaattaagatctctgaatgaggaagaaaaggaaaagatagtttctttattctatcgtacaagtaagcccaattttgactttgaagacattgcaaaggcgctggcaggaaaagggaaatataagtattataaggacgaaggggacaaaccgtataagtttaactaccgtatgacacagggtgtagcggcttgtgcaacaacgggtaaactacgaaaaatatttggtgaaaactggaaggaggctattgcagagacttacaggcttaacaatacacgtaaaggccaaaagacggtggcgcaaatggtagacgatgtatggaatgttctgtctacctttgagtcggaagacaaactgaaacactgggcacaactgaatcttcaactcgatgaagaccagagcaaaaggttcgcagccataaatctttcgcacggtttcgcctcgcttagccttaaggctatacacaagattctacctttcctccgtcagggctatatctattcgcatgccgtgatgctggccaatataccagcgatagtgggcgaggaggtatggaatgatgctgacaaacggagctttatattaaatcatgtacttacctatctccaatctgaagaccagactaccaaagatttctgtattaaagacttcttgttaaataactacaatctgaagccgggagcagtcgataagctttatcatccgtcgatgatagaaacctatcaagacgcaaaacaacaaggagacgtttaccaacttggttcaccgcgaaccaatgccatacgtaatccgatggccatgaggtcgcttcatgaagtaagaaaggttgtaaaccagttgttgaaagagaagataatcgaccagaatacagaggtacatgtagaatatgcccgtggtttgaacgatgcaaacatgcgtaaggccattgccgattaccagcgggcacaggataagaagcataagacggatgctgattccattaaggacctgtacttccgtgagacgggaaacaacattgaacctaccgaaacggacattaaaaaatttgagctttgggaggagcagagccacaaatgtttgtatactggtgccgaaatcggtatagctgacttcttgggagacaatccgaaatacgacatagagcatactattccgcgaagttcaggtggtgacagtacgatggaaaatcttacactttgtgacagcaattttaaccgaaatgtgaagaaaactcagctgcctgcacagttggctaaccatgaagaaattcttacgaggattgaaggctggaagaaacgttatgaaacgcttaccagtcaaatggataagtgtcgtacattttctggcatggcaaaggatattaaggattccgttattcaaaaaaggcataaacttaaaatggagcgcgactattggaaaggaaaatatgaacgctttacgatgactgaagtgcctgatggattcagtcgtcgtcagggagctggtattgggttagtgtcgaagtatgcagggctttatctgaagtcgttattccacgatccgcatgaccgtagcaagtcgagggtgtttacagtcaagggaactactacggcagaatttcgtagaatgtgggggttacaaaatgaatatgaaaagaagtcgcgcgacaaccattgccatcactgtatagatgccatcaccattgcatgtataggaaagcagcaatatgaggcggtggccaaattttatcgtgacgaagcactttacgatgacggcagagggaagaagcctcagttcaggaagccatggcctacatttactgaagatgttctcagtttggagagaaccttgttagttgtgcatgaaacgcctgacaatatgcccaagaaagcccgtaagtatgtgaaaacaaatagaggcgagttcctggcaaagggcgactgtgcacgtggtagtttgcacaacgatacctattacggtgctattgaacgcgatggtaaaataaggtatgttgtaaggaaacctctttcctcttttgaaaaagaatcggatattgataatattgttgatgatacagtaaaggagattgtccgggaggctgtacgcggaaagaactttaaggaagccatatcccaacccgtttatatgaataaggagaagggaatacttataaaaaaggtgaggtgttatgcacccaaagttttaaaaatattttctgttaaatcttgtagggatagctcttcccatcagtataaggaccatatttacgttgctaatgatagaaattatgcgatggcaatatatgaaaaaggggcagataagaaaataagatttgaaatagtaaagaatattgaagctgcaaacttttataagaaaagcatggatagagaagagtatccatatcttgtaccacaaacaaagaatggtgcaaagattaaatactatcttaaacgtggaatggcagttctattatatcagaatgatgcagaagagattgattttaataacatgaaagatatcattaagcgtctttattatataacaggtcttagtttgagcgaatcatatggaatggtaactctgacgcatgcacaagaagcaagagataagttagaaccaaagaaaggtgcatttaaaatgggtgagatttaccgtcctaaaataaacttaaggcagactcaattccaaggtctcatagaaggagttgattttaatataaatattctgggtgaattaaaaccaataaaaagataaaaccaaagttatgttaaagcggagccttgtcttttcatccccagcaagcctgtcattaaaagacaggcagctggttgtagttttgaaagaaactcccgatgaaaaacttactgttcccattgaggatattggcattgttatgattgataatcagatggtttcgataacaattccgttgttaaactatcttgctgacaataacgttatggttattatctgtaattctaaaggtatgccttcttctacattgctaagttttgatactaaccattatcagggagagatattgcaaactcaaatggaaatatcggaaccattaaagaaaggactttggaaacagattgttgaatcgaagattaaaaaccaggcgatgctgcttaataagctgggtaaaaatggagacaggcttaaaccttattataataatgtaaaatcgggtgatatagataatcgggaaggcattgctgccagaatatatttccaggaacttttcggagtaaaattcgttagagatcgcagtcaggacggaatcaatgcccttttaaattatggatataccatactgagagctgctacggcgcgcgctgtatcaggatcaggtcttttcattggtatggggcttcatcaccataacagaagtaatgcctttccattggccgacgatataatggaatcttatcgttcatatgttgatgaggctgtgtatcaattagtattaaatggctgtctggagcttacgaaaaatgttaaggctaagctaatcagtgtgttatatacagacgtgtttttcaagaaaacatcgaggccgttgggaataggtcttacttttacagcgtcttctttggtgcggtgtttaaagaaagatgataagatactttcattaccattgctacaatgagtttcaatcgtttaaacgcctatcatattatgtggctctttgtgatgttcgacctgcctacgcaaacgaagaaggataagcacctttctgctctctttcgaaagaatttagagaaggacggatttgtaatgttccaattcagtatttacgcaaggttctgtggatcacttgagagtgcaaaggttcatattaaaagagtgaaagcacttgttccagaaaaaggtatggtaagcatcctgcaagtaacagacaaacaatattcaaatatcatcaatatttggggtaaaatagaggaaaaaaggcgccaaagtcctatacaattggagtttttttaatatatttgcaacataaaagctacttcattttgcttctattacatccgtttatttgtttatcctattgatatacagtaatatatgatgtatacgttgcggtttgatgtagaaactttaattattgcaacctgcattattatctgttaacttattcttgagttgcggtttgatgtagaaactttaattattgcaactacacccactaaacgttcctaccatcgaaggttgcggtttgatgtagaaactttaattattgcaacataacgtacattttattatggtcaatagcggttgcggtttgatgtagaaactttaattattgcaacgcgactggccgaacgtcgccaacgccgagcgttgcggtttgatgtagaaactttaattattgcaacttgtattgttccagagaatttcttcgtatagttgcggtttgatgtagaaactttaattattgcaactcaacatttaacggcttatcggtatggaccgttgcggtttgatgtagaaactttaattattgcaaccgctgtaatcattgtggacatgagtcagcgttgcggtttgatgtagaaactttaattattgcaacctaaacttgtattctcctttcttatcaatgttgcggtttgatgtagaaactttaattattgcaactgattacagacatatcaacaaacgttggtagttgcggtttgatgtagaaactttaattattgcaaccgcttcaccttttccatagagcgcgtatcggttgcggtttgatgtagaaactttaattattgcaactgacacggtggaactcagctacgacaagcggttgcggtttgatgtagaaactttaattattgcaactatgtcaacaagaagcattgataaaaagaggttgcggtttgatgtagaaactttaattattgcaacccgagaatatcatttaatacttacaatatcgttgcggtttgatgtagaaactttaattattgcaaccaatctcttgcaaacgcttctcgtttactggttgcggtttgatgtagaaactttaattattgcaacattctccccatactcacctctggatagaaggttgcggtttgatgtagaaactttaattattgcaacggaacaacaactgggattacaccgagtgtagttgcggtttgatgtagaaactttaattattgcaactgtgagctgtcttattttgtatgtggtcttggttgcggtttgatgtagaaactttaattattgcaacttgatgatggtgaagatatgtaccagattggttgcggtttgatgtagaaactttaattattgcaacgagagagcgaaagaagctgggctaactaaggttgcggtttgatgtagaaactttaattattgcaaccgtatacg

SEQ ID NO: 1675 - DNA, 6490 bp, synthetic construct
  source 1..6490: mol_type = other DNA
  misc_feature 1..6490: note = Synthetic
gcagttaagcccgcccgcgccgatggtactgcgtataagcgggagagtaggtcgctgccactttttttatcgagtcagtgtcctgtacgacagagaagtcgtgcgggacactgctttttcgtgcgagatacagcaacgggagtttgtggcgagagcgggtcatttagtagacattcgtgaacggctatgtccggcggatggggaggtcggagaccgtgtggagctgctgatgaggtgactctgtgggccttttgtatctaagttgaaagacagtatagaacattaaatatatatggaatatgatgtttctgtattgaaaaacttcattgcaaatactatcaaataaattaaaagctatgatatttcttgaagaattttatcttttatcagatgaccaggagtggaatttctttcgcaacaggtctaaaggttgttatgactcattttatccatatcaactattcccgcagaaacaactaagggatatcgctttctctgacataactatcttctgtggtagcaatggttcaggaaagagcactgtattgaatatcattggtgagaaactggaactgaaacgtaatacgccttataataaaacagatttctttgatccatatctgtctggatgcagtagttcctttcgtgatgaagacccgttgaagatgtgtgagctaatgaaagtgtcacgtttcatttcaagcgatgacgtgttcaaccatatcatcggggtacgagaaagaaacgcaaacctcagtttcaaacgagaaatgacatcccgtgatatcgcacaaataaaaaaggacggatggaaaaatggtccaagaggcttcaatgccgaagatcctgaaaatatgaaatcatttctagactattgtcagaaactaagaggttcttccgtaaactatatacgttccaatgtcggagttgatgagagaacatactcaaacggtgagaatggctttaaatatttcacggatgctatacagcctggaggcctatatctgcttgatgaacctgaaaactcgttgtcggctgagatgcaactggaattggttcagtttatcttgggtatggctcgcttctacgattgtcagttcattatgtcgactcatagcccatttattctttcgatacccttcgcaaaaatatacaatatggacgatgtccccgtttctgtatgtaaatggacggaactcccaaacgttaaagtatattacgaattcttcagggaccatcaagctgaatttgaatgaattgggcttcgtggaatagctgcagcaagcttataaaaagtttgcgcagaaatctattgtccaaaatatgggagcttttgactctatatgttggtagaattgttgagttgtaacgaagtatttcctatctttacgaccaaaaatctaaaaatggcaactatgggaaaacgtatattgggtatcgatacgggtaccaatagcttaggatgggctgtggtagacagagaggctgaaggcggctattcattgattaaaaaaggttgtttgatctttcaagagggagtaaagattgaaaagggaaatgagtcctccagagcatctgagagaactgctcacagggcattgcgtaagagctattttcggcggaggttgcgaaagattgcgattttgaaagtcttgataaagtactcctggtgtccctatgttactcaagaggcattgcatctttggaatgtcaagaagcaatatccgatggtggaggcgtttctgtcctggcagcgtactgatgagaagttaggaaggaatccctatgtttatcgccatctgtgtcttcatcaggaattagatctttccaaggagtctgatcgttatatacttggacgggctttctatcatttggctcagcgccgtggctttaagagtaatcgtctggatcagagtgaggaggggaacaaggaaatggggaaggtgaagagtggcatttctgatctttcggcggagatggagcgtaatcattgcgtgtatttggccgattatttctatcagctttatcaggagaaaggttgtacggttcgtatccgtacgagatatgttgaccgcgaggagcactataagcgggagttctatgcgatttgcaagaagcaacatctgtcgggtgagcaagtgaaagaactggagagcgccttatacttccagcgcccgttgaagagccaacgccagggagtaggtaagtgttctttcgagaagacgaaagcgagatgtgccgattctcatcccgcttatgagcgtttccgtatgctctgttttttgaataacatcaaggtgcaggggccgtatgatgtagctttgcgtcctttgaatggaacggaacgagagaagatcaagcctctgttcttcagaaaaagcaagccacagttcgattttgaggatattgccaaggcaattgccggcagaaatatgtatcagcacataaaggaagagggcgaccggccgtacaaattcaattatcgtatgtcgcagacggtaagtggctgccctacgacagctgcgttcatctccttatttggcgagaattatgagcgttcgatagccgaacagtacctgcgtcatcaggggaaaagtgtctcgcaaatggtcaatgatgtgtggaatgtgctgtatagtttcccagacaagtcgtatgtcaggtgttgggctataaacaatcttcagctgactgaagcgcaggcagacaggtttgccaacatccggctatcccgtgcattcgcccacctcagtatcacggctatacgcaagatattgccgtggctggaaaaagagcttatttatccacacgctgtgttgatggccaaggtgccagatattgtaggcaaggatacttgggaacaatatggcggagctattgagaaggagttgctggaactgatggcccatttcaatcccaaggacatcgcgctgcaaggcacccttgagttctgcataaaggattatctgcaaaacaattttgagctcaggcccggagctgttgatcggctttaccatccttcgatgatagagacctatccggatgcccacaagaatgcggaaggcatatatcagttggggtctccccgcaccaatgcagtccgtaaccctatggcaatgcgttccttgcaccaactgcgcaaagtgatcaatatgttgttgcgggagaaggtaatcgattcagacacagaggtacacattgaatatgcccgtgaactgaatgatgccaacaagcgtaaggctattgctgaatggaacaagcgacgggagcaggcacgacgcaaatatgcagcggatatccggcagatgtataaggaggaatgcggacgggagattacaccgacgaatgacgacatcctcaggtttcagctgtggactgagcaagagcacaggtgtatctatacagggaaaaccattggcattaccgactttataggtggaaatccgcaatacgatatagagcataccgtgccgagaagcgtgggcggcgactccacgatggagaatatgacgctctgtgaatcgcggttcaaccgcttggtcaagcgagatatattgccggcccacttgcccaattacgaagagattcttgttcgtctggaagactggagaaagcacattgaggatcttcggaagcagatggaccggaaacgcacctatgccgatatgccgaaaagcgtgaaggattccgtcattcagaaacgtcatctgctgcgcatagagctcgactattggcaaaacaagtacagccgtttcctgatggaggcggtgcccgaaggcttcagcctgcgtcagggcgcgggcattggtctgattggaaagtatgccgggctctacctcaagtccctgtttcatcgtccgggagacacggcgagaagtaatgtgcgggttatcaaaggcgaaaccactgccgagtatcgcaagatgtggggcgtacagagtacgtacgagcgcaagtcccgcgacaaccatattcaccattgcatagatgccatcaccattgcctgcatacagcccaaagaatatgcgtccacggctcaatactatcggcagctggaggaatacgagcgttcggccgccgcaaggcctgctttccccaagccctggctcacttttacggaagacatcaaggagttggaggcagcgcttctggtggctcactccactcccgacccaatgcctaagagggctcgtaagcgggttataacaggcgtcgggcgggttacggccaagggtgattgtgcgcgtggttccctgcataaggatacctattatggtgccatcaagcggaatggagaggtgcagtatgtagtccgtcgtctgttgtcatcctttgagaagcctggggatgcagaaagcattgtggatgaagccgtcagggagaaagtgaaacaagccattgcagagaagggattgaaggaggcgttggccggcgacatctatatgaatagggagaaaggcattcttatcaagaaggtgagatgttatgccaagatggtcaaacgccctatcgacatccgccaacaccgggacgtatcccgcaaggagtacaagcgggccttccatgtgatgaatgatgacaattatctgatggccatctacgagggcacggtcaagggtaaaacgaagagagattatgagctggtcagaatgatagacgccgcccggttctacaaggagagcaccgatcgcctggactaccctacgcttgtaccgatacagagtaaaaaggggttccctttgaaacatcagctgaaggtggggcagatggtgctgctgtatgaaaacacgccggaggagatagattttgacgacagaatggatttatgcaaacgattgtataaggtatatgggctgtcatcacttcctggcagtacaacgtatggtataatcaagatgcgttatcaccaagaggcaagaaaagcagacgcaataaagcccaagaatggcgcttatcataatggggaggagcaccgaccggcaattataatgtatcacacacagttcaacgcccttgtcgagggagaggactttgcaatcagtgcgttgggagatatcacgaagctataggagaagcctatgttgaagcggacgttagtgtttgccagccctgtttccttgtcattgcggaataggcagatggtgatcacttaccgggatcagccggggagtgaccggacgataccgatagaggatatcggggtagtgctgatcgaacatcagcaagtgggcattacggttccactgctcaatgcattggtcggggagaatgtcgaagtggtgttgtgcgacgaccacggactgccctctgcaatgctccaaagcttccaggggaatcatctgcagggtgaagtgttgcgttcgcagttggagtgtggtgccgtcttgaagaagcaactttggaaacaagtgatagaagccaagataagaaaccaggctgccatattggaggcagtggggcaggacgcctccttgctgaagcctctctatatgaatgtcaagagtggtgaccaggacaatcgggagggcgcggcagcccgaatctattttcagcagttgtttggaaggagttttgtccgcgacaggtggcaaacgggcgtcaatgcctttttgaactatggatacagcattctgcgcgctgccactgcccgtgcgcttgtatcatccggcctgttgccggccattggcatattccatcatcatcgcagtaatgcctttcccttggcagatgatatgatggagccctatcggccgtatgtagacaaggtggtgtatcacctctccttacggggagtacgggacttgacacgctccgtgaaggctgagttgatacaggtgctatataccgatacccgtttcgacaaggtggtgcgcccgctgagtgtgggattgtcgatgacaactgccagtttggtgaagtgttttgccaaggaacagaaacaattgtccttgcccgttgcccaatgagttttatccgtctcaatgcctatcacgttatgtggctgattgtaatgttcgatttgccggtaaccacgaaaaagaaacaaaaggaagcggctttgttccgcaagaacttagagaaggatgggtttgtcatgcaccaattcagtgtatatatgcgctattgtgcctctttggaaagtgcgcaggcccatcagaagcgtgtacggtcgttcgtccccgagtttggtagggtgagcattttgacaatcacagaccgacaatacgctacgatgatcaatatctggggaagcattgaagaaaaaaggcgtccgacaccattgcaattggaatttttctgatatatttgtgcccagtatcatcgctatcagccacttcgtgtaggaaaatgaatccccattcctttgaataccagagtgatatatgatatacgttgtggtttgatgtagaaaagcgatatatgacaaccatcttcgttgtgttccgtgattaaatacagttgtggtttgatgtagaaaagcgatatatga

SEQ ID NO: 1676 - DNA, 5518 bp, synthetic construct
  source 1..5518: mol_type = other DNA
  misc_feature 1..5518: note = Synthetic
  variation 5289..5364: note = n is a, c, g, or t
aaacataatacgcgcaaaaagtctgagttttatttggagggtaaaataaaagtgcgtatatttgccgcgttcgcctaataatgcagcagaaaatggatcaaggttgatatcaagatatcattatcacatataaaaacaggatgcaccagattactctagcacacccttaataggttcatagaaccttcggcatatagccttattgtgataagatgtagaacttatacgctgcaaaaatatggataaaaactgagacaaccaaattttgagtggaaaaattcataaaataatcgcataatgacatgaaaaaacgaattataggtatagatacaggcacaaatagtttaggttgggcagttgttgataaacttgacaacggtcaatatgagcttgtgaagaaaggtagtcttatctttcaggaaggtgttaaaatagagaaaggaatcgaatcctcaaaagcctctgaaagaacaggtcaccgtgctctgcgtaagcagtacttccgtcgcagactccgtaagatagaagtgctcaaagtattaatcaaataccagctatgcccatatttgtcggatgagcagcttcatgaatggcatgtacataaaagatatcccatgtctgatgctttcatagaatggcagcgtactaatgaaaacgagcagaagaatccatattactaccgttatcgtgcactcacacaggtcttagatctgaatagtgcatcagataggtttgtcttaggtcgggctttgtatcatctttcccaacgcagaggctttatcagtaacagactcgatagtaacgagaataatgaagagaatggtaaggtgcagaaaggaatttcagatctatcgaaagaaattgcagaaagtggatgcacctatttaggagagtacttctacaaactataccaagagcttggcaataaggtgcgcctacgttctcgctatacagacagagaagagcattacatcaaagaatttgatgccatttgtgttcagcagcaacttggtgcagacttggtaaaggatcttgaaagggcattatatttccagcgtccgcttaaatctcagaagcagggtgttggtcattgtactttcgaacctttacgtcctcggtgtgctgaatcgcacccagcctatgaagagttcagaatgtggtcaacaattaacaatatcaaggttcagggacccactgatgaacatctgagacatcttcgcaaagaagaaattcagaagatattgccaaagttcttcagaaagtctaaaccagactttgacttcgaagatattgccaaggagctagcaggaaagaataattaccaatatatcaaagatgagagtaataaaccctacaagttcaactaccgaatgtcacaaagcatttcgggctgtccgacatgtgctgcattaagagagatctggggcgatgactttgcttcatccattgcagagacctatactaatatgcagactcgtaatggaaatatgaagactcctgaatatgcagttgatgatgtatggaatgcgcttctttttatggaaacaaaggagaaattagagcagttcggcatcaataaacttcagttgtctggtgagcaggctaagaaattttcaaatattaggctttctcatgcttactcttcgatcagcctttgcgccatccgtaagattctaccatatttaaagagaggcctcaagtatagtaacgccgtattcatggcgaatgttccaaccattgttggtaaagagatctggcaagatgaccatgattatatcgagcaaaatctctttgccatcataaagagctatgaacctggttgtggcataactttagaagatatgctcaaggacttccttagcaatagctatgacttggctccaggcgcaatcaacaagatgtatcatccatctatgatagatgtttatcctgatgctaagcagacgaacggcatctatcagcttggatctcctcgaacaaatgccattaagaatcctatggcgatgcgctctcttcatcagctccgtaaagtaatcaatacactactgaaagagcgtgtaatcaatcagaatacagaggtacacattgagtatgcccgtgaactgaatgatgcgaataagagagcggccattgcatcctggaataaagacagagagaagaaacgtaagacttattcagaggagattaagaagttatacaaggcagaaactcataaagacatagagccgacagaaaccgatatcctcaaatttgagctttgggaagaacagaagcatctgtgtctatacactggaaagactattggtatttctgatttccttggcccaaatcttaagttcgacattgaacacaccattccacgaagcgcaggtggagacagccagatggaaaatatgaccttgtgcgatatgacttataaccgtcaggtgaagatagggaaattgccatcacaactgtctaatcatgatgagattatgactcgtcttgttcaatggcagaaaaaagtctatgcattaaccaaggatattgatggtatacgcactcactctggcatggagaagggtgttaaagaccgtcttatccagaagcgtcataaactgaagctggaacgtgactattggagaggtaaggttcaaagatttgagatgactgaagtgccagaaggattcagtctgcgtcaaggtataggtattggactcatcagcaagtacgcgggtctctacttgaaatcattatttcataagcagaatgaccgatcacagacaacagtgcgtgtaattaagggactggcaacttctgagtttagaaagatgtggggcattcaggatgtctatgccaagaaatgcagagacaatcatattcatcactgtattgacgcgattgtgattgcatgtattgatccatattcatataatcgtttagctcattattatcaggcactcgataatgcaaagttcggtgtaggggacaaacctgttgttgtgaagccctggcctaccttctcggaagatatgaaggctctttatgattcagtgttggtatcgcatgatactccagacaatatgccgaagcatacaaagcgtagagaggtaaagactcctactggtgtttattctgcacaaggcgatactgctagagcttctttacacaatgatacatactatggagcaattgaaagagacggagaaatcaagtatgttgtccgcaagccactcagctctctcaaggaaaccgatgtagagaatattgttgatgacattgtaaggcagaaggtcaaggatgccattaaggtcaaaggcttcaaagaggcgatgtctggagatatattcatgaatgaagaggtggggattaagattaaaaaagtaagatgcttctgtcctgctgtagcaaacccattgaatattcgccagcatcgtgatatttcaagaaaggaatataagcagcaatatcacgttactacagattccaactactgtatggcaatctatgagggtgttgtcaaaggtaagttcaagcgatctttcgagattgtaacgatgttggacgctgcatcctattacaaaaagagtgcagatgtttcaaaatactatccgattacaccagaagagaagaatgggctaaagcttagatgcaagattactgctggcactcaaattattctgaaacaggctgaagaagaggagttggatatctcagatgttaatgaaattgccaatagactctactttgttgcaatcatgtccaaagatggacgtattgtgttgcgacatagccatgaggcaagagaagcatcattgctggtcaaagagcagtcatctacaccatataagattggggaagggtatagacctcaaattcgtatgagtctctccaactttcatgcattgattgaaggtgttgactttgtaatgaatccattgggtgagattaagttgatccatcatgattaagcggacattgtttttttcttctccagcaagtcttcgtttaaaagactgtcagatagtaatttccttgcatgattcttcagacagtgaaaggacaataccgattgaagatattggtatagtattgatagaaaatcctcaaacttctatctccattccattactcaatgcattgtcagaggcgaatgtggctgttatattttgtaatgacaaacatatgcctcaatcaatgctatataattttgaaactaataatacattgggagaatctttacggctacagatatctttgtctgaagccaaaagaaaaaggttatggaagcaaattgtcgagcataagattaggaatcaagcaagactattggataagttacatggcaatggattaatactaaaaccttattattcaaatgttttaagtggggattcggataatagagaaggaatagcagcgagaatatattggaaagctctttttggcgatgattatgtcagagatagaagcgaagaaggtattaattctcttctgaattatggttatgccatattaagagccgctacaacaagagcgattatggggtcaggactgatgccatctcttggtttattccatcataaccgtagcaatggatttccattggccgatgatttaatggagccatatcgcccttttgttgatgaggccgtatatgaattgtgtgaggagggaatgatagttctcaacaaaacagttaaatcaagaatgcttagtattctcacttgtgatacacatttcaagaatatggtaaggccattgcaaattagcttgtctacaagcacttcatcgtttggcaagtatcttagtggggaaagcacggagttatcattcccttggcttgaataataaatgagtaatgtacgtctcaatgcttaccatataatgtggttgatagtgatgtttgatctcccaacggaaacaaagaagcagaaaaaagattctgccatgtttcgaaaacaactggagaaagatggctttaatatgtatcagtatagtgtttacattagatactgcgcctcattagaagctgctgatcttcatattaagcgcgtaagagcctttgttccgaatgaaggaagtgttagtattttgacaattacagataaacaatactcaaatattatcaatatttttggtgcaattgaaaaaaaggtaaaaagacaacccttgcaattagaaattttttgatatatttgcgtagaaaaaagatatatcatactacttcttatggtaattattgatacttataaaattaatatataggtagttataatgacataggttgtggtttgatgtagaataacnnnnnnnnnnnnnnnnnnnnnnnnnnnnnnnnnnnnnnnnnnnnnnnnnnnnnnnnnnnnnnnnnnnnnnnnnnnngttgtggtttgatgtagaataaccaatggagacaactgatgcctatgtgcatcttattgatattggttgtggtttgatgtagaataaccaatggagacaacgttatctggtagtttgcgcacggttgcgtagttgtggtttgatgtagaataac

SEQ ID NO: 1677 - DNA, 23162 bp, synthetic construct
  misc_feature 1..23162: note = Synthetic
  variation 14409..15103: note = n is a, c, g, or t
  source 1..23162: mol_type = other DNA
cagcaggccgccgcgccgccctcgtggatggccgccgccagggtggccagcccggggaccagggcgtcgtcgtggatgcccagctgccagggcccggcctggccctcggggcgcacgtaggcgtggccggggatgaccaggcccaccccgccccgggccagggtccgcagcagggcggccagccggggcgtggcctcgccgccttcgccagccatgccctcccaggtggccgagcgcacgaatcggttccgcagttgcaacccgccgatggcggcgggatcgaaaggtccaggcatgggtgcttgtcctctggttggggttggggcgcccgccgcgcccgggcgcatccggttccgcccgggtgcgcccggcgaggcccggctacgcctgacgcccggccacgtccacgtcggtgaaggtctccaccaccgagtccgccagcaggggcccggccagcgcgcggaaggccgcaatatgcgggcttttctgatgttcggcaagggcctgggccgaagcccaggcttcgagcagcaaaaaggcgcaagggtcgcccccggccaccagcaggtcgtagcgcaggcagccgggctcggcgcgggtggccgcgatgagcgggcgcagggcctcgcgcagggcgccctgctggccggggcgcgcggtgaggcgcgcggtgacggtgacgacatccctggcggcgcccatgctagcggccctcccagcggttgcggcgcacgcgggccgcgtcgaagcgctccttgcggccctggggctgggtggtgtggcccacgggcacaagggccaggggcaccacagaggcgggcagcccgaacatccggcggaaggcctcctcgcgctcggccacggggtggatgcccgtccacaccgcgcccaggcccaggccgcgcgcggccagcagcaggttctgcaccgccgccgcgcagtcctggacccagaagcccgggtatttctcgcgcccggtgtcgccgcagaccaggatggccagcggcgcctggcggcacatggccgcgtaggggtggatggcgggcacggcgtccagcagggcgcggtcggtgacgaccacgaactcccagggctgggcgttgcccgcgctgggcgcggccatggccgcctccagcagggtccggatgtgctcctcggcaacgggcgcgggctcgaaggagcgcacgctgcgccgggtatgaatggcctcgaagatgtccatggcgttctcctggtgctgacggtctgcgcggagccccgcgccgcaaaggccacaatgccccggcccgcccccgggcgcaacccctggcattggcccctttcctcgggggctcttttctgccatactgcccatctggacgggtgcgaccgcagccgccctgccgggcagcccccgcccaacgtcaacgccgcagccggagcgccgcatgagcgaaaccgaacccaaagcccagaagatcctcgtggtcgaggacagccacgtccaggccaagatcatctgccgccacctcgaagccatgaccaccttccgcaccgtgagtgccgactccctgcaggaggccgcccgcgtgctggacaccatgcgcgacgagatcttcgccgccgtggtggacctcaacctgcccgacgccccctacggcgaggccgtggacctggtgcagggccacgggctggcggtcatcgtgctcaccgccaccttcaaggacgaggtgcgcgacgcgcttttggcgcgcaacgtggccgactacgtgctcaaggagagcatcgtcgtgctcgacgacgtggagagcaagatcgagcgcctgttcaagaaccagttcatcaaggccctggtggtggacgactcgcgcactgcccggggcaccgtgcgcaacctgctggaaatccagaactaccaggtactggaggccgagaatggccgccgggccctggaggtgctggacgcccaccccgacatcaaactcatcgtcaccgactacgagatgcccgaaatggacggctacgagctgaccagcgaggtccgccgccgctacaagaagcagcagctggccatcgtgggcatctccggcgcgggcgagtcggccatgacggccaagttcctcaagcacggggccaacgacttcctgcacaagcccttcgccgccgaggaattctcctggcgcgtgaaccagaccgtggagctggtggagatcgtctgcgagctgacggagtgccacgagcagcaggccgccgggaactgagccgggctccggcccggccccgcgccacggcgcgccccgccccgcgagccgccaaatccggccccccgggccgattgcggctttacctgaccggcttttcggattacaagcccggctttgcggccaggggcgctgatgcccgccgccactgccggggctcttcatgacacacgcaagttttgccagcgacaacaattccggggtccaccccagggtcatgcaggccctggcccaggccaacgcggggcactgcgtggcctacggcgacgacccgcacacccgccgggccgaggcgctgttcgccgaggccttcgggcccggggcgcgcgtctttttcgtctacaacggcaccggggccaacgccgcggccctggcggccctggtccagccctggcaggccgtgatctgctgcgccagcgcgcacatcaacgtggacgaatgcggcgcgcccgagcgcttcaccggagccaagctctacgccgagcccggccaggacgggcgcatcggccccgaggccatcgaccgccacctgcactgcctgggcttccagcaccactcccagcccggggccgtgtccctgacccaggccacggagctgggcaccgtctacaccccggacgaaatccgcgccgtggccgaccgggcccacgcccacggcctggccgtgcacatggacggcgcccggctggccaacgccgccgcggccctgggctgctccctgcgcgaggccagcttcgatgcgggggtggacgtgctctccttcggcggcacgaaaaacgggctgatgttcggcgaggccgtggtcttcgccgaccccgggcgcacccgggccttcccctacatccgcaagcagtccatgcagttgcacagcaagatgcgctttgtcgccgcgcagtacgccgccctgctggaagacggcctgtggctggccaacgcgcaaaacgccaacgccatggcccggcgcctggccgatggcgcggcggccctgcccggggtggagatcgcccgcccggtgcagaccaacgccgtgttcgcgcgcatcccccctgcggcggcccgcgccctgctggagcaccattttttctacatctgggacgagccgacctgcgaggcgcgctgggtggcctccttcgacaccacccccgccgacgtggacgccttcctggccgccctctcccgggccctgctggccccgggcgaggccgccttgcccggcgggcgcgactctgctacgtagggcacaccccgagaaaaccagccaccggagaagactttgatccagttccgccacgtcaacaaatggtacggcgacatgcacgtgctccaggacatcaccctggacatcgccgagggcgaggtggtggtggtctgcgggcctagcggctcgggcaagagcacgctcatccgctgcatcaaccgcctggagcccatccagaagggcgagatcgtcgtggacggccacagcctggccgaccccaagaccaatctgaccatgctgcgcgccgagatcggcttcgtgttccagcagttcaacctctacccgcacatgagcgtcttggacaacatcaccctggcgcccatcctcgtgcgcggcatggggcggcgcgaggccgaggagctgggcatgaacctgctggccaaggtcaacatccccgaccaggcccacaaatacccctgccagctctcgggcggccagcagcagcgcgtggccatcgcgcgcgggctggccatgcgcccgcgcatcatgctcttcgacgagcccaccagcgccctggacccggagatgatcaacgaggtgctggacgtgatgaagaccctggcccgcgagggcatgaccatggtctgcgtgacccacgagatgggcttcgcccgcgaggtcgccgaccgcatcgtgttcatggacggcggctgcctcatcgaggagaacacgccccacgagttcttcaccaacgcccagaacgagcgcaccaaggacttcctgagcaagatcctcacccactaggggtgggacttggatagcgtaccgtcacaccaacgtctgcactgcgaggagaagaccatgaaactgtcgaagatcgtcgccctggcctgcctggccgccctgatgaccgccagcgccgccctggccggccctgcctgggacaacatcgagaagaccaaggtcctgcgcgtgggcctgatgaccgactccatccccggcgccttctacaacgacaagaaggagtgggtcggcatggacgtggacatggccgaggagctggccaagcgcctgggctgcaccctggagcgcgtcgcggtgaacaacaagacccgcatcgccttcgtgcagcagggccgcatcgacgtgtccatcgccaacatgacccacaagcgtgagcgcgacaagtccatcgacttctccatcacctacttcttcgacggccagaagctgctcgccaagaagggccagttcaccaagtgggaggacttcgtcggcaagaagatcgccaccatgcagggcacgacctccgagatcaacatcaagaacctgctcaaggagctgggcgacgccgacgccgacaagaacgtcatctccttccagaaggagtccgagtgctaccaggccctgaagatgggccgcgtggccgcctggaccaccgactccaccatcctgctcggctacgccgcccaggaccccggccagttcgagctggtgggcgacttcttctccaacgagccctacggcatgggcctgcccgaggacgattccaagctgcgcgacgccgtgaacttcgccatccaggacatgtgggccgacggcacctacatgcagatctacaacaagtggtacggccccgacacgccgtacgccttccccatgaccgagcagatcgagatgtggccgtagggtccatcccgtgaagtgacaatgcaacgcatgagcccgggccagccccgggctcatgcatgtttcaaggaccacttgccgcgaaaaaagaatgacacgactgctgcttgaaaaacgctgggtccagctcgggctgctgctgacgctgctggccagcgccgtctactactggggctgggtcttcgacttcggctacaccttcgactggagcgtgctgttcaccgtcaacaagacctatggcgagcactacggcctgctcctgctcatgggcgtgtgctggacggtggtcatctccctggtcagcgccgtggcggccctggggctgggcatctgcttcggcctggggcgcgtgtcgcagttccgccccgtgttctggctgtccacggcctacgtcgaattcttccgcaacacgccgctgctggtacagctgctgttctggtatttcgccttccccatggccctgcccgagggcgcgcgcgaggtcgtgttcggcttccaggtcacctttgcgaccttcctgcccacgtggctggaatggatgctgcccgcgtggctggcggacatgcacttcggcttcgagttcatgaccgccgtcatcggcctgtcggcctacaccggggcgttcatggccgaggtcatccgcgccgggttgcagtccatccccaagggcctgctcgaagccgcctattccagcggcctgacctacccccaggtgctgcgcaaaatcatcctgcccgtggctttccgggccatcatcccgcccctgggcagcgaattcttgaacaacatgaagaactcctccctggccatgttcgtgggcgtggccgagctggcctggagttcgcagcaggtggagtccatgaccttccggggcttcgaggccgccaccgccgcctcggccctgtacctgaccctgtcgctggtcatctccgccgtgctcaacgcggtgaacgtcaagctgcgcgtggggcagacgacctgcaccccgggcgagcgcctgctgcgccgcgtggtggacccgctgtgcgcgggctgcgagctggcgacccgccccgcgcgccgcctgctggagcgcgccgccgcgcaccgccgcgccgcccgcggcatgacctactccccggcgcgcgccgcgctcaacagcgccgccgcccgcacctggggcctcctggtgctggcggccaaggccgccttcctggccgccctggccttcgtgctctacagcgcggcccgcggcctgtggaacttcaactgggccgtcatcgccgacaacttccggaccatgctcatctggcggctgcccaccgacgaccccagcgagatcatgggcggcaccggcgggctggccatggccatcctcatggccgtcatcgccatcaccgccagcttccccctgggcctgctggcgggcctgggccgcacgtcaagcaacctcctgctgcgcgtgcccagcacgctgtacatcgaaatcatccgcggcaacccgctgatcatggtcatcttctgggtctacttcttcatccccgtgctcacgggcaccttcctgcacgtcttctggagcgcgaccatcgcgctgaccgtgttcaccggggcctacctggccgagatcgtgcgcgcgggcgtgcagaacatcccgcccgggcagttcgaggcggcgttctccacgggcctgtcctactaccgggtcatgcgccacatcatcctgccccaggccctcaagcagatgatcccgcccatcgtcggccagttcatcgccatcttcaaggacacctccctggcctacgtgctcggcgtcatggagctgaccaacgtgaccatggtcctgaacaaccggctgatgatctaccccatcgaaatgtacaccacggcggcgttcctctacttcgtgtgctgctacgccatgagcacatacgcccggcgcctggagctgcgcctgtcgcccgaacgccagagcctgcacatgtaggcgcgccgggccgcccgcgcgcagcccgccccggagccatgccatgatccgcatcctcgtcaccggcggcacgctggacaaggaatacaaccagctgaacggcgagctggtcttcaccaagacgcacctggccgacatcctggtccaggccaagtgccgggccgacgtggccatcgagaccgtgatgctcaaggacagcctgttcatgcaggaccaggaccgcgagctgatcctgtcgcgcgtgctggccgcgcccgaggacaaggtcgtcatcacccacggcacggacaccatgcccgagaccgcccggatcatcggcgccgcgggcacggggcgcacggtggtcctggtgggcgccatggtgccctactcctttgtccactccgacgcgctgttcaacctgggctgcgccttcagcgcggtgcagctgctgccccccggggtctacatcaccatgaacggcaaggtcttcacctgggacaacgtgcgcaagaaccgcgagcgcggcgagttcgagcccctgcgctaggtcgccgcccccgcccggccccgccatccgcccgacacatttccgcagcgcccagaaaccgccgcccggggcggcttttccctggcgctatccttttccccgagagtgcgctatgactcgccccggcgtttgtcacactcccgtaacacaactgtaataaagccccccgcagcgccgccgcccgggggtccgggcaggcggctccccacagacccggatacggaagcccaaggaaggtgcatggacctctacgacctgttcttcctcctctccctggccgcagggttcctcatggccttcaacctgggggccaacgacgtggccaactccatggcctcggccgtgggcgcgcgcgccatcacggtcaagcaggccgtgttcatcgcgggcatcctgaacttcgtgggcgccgtgttcctgggctcccacgtcacggccacggtgagcaagggcatcatcaaccccgcaggcatctccgacccgcagctcatcctcatcggcatgttctcggcgctgctggccgccgccctgtgggtgctcatcgccacgctcaccggcctgcccgtgtccagcacgcactccatcgtcggggccatcctgggtttcggcatcgtggccgggggcccctcggtggtccagtggagcaagctgggcggggtggtggcctcgtggttcgtctcgccgttcttcgccgccctggtcggctttctcatcttcacgcagatccggcgcaagatattcatggccacccatttcatcgaaagcgcccgcacctggggcccgcgctggatggccctgaccatggtcctggtgggcttctccttcctgtacaagaccccggtgggcgagcagctggccctggcgtggtaccagtccctggccctggtggcggtgctggcgctggtggtgtggtacctgtctgcacgcatggcctggcggctggccaagcgggtggaggagagcgccgagggcgtggaggccatcttccgcaagatgcagattttcacctcgtgctacgtggccctgtcgcagggcgccaacgacgtggccaacgccgtggggcccatcgcggccatctatgtgctggccaagcagggtgcgctgctggccaaggccgacgtgcccctgtggctgctgggcctgggcgggctgggcatcgccctgggcatctgcgtgctggggcacaaggtcatggccacagtgggcgagaagatcaccaccctgaccaacacccgcggtttcgccgtggacttcgcggcggccaccacggtgctggtggcctccaagctgggcctgccggtctccacgacccacgccgccgtgggcgcggtcaccggggtcggcctggcgcggggtttccgggctgtggacttcggggtcctgggcaagatagtggtctattggctgctcacggtgcccatcgcggcactcacgtccatcgtcatctttcaggtcctgcgctggacgttcctgtaggaacgccgccggaccgccaggaggaacatatgcgcgtccccttctttggaatgctggccgacaagtcgcccctggacgggctgctggagcactacgagaagatcaacggctgcgtggccctgatcaaggagtccatggagtgctatgtggcgggcggggcctgccgcgaattcatggagctcgcggagcagatcgacgagatcgagaaccaggccgacctcatcaagcggcgcatccgcaaccacctgccgcgcggcctgttcatgcccgtggacaaggccctgttcctcaactacaccaaggcccaggacaacgtgctggacgaggcccaggaggccatgcagtggctggccatgcgccgggtggacatccccgccgacttccagctggccatcatcgagctgatcgaagaggtcaagaccatcaccgacatgctcggcccggcgctgtcggccaccctggggctcatctacaccaagcacctggaccggcgcggcaccaaggaccaattctgggccatccgccgcaagcgcagcgccatcttcaagatgaagaaccgcctggtcagccgcatctacaacgccgagatggacttcaaggacatctaccagctcatccacttcgtggaaaaactgcacggcatggcccacaacaccgagaactgcgccgacatcctgcgctcgatgatcgcccgctagggcgcaccacgccaaaaagtgcgagggccccacccgggccctcgcacttctgcaaagagaaggcgggcctcggcccgccttattggtgctcttcagcttgttaacgacttgccgaagaccccgttttcccttctgctacaaaggtgctttacttatcgcatggcttgagccaccttgcaagcattatctaatatctgcgaggtgaccatgcgctatcgcctttccctggacgtcggcacgaattccatcggctggtgtgtcttgcgcctggacgataccctgaaaccggaaggcattgaggctatcggctcaaggatattccccgatggacgcgacgcgaaaaccaaggcctccctggcagaagacagacgcatcgcgcgcagtgcccgcaggcgcagagaccggtacctcaagcgccgcacggaattgctgcaacttctgaaagagaatggactcatgccctcagagcaatccgcctgcaaggctctggagttacagaacccttatgcactcagggcgcgcggccttgatgagccgcttgagcttcacgaattcgggcgcgtccttttccacctcaaccagcggcgcgggttcaagagcaaccgccggacggactcgggcgaagacgctggccccatcaaagagggcatcgccaggctcaaggcgcaactccaggaagccaacgccagaacctacggggaatacctcttcgccctcgcccaaaaaggtcagccggtgcgcatccgtcgggaagatgacagccccaaaacgcaataccccttctatcccgagcggacccttctccaggaagaattccaggccctttgggaaaaacagcgctgccactacccctcgctgaccgacgacctgcggcaaacgctcgaagatgccatcttttatcaaaggccactgcgccccgtgcagccagggcgatgcacattcaacccgggtgaagaccgtgccccccgggctctgccaacggcccagcgtttcaggatgcttcaagagacaaacaatatacggattgtctctccgacccttgagaaaaggcccctcaccttgaaggagcgtgacgctgtgctgcaaacgctcctcggtgccaagaagcgcaccttcgagcagatcaggaaaactctcggcctcagtgcagaggacaaaatcaccctcgaatcggcaaagcgcacagccctatccggcgatgacaccggcttctcccttgcaaagaaggaatgcttcgggaaaagctggtggacactcccgcttcaggaacaggatgaaatcgtctccctgctgctcacggaggaagacgaatccgtcctgcacgacatcctgacaacgcggtgggcgctgaccgatgcgcaagccacgcaggtgggcgcgctgtccttcctcaagggcttcgcccaactcgggatgacggccctgtgcgccataacggcggaactggaaaaggacgtgatcccctactccgaggccgtcgcaagagcgaaactcgggagtcattccgacttccgcgatggcgtcatatgggaacggctgccctactacggcgaaatcctccgccgccacatcgcaaaaggcacgggaaaacacaccgacaggcaggagcagcgcctcgggcgaatcgccaaccccaccgtgcatatcgccctcaaccagattcgccgggtggtcaacgagctcatcaagaccctcgggcatcccacgcaagttgtcgtcgaggtcgcccgggagctcaaggaaggcgaagaaggccgcagggaacgggagcgcacccaggccgagcaccaaaaggccaacgaagggcgcaaggcccggctccgcgaaatgggcatcgccgtcacgggggacgccctgctccgcatgcgcctttgggaggagctccaccccgacgcagcgtcacgccgctgcgtctacaccggcgagcccatctccatggagcggcttttctcctcggaagtggaaatcgaacacatcctgcctttttccgcatccctcgacgacagcccggcaaacaaaaccctcagtctgcgcgcggcgaaccgctacaaggccgagcgcagcccggcccaagcctttgccgcctcccctcccgggtacgactggcaaggtatcctgggcagagcggccttcctgccggacaacaagacctggcgcttcgccgagggcgccatggagcgcttcgatgccgagggaggcttcctggaacgccaactgaaggacacgcagtacatcgccaccgtcgccagggagtacatgaccgccatctgtgaccaccggcaggtgtgggtcaccccggggcggctcaccaacctgctcggcaggcactggggcctgccgaagaaaaaccgcgacgaccaccggcaccacgccttcgacgccgtgctcatcggtgtggcggacagacgcatactgcaactcgtcggccagacccacgcccgggagcgtcttgccggggtggagcgctttctctccactcttcccgagccctggccagggttccgcgacgaaaccatccaggcctgccggggcatcatcgtctcccacaagtcggacaaccgccccggcgggcgcctgcataacgccaccgcctatgggctctacaaggaaaattcgggcatacaaatcgcgcagcacaaagtgccggtctcgtctctcaccaccatcgccgacatccggaagatcaagggcatcggcatcgcatcccggtttcttgctcttgcgggcaacctgtcgccgcaggagtgcgtcgaggccattctgcacatcaggggcatgaaggaaaaagaggctatcgaacatctaaactcgctagtcgattgcgacgacaagacgttcaaacagcgcctgcaagactacgcgcgcaagaaaggcatccgaagagtccgcatcctggagcccttgacgctcatccccatcaacgacaaagccgggcatccgtacaaatggttcaagggcgacagcaacgcctactatgaaatcttcgccggacaggatggccagtggacgggaagaatcgtctccactttccaagcctgccagagccaggacactgcggaacagcccagcggagacctcgtcgccaggctctccaaccgggacatgctggagcttgagcacgaaggcattcggaaaattgtctatgttgtgaagctctccgagaagcaactcgccttcgccgaacacttcgaggccaacacggatgcaagaaacagggacaaggacgacgcgttccgattcatctacaagggaagcccggacgcgctgagaaaggccaaggcccgtccgatcttcatcactccggcgggcaaggtgatctacaaggagttgcccagccatgatcccgagaacggtggaggtcagcggtgattcgcgccatctgtgcaaggagctcggctttcttgccgtctactgcaaaaaggagttgctcggacgcatcccgctggacgacctggggctcgtcctggcctgcgggcacgggctgacgtacagcaacggccttctcgtcgcgctggcggagcggggcgtgcctctggtggtttgcgaccaggggctacgccccgcagccgttttctggcccctgcaggcccacggcgagcaggggcggcggatgcaggcccaggccaacgccaccgccccgctcaaaaagcgcctctggcagcagctcgtcgcatgcaaaatccgcatgcaggctgcggcagcccggcgcgtaggggcagcccatgggcacctggaggccctctcccgttcggtggcctccggcgacagcaccaaccgcgaagccgcagcggccaaggtatattggcgcctttgcttcggcccgtccttccggcgagacagggacacccccgggaccaacgcgctcctgaactacgcctacggcgttgtgcgcggggcaacggcccgcgcggtcatgctggcgggtctgcatccgtccttcagcctgcaccactccgccttgcgcaaccccctggccctggtggacgacctcatggagccttaccgccctctggccgacctccttgtgctcgaattgggccggaaacagccggaggaactgaaccccgagtccaaacgggccctcgcccaaatcaccatcgccgatgtccgggtcggcaagggcatcagcaccgtcggcgaaagcctcaaggaatgcgcggcgtctctggccgatgtgctcatgggccagcgcaaaaccctcgccctgccgcgcggcctgacagggcccgacgcgccatgacggtgctgagcggctacagaatcatgtggatgctggtcatgttcgatctgccggtgctcaccgcacaggaaaggaaggaagccaacgccttccgccgcgctctgctcaacctcggcttcgagcgggcgcaattctccgtctacctgcggttctgtcccggcaaggagaaggtccaggccctgaccaaacgcatcaagaccctgctgcccacaggcgggcaggtggatatcctgatgttcaccgacaagcagtacggcaacatcgtcagcttctcctcccgggagaggagcaggcggggaaaaccggagcaactgaccctgttttagggctccagcgcctggaatgaaccagccggccaccaagaaaatccagctgnnnnnnnnnnnnnnnnnnnnnnnnnnnnnnnnnnnnnnnnnnnnnnnnnnnnnnnnnnnnnnnnnnnnnnnnnnnnnnnnnnnnnnnnnnnnnnnnnnnnnnnnnnnnnnnnnnnnnnnnnnnnnnnnnnnnnnnnnnnnnnnnnnnnnnnnnnnnnnnnnnnnnnnnnnnnnnnnnnnnnnnnnnnnnnnnnnnnnnnnnnnnnnnnnnnnnnnnnnnnnnnnnnnnnnnnnnnnnnnnnnnnnnnnnnnnnnnnnnnnnnnnnnnnnnnnnnnnnnnnnnnnnnnnnnnnnnnnnnnnnnnnnnnnnnnnnnnnnnnnnnnnnnnnnnnnnnnnnnnnnnnnnnnnnnnnnnnnnnnnnnnnnnnnnnnnnnnnnnnnnnnnnnnnnnnnnnnnnnnnnnnnnnnnnnnnnnnnnnnnnnnnnnnnnnnnnnnnnnnnnnnnnnnnnnnnnnnnnnnnnnnnnnnnnnnnnnnnnnnnnnnnnnnnnnnnnnnnnnnnnnnnnnnnnnnnnnnnnnnnnnnnnnnnnnnnnnnnnnnnnnnnnnnnnnnnnnnnnnnnnnnnnnnnnnnnnnnnnnnnnnnnnnnnnnnnnnnnnnnnnnnnnnnnnnnnnnnnnnnnnnnnnnnnnnnnnnnnnnnnnnnnnnnnnnnnnnnnnnnnnnnnnnnnnnnnnnnnnnnnnnnnnnnnnnnnnnnagcgtagcagaagggaaaacggggtcaagtcgcaagccataacaacgcatcagaccaaaacagaggcgaccgcccggaatcgggcggtcgcctttcctgtagccctccggcggctagaaccgctggcagttgtgcttcacgctcacgcccttgaccacgaagatcgtcgtctcggccaggttggtggacaggtcgccgatgcgctccaggctgcgggcggccaggatggtgttcacggcgcggcgcacgcccgtgacctcggtaaccatgtcatccatggttttcttgaggatgcgcacgttgaggtcgtcggccttgtagtccatgcggcacacgtccgaggccttctccacgttctcctcctgcagggcctcgatggacaggcgcagcatgtccttggccgtggccaccagctcttcgagcatcgggctgtggggcgtctccgagagcttggagaggtagatggtcttctcggcgatgttcacggcctcgtcccccgcgcgctccaggtcgatcaccgcccggcggcagccggtgatgaagcgcaggtcgcgggccatgggctgctcgcgcaccagaagctccagcgagaactcgtcgatgtcgttctccatctggttgatcttcgcgtcgccctcgatgacgcgctcggccagctcggcgttgcggtccagcagcgcgcgggtcgcgctgtccacggcgcgctccacataggccgccatctgcaggatcatgatcttgagttcgtctatctgctgatggaaatgggtttccttcctgggcatacgggctccttggggcctagccgaagcggccggtgatgtagtcttcggtctgcttgttcttggggcgggtgaacagggtctccgtggcatcgacctccaccagggtgcccatgtagaagaaggccgtcacgtcggacacgcgggccgcctgctgcatgttgtgcgtcacgatgatgatggtcaggttcaccttgagatcgtggatcagttcctcgatcttctgggtggcgatggggtccagggcgctggcgggctcgtccatgagcagcacctcggggcgcacggccagggcccgggcgatgcacagccgctgctgctgcccgccggacagccccagggccgactcgtgcagccggtccttgacctcctcccacagggcggcctggtgcaggctctcctccacgcgctcggcgatgtcgcccttgttcttccaaccgttgacccgcagcccgtaggccacgttctcgaagatggtcttggggaaggggttgggcttctggaagaccatgcccacctggcggcgcaggtccaccacgtcgagcttggggtcgtagatgtccttgccgtccagggccacgcggccttcgacccgcgtgccggcaatcaggtcgttcatgcggttcaggcagcgcaagaacgtgctcttgccgcagcccgaggggccgatgagcgccgtgacccggttctgcccgaaggtgaggtcgatgcccttgagggccttgaattcgccgtagaagaaatcgaggttctcggcggtcatcttgacgtgttctgccatgtgctctttcctgccttgggtacggggccgcggccccggtcatggatacgctacgcggggtcgccctcgccggaggtgtcggcgggcatggtgaaatggaacaccgagccggtgtcggcgtcctggcggggggccacccagatccgcccgcccaggcgttcgacgatatgcttgcagatggccagcccaagcccgctggagcccccggcatgcttggtgcggtgcttctccacgcggtagaagcgctcgaagatgcgcgaggcctcctccttggggatgccgggcccgaaatcgctgaccccgaacaccgtctcgccctcggcctgcgcaaaatccacgctgaccaccgagtcctccgggccgtacttgatggcgttctccaccaggttgcggaacacctgcaccagccggtcgaagtccgcgcgcacgaaggccccggcctcgggcaggctgctggccaggcggatgttcttggcctgggccaggggctcgcaggtgcgcagggcctcggccagggcgtcggcggcgctgacccgctcggggctgaactgctgtttgccgctttccaggcgcgacaggtgcagcaggtcctcgaccatcttggccatgtggtcggcgttcttgaggatgatctccaggaacttctgggccgtcttgccgtcggccttgcggttggtcaacagggtctcggagtagcccttgatggtcgtcagcggggtgcgcagctcgtgggagacgttggccacgaagtcgcggcgcacgcgctccaggcgcttgagctcggagatgtcgtggaagacgatgatcgcccccagcccgcgctccccggggttcaggggcatgatggtcacgtcgtagatgcggtccttctcgggctcgatctggatggtctgcgggccctgggcgtccacgcccccggccacggcccggtcgcacgcggcctgcagctcgggcgagagcacgatctccagcggcctgcgctccacgaacagcgtggcgtcggggaagatgcgcaccaaggcccggttgaccttgaggatgcgcccgctgccgtccagcaccatcagcccctcgcgcatgccgtccaggatggcttccagttccagggcctgttcggtgatggtcgagacctgggaattgatgttcccggccatggtgttgatggcccgggccaggggctcgaactcgctgccggggaagaagcggatgcgcttcttgtagtcgcccttgccgatggcctcggccacgtcgatcatttccttgatggagcggcccatggtccgggtcaggatcaccgagagcacgaaggccatgcccagggccagcccgaagaccacgaagaaattctgttgcaggcgctccaggcgcgagcggatgcccgcgtagggcacggccagacgcaaaaagcccgcaggcagcccggcgatggcctgcactcgcttggccgcgtagagcatgtccttgtccagggtggcgctgaagcgctggctcaggccgtattcgtcgcgctcggcgtcgaggatctcggggcgcaggccgtggttgtccaggtcggccacgtgggggtagaccagatgcgaatcggcaatgacgcgcccgccctcggtgatgtaggtcacccgcgcgtccaggcgcgcgcccaggtccgccagccagtcgtgcaggtcctgctcgccgtcaaagcccccgcgctgctcgatgagcagcgccgccagacgcagttcgcggatggccccggcctgggcgtcgtcgaggatctcgccgcggaagagctggcgcgcgtagtacgcgggcagcatcagcgccagcatgatgacgatgacgaaagacaggagcaggcgcgtcctgaagggcatggagctgtgcatgggaccctattccttgaagcggtagcccaccccgcgcacggtttcgatgagcgcggcgtggtcgcccagcttctggcgcaggcggcgcacatgggtgtccaccgtgcgggcgtagccctcgaactcgtagccccagaccgaggtcaagagctggtcgcgggtgcgcacccgggggctggtgcggatcagctcggagagcagcttgaactccgtggccgtcagcccgacctccttgccctcgatgaacaccttgtgcgcttccaggtcgatggacaggccgtcgcgctccatggtggcgcgctcggtgggctggcccgtgctgcgccgcagcacggcgcgcacccgcaacagcagctcgcggaagctgaagggcttgaccacgtagtcgtcggcgccaagctccaggccgacgatgcgatccacctcctcgccgcgcgccgtgagcatgaccaccggaatctgggccgtctcctggtcgcgcttgagggatttgcagatgtcgaagccgtccatccccggaagcatcaggtccagcagcacgatgtccggcttcaggcgcctggccatggccaggccctcgcgcccgtcacccgtggcatgcacgtcgaacccggcggactcgaaattgaactgcaggaggttcaggatgtcctcctcgtcctcgacgatcagaacggtttccctggtcattgcgtggactccatggctggcgcctgctctgtggcctgcgtcgttacaccccccggtggtgacaagagtattgtcggcctgtgacaaatgcgtgacatttctcacgtgcaaagacaatataccggactttttgaagaaagaaagttcatccaatcgtaaagaaagccgcccgggcgcaagggcgtccgggcggcgacacggggcagggcgcccgtcggccagggggcgggctcagcccgccagcagctcgcgggccagggcctggccctgggccccgccgcccgccatgcgcgccagctcgtcgaacacgtcctggcccgcaaggggcacgcagcgcaccgacgtggccccgtcggccacctccttgcggaccatgaaatgccgcccggccagggccgccagctgcggccagtgggtgatgaggatgacctgctggcgctgggccagggccgcgatgcgcgcgcccacgctggtcagcgtcagcccgccgatgcccgcgtccacctcgtcgaagagcagcgtgggcatggcctcgcgggtcaacagacccaccagggccagcagaaagcgcgacagctcgccgcccgaggcgatgcggtccaggggctgcggcgcctgcccggggttgggcgtccagagcatgcgcgcccggtcctcggccagcccggggtggatctccacgggcgtgaactcgaaggccacgcccacctcctgggcaaagcccagcccgcgcagctccgccgccagggccgtggccagcccctgcccggcctcgcgccgcgccgcgcccagggccgcgagcgcctcgcccagggcccgggccagttcggcctcgcgccggtccaggcgcttcatgtccagggcgcaggaatccaggaaggacaaattctcggcaatctcggcccggaagtcgatgatctcctccaggctgcggcccagcttgcgccgcaggcgcgacagctcgaacagccgcgcctccacggcctcggcgtcgaagccaccgcccgcctcgcgctcctcgcgtcgcagccgggcgtccagctccagcagccgctggcgcatgccctccagggcctcggcctcctcggcgtagccggggtcgatgcccgccagggcctccacctcgcgcgccagggccgccacgcgctccagcaggctgccttccccgccgtgcagggcgtccagggccccgtccacgctctggcgcaggcgctcctcgtccttgacggcccgcctgcgttccagcagctccgcttcctcgccgggctgggggtccaccttctcaatctcccggccctggtactccaggaactcgcgccgctcctgcaacgactggacccgcgccgccagctccccgcgccgcgccgccacctcgcgcagctccgccagcagcgcgtcgcgccgctccacaagcccccggtcgggcaaaaacgcgtcgagcatccggccctggtacgccggggagagcagccgctgctgcccgtgctggctggtgtgccacaccaggcgcgcgcgcaggtcgcgcacggcctcctgcgagctcagggcgtcgttgacgaacaggcggctgcgccccgtgcccccggccagctcgcggcggatgaccagctcgccgccgtccgggcccgcctcgtggaacagggcctcgaccaccgcgcggtccctgccggggcggaccatgtccgcctccagccggtcgcccagcagaaagcccagcgcccgcatgacgaagctcttgcccgcgcccgtctcgcccgtaagcacgttcagcccggcagcgaactccagctccaggtcttcgatgagcgcaaggttctgtatgcgaagaaattccagcatggtccacccggcccgcacactatccgaccccctgcccgagggcaagggcccgcccccgccgacccccttgactggacggaccgagaacctatctgtccagcaatatcaatcgggaggaccatccatgaccgcgaaaaagagcacccgccagttcaaggcggaaatctcgcaactgctggaaatcatcacccactccatctacaccaaccgcgaaatcttcctgcgcgaactggtgtccaacgcctccgacgccctggacaagctgcgcttcctgcaatccagcggcgccgccctggccgacccggacgcgcccctggaaatccgcctcagccccgacaaggacgcccggaccctgaccatcaccgacaccggcatcggcatgacccgcgaggaactcgtggagaacatcggcaccatcgcccactccgggtccgccgagttcatgcgccgcgccgccgagcagggcggggccggggccgactccatcatcggccgcttcggcgtgggcttctactccgtgttcatggtcgccgacgaggtgcgcatcaccacccgcagcgccgaccccgccgcggcccccgtgcgctggaccagctccggcaccggcagctacaccatcgaggacctcgacgccgacgccccgcgcggcacgagcatcgaaatcagcctcaaggaagacaccgccgacttcgccgaccccgaccgcctgcgcgagatcatccgcgcccactccaacttcatcggcttccccatcctgctggccggcgagcgcgtcaacaccacccccgccctgtggcgcgagcccaagttccagatcaagaaggagcagtacgacgagttctactcctttctgacctacgactccaaaccgcccctggaacacctgcacgtcgccgtggacgcccccgtgcagttcaccgggctgctcttcatccccgacgcaccctcgggctccttcttcgaggaccccgacaactacggcctggacctctacgtccgccgcgtgctcatcgaccgccgccacaaggagctcatcccccagtacctcggcttcctgcgcggcctggtggacaccgaagacctgccgctcaacctctcgcgcgaaaccctccaggaaaacctgctggtgggcaagatccgccagaccctgaccaagcaggccctggccatgctcgccaagctcgccgaagaccaggaacgctacgccaccttctggcgccaccacggcaaggtcctcaagctcggctactccgactacgcccaccgcgaccagttcgccgccctgctgcgcttcaacgcctccacccacgacgacgcttccggactgacctccctggccgactacaaggcccgcgccaaggacggccagaccgccatctactacatctccggccccagccgcgaggccgtgcgcctcaacccgcacctggaaatcttcacccagcgcggcatcgaggtgctctactgcttcgagcccgccgacgagttcatcctcgactccctgggcaccttcgacggcatgaccctgacccccgccgaaaaggccgaccccgccgacctggagcgcttccccgcccaggacgccgacgcccccaaggacagccccgaggccgaccccgccgaccccgaagccttcgaagccatgctcgccgccgccaaggacaccctgggcgagcgcgtcaaggacgtgcgcgcctcgcgccgcctcaaggacagcccggcctgcctcgtcagccccgacggcgccatgtcctcgcagatggaaaaatacctgcgcatcatgaccaaggacaccaccccgcccctcaaggtcatggaactcaaccgcgaccatcccctggtccgcaacctgctgcgcatccacaagaatgacggcgccgacgccttcttccgcaccagcgtggaacagctctacgaatccgccctgctcctggacggctacctcgccgacccccacgccctggtcgcccgcgtcaacaagctcctggaacaggccagcggctggtacgccgagatcaaacgcctgtagagcccgaaggggcgtgctggcggggcgccgcgccggggcgctgccccggaccccggcaggggggcgctgc

SEQ ID NO: 1678 - DNA, 23150 bp, synthetic construct
  misc_feature 1..23150: note = Synthetic
  source 1..23150: mol_type = other DNA
ggccgccggggagcgcctgggggacctggctttcgtcctcgatccggtggacggcacgaccaacttcgcccacggcctgccctttgtcggcatctccatcgggctgtgggtggagggagcggtgaagctcggcgtgctcaacgccccgctgctgggtgagtgcttctgggccttgcgcggcgccggggcgtacctcaacggccggccgatgcacgtctcggcggcggacaccttggccgactccctggtggccaccggctttccctacgccatccgcgagcgcatcgacacggtcctgggcaacatgcgccgggtgctgctcgcggcccaaggcctgcgccgggccggggcagcggccctggacctggcctacgtggcctgcggccggctggacggcttctacgagacggacctcaaaccctgggacaccgcggccggcctgctcctggtggaggaggccggcggccgggtcagccgcttcgacgcggccacggagtaccggctgggcgacttctccattctggccaccaacggccgcgtgcatcgggagctgtccgcgctgctggcggaggaagaaagctaagagcgcatgtccggcgggaagaggaagttctgctcccagacgtagaccagccccggggtgagcagctccgggcagcgctcgaccaggccggccagctcggtgcggtcgcagaagaagccgccctggacctccgcggcgttgggttgcggggtttcgcgcacggtgccggcggaaaagacgctgacgaactcgaagccggtctccgggccggccgggacctcggtcaggagcttcaggcccgcggcgctgatgccgatctcctcgtagagttcgcgcagggccgcgtcctcgcgggactcgccggctttcacgtggcccgaggccgagacgtcccagcggccgggatagagagccttggccaggctgcggcgctgaaggtagatcttgcggccgggatcgtagaccaggatgagcacggcccggtgcgacagcgactggcgatgggcgtcacttatgtccatggcagccaaaggtcggtcccggccatcgacgatctcgatcagctccccgggcgtcacgggcggcagggcagggcgggatggggcaaggtagcgtttgttcatggcggaccgtcgaaaccgtatgttaggcgaggcgcgcgatgatggcaaccggaccgaccggagctgaaggggaaaaggtcgtgccgctcggtccgggcgacctggaggcggtggtggccctggagcgggccatgtttcccgcgccctggaccagggagcagtacgcctacggcctggcccacggggtgctggccttgtgcggcatcacctccggcgggcggctcctggcctactgctcgtggtaccgggtggtggacgaggccgagatcgtcaacatcgcggtttcgcccgggaaccggcgctgcggcctggggcgcagattgttgcggtccgtgttgcaaagcgcggtcaaaaaaggcattaatcaggtgtttctggaggtgcgcgaatcgaatctggccgccgtcaacctttacgcctccctcggcttccggcagaccggacggcgccggaagtactaccccgacaccggggaggacgccctgaccatggcccttgcgcttgatccccgcgccttcgccaccgacatagaataaggagcgaccctatgcgattcctcgattccctcgacctcaagggcaagaagctcatcatccgcgtggactacaacgtgccgatcaaggacggccggatcaccgacgacatccgcatccgcgagagcctgccgacgatcaaactggccctcgacggcggcgcggccgtcatcctttgcgcccacttcggcaggcccaaggacaagcccgagcccgagttctcgctcgcgcccacggccgcgcacctggccaagctcatcggacgcgaggtgctcatggccaaggataccgtgggcccggacgccaagtccaaggccgcggccctcaagcccggccagatcctcatgctcgaaaacctgcgcttccagcccggagaggcgaaaaacgatcccgaattcgccaaggagctggcgagcatggccgacatctacgtcaacgacgccttcggcgtggcccaccggccggccgcctcggtggtggccctgccgctggccgccaaggtctgttgcggcgggctgctgctcaagaaggagtggcagtacctgggcgagaccctgtccaacccggagcggccctacgtggccatctccggcggggccaaggtctcgagcaagctggccatcctgaaacgcctgctggacaaggtggacacgctcatcatcggcggggccatggccaacaccttcctcctggcccagggccattccgtgggcgcctcgctggccgaggccgatctcaaaggcgaagccaagtccatcctggacgcggccaaggccaagggcgtaaccatctgtctgccgctggacgcggtcctgggcaagagcctggaggacgagaccaccggcgcccccgtggacgtcgcgaacgtgccagcggaggccatgatcctggacatcggcccgaagaccgtggccgcctacgagaaggcgcttgccggcgcgaaaacggtcatgtggaacggccccatgggcgccttcgagaacccggccttcgccgccggctcggtggccgtggccaaggccgtggccgccctgcccggagcggtgaccatcgtcggcggcggcgacaccgacgccctcatccacaagtcgggggtggccggaaagttcagcttcatctccaccggcggcggctccttcctcgagttcctcgaaggcaaggaactgccggccttcaaggccctgaaggagtgctcgaaatgaaaccgaagctgatggccgccaactggaagatgtacaagaccaggcccgaggccacggccacggccaaggatttcctgcgcttgacggcccaggccctgcctgcggatcgggacgtcatggtctttccgcccttcacggccctggccacggtggccgaggccttcgccgggctgaagcagttctgcgtcggcgcccagaacttccatccggtgaaggagggcgccttcaccggcgaggtttccgcggccatgatcaaggaggccggcgccacggccgccctggccggccactccgagcgccgccacgtcttcggcgagtccgacgagctcatcggccgcaaggtggccgtcggcctcgaggccgacctcatcatggtcctgtgcatcggcgagaccatcgccgagcgccgcgccggccaggtggaggaggtgctcgcccgccagcttgcagccggcctgagccaggcggacaaggccaaggccctggacaagctggccgtggcctacgagccggtctgggccatcggcaccggcgaggtcgccggcccgcgcgagatactggacgcccacgcctttgtccgcagccgcttgaccggatttttcggcctggacggcgcgggcgtgcgcatcctctacggcggcagcgtcaagccggacaacgccgcggaaataattcgccttgacaacgtggacggagtgttggtaggtggcgcaagcctgaacggcgaaagcttcagccgcatcgcgctggcctagcgccgcggttttttttcatcccggaaacgacctaaggacaaagacccttgagcgcactcgtcatcaccatacacatcatcgcctgcgttttcctcatcatccttgtgctcctgcagagcggcaaggaaggcatgggggtcatcttcggcggcggatcgggctcggtcttcggcggcgccggagccggcgggctcctggtcaagctgaccaccggcgcggcgattattttcttgattacctcgctgtcatacaataagatcatcagttcgcgccacatgccggccggctccatcatgccggagactccggctgctgccccggcccccgaaggccagcagccgcagggcggcgcgggcttcgaggtcgaggtgcccatgagcagcacccagggcgggacccaggtccaggtgccggcccccggcagcgcgcccgaaggccaggccccggccgccactccggctccccagcccgagccggccaagcccgagggcgaagccaagcagtaagcacgttgacacgcggaagtggtggaactggtagacacgctatcttgagggggtagtggccaaaagccgtgggggttcgagtccccccttccgcaccaaatccttcgaaagggccggaaatcagtaggtttccggccctttcgcattgggccggcggcgggcgtccacaaagagcgtccacaaatggcccagaaaccgatccggaccccgagctacctcaagttcgaaaagggatgtttctacttcagaacacggctgccgtcggacctcaggcgggcgacaggagtaaccgaggtcaagctgtccctcaggtcggcttgcctgcgtacggccaggccgagagccgttgacgttcaccactactaccagcgagcgctacgaatggtcacccgcaagctttccgagttgagccgcgaagatttcctccaggccatcaagaagcacatgatgcgcgcgttcgatgactgggacgaatcccgccaacagaagtctttcgccgcgtcctacgttcccgcacccgacgatgtgaacgaatacgagcgcaagaaaacgaagatcagggtagagcagaggatacttaaagacacgcttgaggaagtccaggacgacctcaacaccggtgacataggaaacgtcaaggagcacgcggttaaaatcctccaagccgaacatatcgaggcagagccggacagcatggagtttcgtcagttctgcaaggagcttctatcagccaatgtcgagaatcttcgaaagcagctcgaagtggtcaccggccagaaagcagcgactttacaactggatactcaggcacaatcaaagcctgtggtcgtcgagaaagatgccggcaagacactgcgggaagtgatagaatcgtatttaaagatgcgtagccagaaggggtatgatccggctggcatgcggcggtatcgtgattggctggagtgggtggcatttattattggcgacgatatgccgtttaaaaatatcaagccggaaacagtcgatcatttcatcacagctttgcagaggatgcccaagaaccgtaagaagaaggggttgggtaaatacacggctgatgagcttcttgctatggacttatctggatacgataagctctcaaagaccactatgaacgctatcattgatcgagcgagcgggctggcgaagtttgcgatgcagcgggactgggcggacaagaacttcttctctggccgacaattcaacttccagatcggagagaaaaagcagaagcctccattcgaggactatatgctacgtgcgatggccagagagggaagattcaacaagaaaggggcgaacttctgggtctggcgtattgcgctgctttccgctatgcgacttgaggagataagtcagcttgatgtcaatgatgttgtctgtattgatggaatatggtgttttaatgtaaagaatgaaatgagtgacagtgaccttctcgaccaaacggtcaaaaataattcggcatctcggatagtaccactgcataatattctcttgaatgagctaaaatttctcgattatgtggacagcattagaaagtctggccgtgagaagctctttcctgaccttcgtccacggattgtcaaagatgaaaagtctgactcttcaaaagggaagctaaagtatggcgatagaatatctcgtatgctaactgcttttgttaaaaagaattgctggaaaggaggatattctttccacagctatcggcacgcattcattgcgaaaattgatatgtcaggggctaatgaactcattaaatgctttgttgtcggccataaaccgaaaataatgggcgacccttcctatgaccacagaagaaatgagacgcctattgccaccttgaaagctgaggttattgatcatctagccattcccatggacttactggtttccgatgatgatagagatatcgaggtcaagtaacaccctgcctgctcaggaagtacctccggtcgcctggttgatgaccaggtgaccggagggcatgaacctgatgaggtctcggacacgcatgatatcgtccgatcctaacgagcagcctcattattcgctccgagcgccctgtagagcgtagaccggctcacgcccaactcttcagccacattcttcttgtcgcggccctggccgatcaactcgatcgctcgggcaacctgggcatcggtcatggccttgggcctgccgaagctcttgccggctttcttggcggcagagatgccttgcgcctgccgctcccggatcaacgaccgctcgaactggccgatagcgccgaggacctggaagagcaggatagcgcagggatcatccttgcgcccgaaggcaaggccctctttcaggaaacggacctcggcacccttggcggctatctccttgacgatccgctccaggtcgctcagagaacgtgccagacgatctatggacggcacatggagcacatcaccttcccgcacatagtcgaggcagtcacgaaggccagaacggtctgtagaggcaccagaggccttgtccgtgaagaccttgtgcagcctgagcccctcgaacgcctccaactgccggtcgaggttctgagattccgagctgacgcgagcgtatccgatcttctggcctgtcattggtgactccttggcgtgtcgtttcaaatctactagaccttatgagatttcgtgtcaatattcttttatggacaatttgagacacgaaaataatggactttctgccggccaaggaacgaatctaaatgtacaccttgtgagactgagccgagccttgaaaacacaagcgatagcgagtacgcttgtgtttagaggaggcagcgatatggccaaacatacgggcgatgagaaggccaagggtaaggggctctggttgtatcccagtgaagacagagccctcaaggacctagccaagcgctggaagctcaaggaatcgcgagtggtcgcacgattgatcaaagaggcgaaccctgacgccacaggtgatgctgacactagcgcaagcgtcagcgctatcgttacctgtctcgccagggttgaagcccgccttgcccaccttgaggagatactcgctgactaccaggtgctaccgggtgaagctatgcccggccagagggaagggcagaacgcagaggtcgaagccgagggccaggcgccggcagaagttacgcccctcgaagacgacaacgcggaggatcaagaacatccgccggctcaggagttcgctaggcttaaaaagctcgtggtggaggcatttgaacgaacaggtatcggcccttggggtccgttcgtgagtggacagagacaagggcctgagctgaagcgggtactcgacgcgataggtgccatgtcggaagacgggtacgttcagttcaccggccaaagagtacgagcctcgtcggtgctccgcttctgtctactgtacgcattgaccttcgagatggacgatgatcagggtaaggcgcgcgatcagatggccgccttgggtttctccctggagcaaggcgagccaagcgatgacttgcaacgatcggtctcggagcaactaggcacaaactgaccccgcccctataggtttgttgtgtaggacgcttgccatatgaccttgggcaaaattttcgatccctcgttttcgacctctttattttcaatacctttttaatttttgtcatcaaatgcgaactatgatgcctgtttcccattccattaaatttctccattgttaatcaaatggtgttttttaaatagaggcataccacaggttatgaacatgcgcccttaactgttgtctattttggtgcagatttaatgcctcacgcgccatatgatgtaaagttgccggcgatatcccttgcctgtaaacagttttatattgaaatgtattagtaatggcaacgacccactcctttttcttcttaatcttaataatacatatataaactataatttggttaaacattgaaatgtaaactaaggaagaattcaaatggccattggaaagatttacgatgagggttttgagaccgacctggaacgcgaagctgttgacgacgctcttggcgaggtcgagtccggtaacgagtacgacaagagcattttgttcgatgttctcaaatggagcgactactcggaactaaacgcgataatgaaccaactcgcagacgaaataatagatgtgcccggcaacaaacaggagaagtacaagcggcatttgaaggtgattttgtgtaacctctatgcggcatataccatcagcccgaagtactatgttgctatctcacttaacaagaataactatgcgccaggatcgagatataatgcacttaaaatagcatatgagccaactagccatattgtgcataagataaagaatgttgatctgatccaattcaaaattggatttcatgatgatcaaggaagtagtagagtttcaaggatgagagctgccggaaaactgcttgaggcatttgctgcatgtaaagacacaatcattgctcgtcatccaaatagagaaacaattattcttaaaaatattgacaaaactttaaagaaatatagagacactgaagacacatttagatacagagataatttagtcaagatcaatgctgccatcgcatcggccagcattacacttgacatgccagatgatgaattccggcagctcaaccaaggctcgctgaaaaaacgcaatatcccgatagacctcaatatgagtcagctctatcgagtcttcaacaatggcagcttcacgcaaggcggccggttctatggcggctggtggcaactcgtaccggaagagcagcgcaagcacattctcatcgatggcgagccgacggtcgagctggactacaaggccctgcacccgaccttgctgtacctcgaacaagcgggccacctgccggatgatgacccgtacgtgcttgagggccaccagggcgacaagttcatgcgcgaggtcggcaagtccatgttgctgatcgcaatcaacgccaaggacagctcccaggggctcagggcgacgcggaggcacttggaagggaagttcggcaaggatgaaggccgaattcatggtctcgatctaggagacgtcattgaacagtacaagatgaagcacaaactcatcagctggtatttttacaccggttacggaacaaagctccagttcaaggactcatggctggcggaacggatcatgctccgactcatcaaagctggaatagtttgcctgggagtacacgacagcttcattgttaagcagcggcatcggcacgaactcttccaggcgatggaggtggtattcgaagcgaaatatcacgcactaccaggaatcgattgagataggcatcatggcaatatatcagggaaaggtagggagaagtcggctacattttctgatccctgcctttttcacctcgaaagagccgatgacctgaaaacctttgtcggcacttgatttgcggttggcagttccattcagccggtttgtacgcttgagatttttgtacaaaaatattgttttgcgttttcgtccgccttgcttttcgctcacaactggcaagaatctccccggccgtatagcctcctccgcttgcgattattcccaactcatggcaccagttctcaaatgaacgatatcaatcgtcttccgatacagaaagttttacaccgtagcgggatgaaaaaaggcggaccggagtccgccttactggtgctcttcagcttgttaacggcttgctgaagacctcgtttctcccttctgctacaaagggataattttcgttatccgaaatttcaccctttagcaagtatgaggtagtcgtgagcacgagtggttaccggttggctttggacatcggaacaaactccatcgggtggtgcatccttgatcttgatgaggtttgttctcccgagacaatccgcgccatgggtgttcgcatctttccggacggacgtgatgcgaaaagccaagcctcattagcggttgatcgacgactggcccggcaaatgcgcagacgaagggacaggtatctccggcggcgtagtcagttaatggatgctctcatcaggcacggtctgatgcccacgacagcagaggaccggaatgaactggaagggctagacccatatgcgcttcgtgccaagggactacaggaagcgctttcactgttcgaactgggaagggttatttttcatctcaaccaacgcaggggttttagaagtaaccgcaagacagataaagggagtgaagccggaaagattaagccggcaattaagcgccttcatgatctcatgtccgaggcaggggtaagcactctaggtgaatacctgtatttgagaaggcagtctggtcatacggtcagatcgcgactagttggccagggaacaaaggcacaatatgagttctacccggatcgctcaatcgtagaggatgaattctttaggctctggaatgctcaagctgcctaccatcccaacttgtcggacagcgcacgagacgaatttcacaaaattatcttttaccaaagaccgttaaagccggtacagccggggcgctgtactcttgagcctaccaaggaacgtgccccgcaagcctttcctgtttctcaatggtttcgcatctaccaggagctgaatcaactgagagtcgtaaccccggaactgcatgaacgtgagttaacattttctgaacgcaacacattggcggcaatactcaaacagggcaaagacctcacctttgagtctttgcgcacccgtcttaagctggctcctggtcacgcatttaatctcgaaggagaaagccgcgacaaattgaagggcgattcaacggcttatctcctagccaagaaagatcacttcggtccagcatggcatgagctttcgccagaaagccagcatgacgttgttgagctgttgctggaagaggaaagcgaagacacattggttgctgcattgatgggcagatggcagctagacgagaaaaatgcacgggctattgcagcactcaatttaccggccggttactcacgattatgcctagaagcgctgtgctccataactaaggaactcgtcaaagacgtcattctctatcatgaagctgtcaagcgtgcaggatatgcatcacattcctggtttgcaactggtgaaattcatgaacgcctcccatattacggccttgtcctgcaacggcacgttggctttggaacgaatcatcccgcagatcgtgccgaggtccgctacggccgtatctccaaccctacagtccacattgcgctcaaccaagtccggcgcgttgtgaatgaactcattaaattacatgggcatcctgctcaaatcgtactggaagttgcccgcgacctcaagaatgggcttatggcccgtcgagaaatcgccaaacgccaagccgaacagaagagagccaatgatcgcagacgggaccagttgaaggagttcggcatccctgtgaccggtgatgccctcatgcgcatgcggttgtgggaagagcttgcagaaaacccggcagcccggtgttgtccatacacgggcgagcacgtctccatgcagcgtctattttcaaacgaggttgaggtggagcatgtccttcctttctcgcgcactcttgacaacagcccgtcaaacaagaccatcagcctgcgcagagcgaacatgtacaaggggaaccgcagtccgttcgaggccttcgggacttccgcagacggcttcgactggtcgggaatagtctcgcgggccgccctgatgtcgtctgcaaagaggtggcgcttcggagaggacgctatgagccgttacgagcgagaaggtgattttctcgaccgtcagctcgtggacactcagtacattgcccgaatcaccagagagtatctgaccgctgtatgcgatccttgcaaggtttgggttacgccgggcagacttacttcgttgctcgcctcccgttggggcttcccgcgcaagaatcgcgatgaccaccggcatcatgcccttgacgcagcccttatcggtgtcacggaccgggccttgctcaagaaagttgccgacaagaattcccgtgagcggtctcaaggagtggataatttcctggcgggttttgaagcgccctggaatggtttccgttcagatgttttggcggcatacggtggtattgtcgtctcccacaagtctgaccatggcctaggtggctgtctgcacaatgaaaccgcatatgggattcttgggccgaacggctcccagggcaatgcacagcattacgtgcccatcggtgcgatcacgactcctgccgatgttctcaaggtcaaaggctttgggcttcgggcgtccattctgtcctcaattgcaggaacgccaattcggaaatgtcgtgacctcctgagccgactagtttcaatgcgggagagggaggctaaagagttcatccgcgcgttcgtcggcttggatggcaaggagtttgcaaaacggcttaatgattacgccacggcccgcggcatgcgccgggtccgcctgaaggaaaccgtaaccctggtggccatcaacaatcgggaaggcaaaccctacaagggtgtgaaaggcgacagtaacgcctactatgccatctaccttgatcccgatggccgctgggtaggggagatagtctcgacactccaggcgaatagcccatcctacagaacaagatgtgacgaattgggttatccagtggtcacacacctttttcggaatgacatgcttgagctgaatgagaatggggtcacgaaggtcgtttatgtggtcagactctcagaaaaacaaatagctcttgcagagcacaatgaagcagacgtggacggccggacacgggataagtctgtcgacttcacgttgatctacaagagcagtccagcatcgttgcagaaatccggagcaaaaatcatatcggtgtcgccaagtggaatgattcactatctggaggtgcccacacatgttgccgcaggccgtggaaatagccggtgacaatagacatctgtgcaaggaacgtggttttctggcgatttacgaacaaaatgagttgttgggaaggctccctatagatgatctctcacttgtgctcgtttgcggttacggggtgacatggagtaacgatttattggcatcgctttctgaacgatgcattcccgttgtgatttgtggaaaaaacatgaatccattgtcaatgctctggtcgctttcggggcatcatcggtcgagtgaaaggatacgcagtcaagcagttgtttcagtccccacacaaaagagactgtggcaatccatcatcaaggcgaagatactgcttcaggcaaagcatgttgcattgaggggtgaaaaatttggtcatctggttgaactcgcatcttcagtacgctccggtgacactgggaatgtcgaagcgatagctgccagtctctattggagattatgttttggcatggacttcaaacgtgatcgcatggggagtggggctaattcactcttgaattatggctacacagttttgcgtgcatgcatggcaagagcaataatgctttcaggattgcatcctgcttttggaattttccatcgtaacgcgcgcaacccgatgcccttggtagatgaccttatggaaccgttccgccccgtggtcgacatggttgtactacacataaagcatcatcttggcgtagaagttaatccggacaccaagcgtattttatcgggtattccttctcttgatatgacagtaaaaggagaattatctactgttggccgatgcattcgggaagcagcggattctttggcagcggtctatttgggccaacaggatgaacttgtcttgcccaaagagttgatacctttgtagcatggaagatacaatgccatttctcagtggatatcgcattatgtggctactggtcatgttcgatttgcccgtgctaacaaagcgagaacgcaaggccgcaacaaattttcgagagcatctgcaaaatttggggttcgagcgatgtcagttctcagtgtaccttcgatgttgctctggaaaagagaaggtcgagttttttgtggggagaatccgtgagcggttgcctgagggtggaaaggtggacatgttgtcctttaccgacaagcagtatgaaaaaataatcagctttcaatctcgcattaggaaacggcggaaaaatccggatcaatacgccctgttctaggtagctggagccggatttttcaagccctaattgagaataaagcaaattatcccagagccatacgggttctgggttgtagcagagagggaaacgaggtcaagccgcaacgcataggtcttgtgcaatcatttaacgcagttgtagcagagagggaaacgaggtcaagccgcaactatgcgctgcgccgtgagatggatgcggccgttgtagcagagagggaaacgaggtcaagccgcaacaagaaggtctcggtggtggacttcaaggcggttgtagcagagagggaaacgaggtcaagccgcaacggccgaatgggcctatcgcctctggtgccggttgtagcagagagggaaacgaggtcaagccgcaacgagatagggcatatcctggaatcgacccaagttgtagcagagagggaaacgaggtcaagccgcaactgcaaggtcccggtagttgtccctggcgtagttgtagcagagagggaaacgaggtcaagccgcaacggtgatgatgacgaagccgagttcggtcgggttgtagcagagagggaaacgaggtcaagccgcaacgaagtcaccgcgtcgtccacgtcctcggccgttgtagcagagagggaaacgaggtcaagccgcaaccggttgtggccacggccgcggcgctctgcggttgtagcagagagggaaacgaggtcaagccgcaacaatacacggccaggatgcgcgaggtccaggttgtagcagagagggaaacgaggtcaagccgcaacgatcatgtagagcgggacgcggaaggggcggttgtagcagagagggaaacgaggtcaagccgcaaccgggaaatgctggaggcgctgcggggcatcgttgtagcagagagggaaacgaggtcaagccgcaacacacccggcagttgtatgccgggtgtagcggttgtagcagagagggaaacgaggtcaagccgcaacgcaaccgacgtggcccatatgatgtgcctcgttgtagcagagagggaaacgaggtcaagccgcaacaggagttgccccaaagccgtgtccgtgtagttgtagcagagagggaaacgaggtcaagccgcaactgagcgatcaagacgtgcgcgatctctggtgttgtagcagagagggaaacgaggtcaagccgcaactcctacctccaggaccgcgccgacgccgaagttgtagcagagagggaaacgaggtcaagccgcaacgcccagcttcagccgctcgatctcctgcgggttgtagcagagagggaaacgaggtcaagccgcaactcgaacgtgctgccggtgatggtccatgtggttgtagcagagagggaaacgaggtcaagccgcaactcacggcgccttgattgcgtccagtggctggttgtagcagagagggaaacgaggtcaagccgcaacacccgcaggtagccactcccggtgacttcggttgtagcagagagggaaacgaggtcaagccgcaacgggggcgggaatgggatggggaacagatgagttgtagcagagagggaaacgaggtcaagccgcaactcgtagtaaatcagggtgcttgtcgctgcggttgtagcagagagggaaacgaggtcaagccgcaacgtgcgcgccggccgctggaaaccggaccgggttgtagcagagagggaaacgaggtcaagccgcaactgacagatgatcatcatcgcacagtcttgccgaccaggactgaaatcgcccttgtgtaccaatgcctgaaattcagaacgacccaactccgacacatggggcaggcttctcgccatggaaatcccgctcgtgcgcatcctccaaaacagccccttgaagagcctctccggccagggtagggtacctctgtcggcatcaaccgggcgtccacaagtggcgtccacagccccgttgaccacctgagatttcctgttatttcgcgggataggaggagggtagagcgcaaaatccccccttccgcaccaaatccttcgaaagggccggaaatcagtaggtttccggccctttcgcattgggccggaggcgggcgtccacaaagagcgcccgtcctcatggctcgggtcatggcttttccgtgcatgcggacgatccgctgcggccaggtgcggggatgctccatgctgccgtctgcgcgcaatcgctagcatccatcggcgcgccacaaccacacagcatgattgcccattctacgttattgtcggtttgactccgattgcatccaggcagccagcatgccaacgcacgaaatatgctcctgatccgcctctgcaacagccatgggccatggcaagtttagactggaaagagtcaagctaacactttattgcaagaaatatgatcaaaaaaaataataaaagaactaaaacaattcgatctttgctatgtaatgcagttgcaatgaatgaaaaatattgtacaaggaaatggggcggcatagccaagcggtaaggcagaggtttgcaaagcctcgactctctggttcgactccagatgccgcctccagccaagacgcgccgacaagcgcggatacctatacaattgctgggcgtgccgcccctcgccggccggagcctgagcgtcagcgggtggccggtcgtgagcagggacaggccagcggcagctgcacggtgaaggcgctgcccctgccagggaccgactccacccagatacggcctgcgtaatgctcgacgatctcgcggcagatggccaggccaaggcccgtgccgctgggcttgcccagggcgtactcgtcggcggcctgctggaacttctcgaagatgcgctgctggctctccggcgggatgccgatgccggtgtcgcgcacctgaatttccaggccggcagttgtggcccgcgcccgaaccgtgacgctgccggcagaagtgaacttcagggcgttgctcaccaagttgatgcagacctgggccagccggtccgggtcgacgacgatgtccggcagggctgcgggcaggtcggtgcgcagctctacttctggcttttcggcaaacaggctgcccatgagcgcaagcgcatcggagagcaccctgagcgggtcggtgggctggtcgttccagtggatgtgcccggactcgatcttggtcaggtccaggaaatcgttcagcaggcgcgtcagacgctcgccttcctggccgatggtctgcaggttggtcaggatacgctcgatccgcggccggtccaccccgcaaccgtccgaggaatcgaggagcttgagcacgtccttcctgatgagcttggcgaagccgatgaccgaggtcatcggcgtgcgcagctcgtgggagatggaggagaggaaggccgacttggcctggtcgagcccgatcagccgccggttgacctcaaggagctgctgggccttgtcggccagttcccgggtccgctcgtccacggtctcttccaggcgtttgttcaaccgggcaagctcctgctccatgagcttgcgctgggtgatgttgttgaacacgccctcgacaccaaggatccgcccctcccggtcatgatagaaatgcgagctggtccggacgaccaccgcctggccgtccttgcggcgcaagatcacctcgtagtcgctgaccttgccctcggccgagagtttctgcaggagcgcccgccggtctgccggtcggatatagaactgcttggcgatgtccacgcccatgatctcctcgaaggaatcgtagccgagaaggttcaggatcgacgggctgcacatgaccagccggccctcggcgtcggagcggtaataggcgtcctgcatgttgtcgatgatgccgcggaaggtttcctcgctttcgcgcagcatcttttcgatctcggaccggcgggaaagctcgagggcctgctgcaggttgtggaaggccaggcgcgagagcaggttggcgatgaggaacagggccgtgctgacctggcggaagcgctcggtgctcatgaccgtgacctcggccagggcggagcggaactcgtcggggtcggcgccgatgtcctggccgtaggcgagcaggcgctcctcgtccaggtcgctgttgcggacctggccgatgagccagttggccaggtggcggtcgccggcgtagaggctggcgccggcatcccacagcccgccgctcaggcagggctgcatgatcggcccgctcgggttcggctggccgatgagggcgtcggagtgcatgcagttcgccagccctttttccgtcttgcggatgaccccgctgcacagccggcagaagttgctcggcctggtcaggggcgcgccgtcgggcgtggtgatgatcgcggccacgccggtggcgtgggcaaaggcatcctggatgcgctggatctcgtccaggtcgaacagatcggcgaaagtcagcgaatcaagggacagctgctcgctccggggcggaggccgcccggatgcaagccgtgattcgagctcattgatgcgttgtctggcgttcaccagctcgcacgcaagatcgtgatgcgctgtgtcgtataccccggccatgcatctccccgccgacgccggcacggaagtgcggcgtctatatttcaaagcatgatcacgagcgaggtgtcaacacggctcagccgatgtgccgacatgcaacttctgcggcaaggacgtcgaaaaacagatgcttgttcggatgatagcagctatttcagcacattagcggagaaagcggattgcatcccggcgcctgcgccgcagatacaatattttgcggtcatacgccggcagcgctggccgtttgttccgttcccaggcaattgtacgggccggcatggtcaagcggtgaggcgctggtgctgtggcgtgcgcggatcaggcggtgcggctcagcagcgggccgcggggcgcctgcccgcgacgatccggcttgcaaccagggacaggccggccgccgccagcaggagaagcccttcgccgggccgggcgagaagccgcacgaagccgatggctgacagaaagaagggcaggaacgcgccgaagaactccagccgagaccagcgccggggcgcagccgtctgcgtatcactgccgggagcaggcgcgcgtcccggttcgagaaccacctcgaagaagtagatgatggtcagggccaggaccaggagggggaggatcacggtcatgggcgactccaagcaatgtaggtgccaaccgctgcaggtgattgatttggctgcattatgtcatcgccgcgcatcttattgtcttcatttttgtctacaatcgaacatttttgtacagatagaccgcaagtatcttggaagatatttatggacaatttccatatgccccattactgaggaccatggcaaggaaatcacctgaataaggtttttggtgacaacaaaacagaaagtcacatctgtcacgtttagattttaaatagtgatcaagttggaaaatgcagtcagtcacgataataaacgaaatggtgatgcacggcagagccttagccgctattcaccaccggcaaaggaggcgacgaacccgatgaccgcagtgcccagcagggttcctggctgccgctcccgcgcggcgcctgaggccgagccgcccaggcgcatctgtccctcacgcgccttctccgtgcccgaggaggtcaaatacctggaaccacatcaggtcgaggccctggcccgggccttccgcgcctggaccgagtccgccgaccggccgggtgtgcgcctgtcgcgccggcgggtgcggctcattttcctcgtcctgcggtccaccggggccaagctcggcgaggtcctggccctcgacgacaccactgatctcgacctggaccggggcaacatctgcttcggcggcggcctggacgacgactccgcgccgcgcatggtgcagctcgccgacgacgtggtggacgagctcagacggttcttcgccacgccggaaagcacggtgctgcgcggcgaggtcttccgcatggacggcggctacatccgcaagaagttctatgaacgggccgcggactgcgacctgcccaaggagatggtcaacccgagcatcctgcgccacacccgggccatcgagatgctgcgcctcggcctgccgctgcccgcggtgcagtacgtgctcggccacaagtacatcaacctgacggcccactacctcaatttcaccaacgacgacatccagtcgctggtaacctactatctgaccaaggaggcgaaaatgaagaccagcgcacgcaacacgttcagcggccaggtgaccgccatccgcaagggcaccattttgtccgaggtggagctgaccacgccgggcaacctgaaaatcgtctcggtcatcaccaacgagagcctggacaacctgggcatcaggcaaggcctgaccatcgtcgctacggtcaaggcgccctgggtcgtcctggtgaaggaggagatgaagcttctgacctcggcccgcaacaagttctgcggcaagatcaccacgatcaacgagggggccatagcagccgaggtggtggtggacctgcccgacggcaccaagatcgtctccctggtcaccgacgagtcggtgaagctcctggacctcaaggtcggcgacacgatctgcgcactgttcaaggccttttcagtcatcctgaacgtggtctagccgaagcgcccgcggcgcccgccctggcccgggcggcgccgcgggcttgccttcgcggcggatttggccaatgatgcacccaacaaggaggcgtcatggtcaccgccatcgtgctcatgaacatcgagcccaagcgcatcaacgacgtggcccaggccctggtggatatcccgggcatctccgaagtctactccgtgggcggccgcttcgacctggtggccatcatcagggtcaaggacaacgacgagctggcccgggtggtcaccgagaagtccctgaagatcgagggcatcacctcgagcgagacgctcatcgccttccgcgccgtgtccagacacgacctcgagcggctgtttgccatcggctccgagtagtagccatggtcatcgtcttcatcgaggccaagcgcgagggacctgacggcgccgaggagaagatgttcaagtacaccttccccgagggcggcaaggaatcggccgcggaacaggccagattgcgcttcgagctggaagaggccggcgccggctggcacctggaggccctggccaccatggagatgtgaagagcgccacgaaaagggtagtgcgaagcccccgttgccctcggcgcaggggagcacttgggcgcctgcgactgtctaatacatcgctattttttttctcgtacatcgaggtgggattttctcacatcaagtggcccaaagatggggacaagtctagagcccaaagatgtcctggagaaacttaatggagaataacaagataagcataaggattgcgagtgatgttgattatgagcatgtagttgctgaattatattattgcgacgaatttgtcgccatgattagtcaagaagaaggattagataatttaaaaatagaatttcattatgaccgcataagtagtgaacaagccatagtgaagatagatttagattactttaaaaaagcaattgattatgctgtcaagaaattaaaagacgaattaactagcgatgcaattcacagcgacccagaaaaacaaagccgcgccggatgatctccggcagggccttacgttccgaacgctttttccctttcacggcctcttcattccaagcagtcgcactccagcgccaccaggtcctcgtaggtctcgcggcggcgggcgaggatggcccggccgccgtccaccagcacctcggccgcgcggcagcgggagttgtactgggagctcatgacgaagccgtaggcgccggcggagtaggccaccagcagctcgccgggctcgacctccggcagggaacggtcccgggccaggaaatcgctcgactcgcagatcgggccgaccacgtccacttcgatgacctcgcggccctggggcacgacctcgccgatgcggtggaacgagccgtagagcgcgggccgtactaggtcgttcatggccgcgtccacgatgacgaagctcttgctcggggtcttcttggtgtagaccaccttgaagaccaggatgccggcgttgcccacgatgacccggccgggctcgaggatgaccgtaagcggcaggcccttcagacgccgggtgagcgcctcgccgaactcgctcgggtggggcggttcttcctcgttgtaggtgatgcccaggcccccgcccaggtcgaggtagcggatgttcaggcccatgtgcttcagctcctcgtagaagtcgaggatcttgtccagggcctccaggaagggctcgatggtcgtcagctgggagccgatgtggcagtccatgcccacgggctcgatggccggcaggtcccgggccagggcgtaggcttccttggactggcgcagatccaggccgaacttgttcttcttcatcccggtggagatgtagggatgggtcttggggtccacgtcggggttgatgcgcaacgagaccttggccaccacgcccgtgtcgtcggcgatccggctgatggccgcgagctcggccatggactcgacgttgaacatgaggatgccggcggacagggcctggcgaatctcctcgggccgcttgcccacgccggagtagacgattttttccgccggtatgccggcggccagggcgcggtagagctcgccgccggagacgatgtccatgcccgcgccgagcgagcccaggagtttgagcacacagag

SEQ ID NO: 1679 - DNA, 14570 bp, synthetic construct
  misc_feature 1..14570: note = Synthetic
  source 1..14570: mol_type = other DNA
tcgacccgccccttgtgagcggccagaaccgactgcacaacctttcccatgtccttcatggtgctggcggcaagttcggccacggcggcgttgacggcggcggcaagctcgtcgtcggtcaggggagcggggaggtaggcagacaagacacccagctcccgctcctctttttcgaccagatcagcccggttcgccttggcgaacaaatcgatggactcccgacgctgcttgacctgcttggccatgacgctaaaaaactcgtcatcggtcaaaggacggcgaagctcaacctgaagcatttttgcggcggccttaagcatacgcaaaacgcccagggtgagggcatccctggctttcatggcggccaggtaatcggattcgatacgggcttgtagattcattacatcatgttgattttgcgcattttcttcagcaaccgtttgcgggcggcagcctttttcttcttgcgcatgacgctgggtttctcaaagtgctgacgtttcttcagctcggagagaatcccggatttttcgacctgcttcttgaagcggcgaagggccacatcgaagttgtcggattcgtcaagatagacaccgggcatttacatcaccccctctttggaaaattccctagcggcaaagacgaggcatttacccgagccaagcctctgtgtcaagcaacagtctcgggagctgcaaaaaaaccgcccggcctgagccgggcggcggcaaatttccgtaatcaggcaacggcttagtgatgaccgtgggccggggcgttcttggtgtccaagtaggccttgtaaatgcaatagcccatgccggaggcaatgatgaaaagcaccagatacagcacgctgaaaaacacaaaatggtcaggctgccaccaggggagatcctgcggcagagggctgtggacggtttcaccgtgtaacatggaaacttctcccgagattggttattggatagcgtccttaagcaacttgcccggccgaaatttgaccactttggaagccgggatgttgatctcggcgccggtgcgggggttgcggccggtgcgggccttgcgctcatccaccataaaggtgccaaaccccgtcagcgtgattttgccttcgccaaccagcgtctcttcaatggcctcgataaaggcattgagcgcgcgctcggcattggctttggtcagcccggtcttttcggcaatttttcctaccagatcagccttggtcatcagtcctctcctcctctgttaatcgcccccgaccctgcggcggcgcaatgctcccgaaccgctccggcgcatctctccataagcgtcaacagggacgccccccctcgcctccccgcggcgaggacggccctcctgcccctggtgcgctgccacagccggcagaacgcgatgcgcacgagtgggcaaaccaaaatcgatttcaggcgcaaagtcaagagggctggcgcgttttgagcaatttgcccagggcgcagaactgctttggcgacaaaacttcgggccggtcccgggcctcaatgccaaggtcggcacaggaccgggccagcgcgtctgtccagaagggctttaaaataccggccaactgttttcggcgtaaggaaaaaagctttttgagcagggcggaaagcgaggccgggtcgtccgggcgctctttggccggcagcggcgtgatggccaccaccgccgaatccaccctgggctggggccgaaagacggtcggcggcaccttgaagcagtattccagccgggcgaaggccgacgtccaggccgtcagcgccccgtactgccgtccgcccggggcggcgcacagccgcagcgcaacctcgtgctgcaccataaagacgccccgcccaaacagcgccgatccggcgcagatgtcccagagcagcggcgaggcaatgttgtagggaagattgccgatgagcttgactccgggtagccggtcgagccggctccagtccaggcgcaaggcatcgaccagggccggatgcgccccgggatgggccagcggcagacgcgccgccagctcccgatctttttccagggccagataggcccgggggccggcggccagaatatggccggacagcgccccccggcccggcccgatctcgatgaccgtgtcggtggccgtgatgcccaggcgggacacgatcttggctgcaatattgggatcgaccagaaaattctgcccgaggctgcgtttggccggggcataggcctcgccagcccggccctcggacgcgtgggcgcgttgccggctcgtcatagagactccttttcaacttccagcaaatcctgtttgagcgcccacagcacatgccatgttgcggcctggctgttcaggccgggtacggcggcggccaaccgtttggccaaagtgaggcccggacagccgccccgggccagaaacaccaacacccgcaggacgtcgggccggatctccccgtcaagttcctggtagatcacgggaaaatcctgccggtgatagaccgcctgcccggccctggtccaggccagacagaccgcgtcggtcagacacgccccgggatagccggcaaacacctcgccgtaggccagggccagggggtggcgcacccgggccagttgctcccgatcggccaccggctcgcggccaaggcgctcccacagctcgagatggcggcggatgcaggcgtcccaggtcaattcgccaactgcccgttcccgcccggcctgccccatggcccgccccagcccggggtcccggatcagggcggccagggcctcggccagggccgggacgctgacggccagggactgggccaggcgcagatgggtgtggttgtcatagcaaaggggggccagcacgtcgcgcagaccggtctccggcggccccagggtgggcagcagcaggcccgtgcggccctcctccacgatgtcgcggtagccgtcgtaatccgaggccacaaccggcagcgcggcagccatggcttcgagcagggtcaggccgaacgtctcctgggggttgtcggccagggacacgaacacgtcggccaatccgaacaggcggcgcttggcggcctcgtccggacgccggaccagggccaggggcagcccgatattggcggccagattggccagggtaaccagaaactggtccttgtcgtcgtcgctgtcggtccagccggcaacgacgagggcgaggcgcgacacgtcgatgccggcggcaatcagccgctgcacggcccgaaaaagcggcagcaggtccatcttggagctgtgggaaatacgcccgaaaacgagcagcaccgtggcctcggcagcaatgccatagccggccctggccgtgctcctggcctccccttccaggcgcgaccaatcgccgggatcaacacctaaagggatgtgggccagttcgggagcgggataggactcgggcgaaaggccgtagccccggcgcaggctggcaaagatcgcggccacggcctcccggccggccgtggaagtggcgacaatggcatcgcgccgggtggtgccgggccagagatgggccagaaaatcccgctggaacacagcgttactgagcgaatgggtggtgccggtaatgggaaagagcgagcgggccagggcgtttcgagcggcggccagccgggcctgggccgttatgcagtcggagaggtgaaaaacggcgtaatcggtgtcggccagggcttgcggcaggtcctggcgcgtcagaactttgaacgcgccccgcccggccacctggggatagcgcccggccaggagcgcttcctgcctggtgcgttcacgcttggacggcatgaaaaaatggtaggcgtcaaacgggtcggcccgcatcagggcatccagaaaggccgcattggccacctttcggcccatgatgtcgctggattcgatgaacggatcaagggtgccaaaaattcgttgcgtgtgcatccggtgacggagccacacccgtggccggttgtcaaatggcttgatttatttgctatggcctcccttttgcatgggcggctttcgataggaatcttcttcctgtccatgacccaaggaggcttgtcatgacgcgcggattgcgacccgaacaggtatggggcatcggccttgccgacgacgccgggacagctatttccacggccctgggcacaggctatgttctgcgcaactggcctatcggttcccatcccaccgagcgcgacatcgcccgggccacgccccttgtcattttcgtggtcaaggaaggctgggacgccctgccgccggacacccgcaagggcatcgaggagtgggagattccccagcgcgtcctggttcttggtgcgtcgcagtcggtggccgatttcgaggaagtgctggacaacggatttctctctgccatttccgagccgctgaccgacaagaaagtgcgcgacgtcatcttccgggccaaggaagtcaagagcctgtacgacgacattttccgcatgacccgcgagatcatgctcgaacgggaactgctcgcccgaaagaccgatctggtgctgtttttaaaccgcgtcctgagccgggccagcgaatcgctggatcccaccgtcatcctggacaacgcccgggaagacctgcaactgctgctccccctgcacggcctcatgggcgcgttctggcagaccggcgataccgggaatctggaagcggaactgttcctcgagccggatatggaacagcccgccgagcagcactggaccgaacaactcctgcgtcaggcggcaaaaatcgccggcaaccccatccacagctacaagaccagcattctggacggctcgccggaccagcccccggtcggcatcccgggcgctcccgaggatctcatcaccctgccccttcgggccggcggccagatgttcggcctgctcgtcctgtaccgggccaagggacggccgctgggcaaggatcaggtccaggcgctttacgcctccatcaaccacctggccctggccctcaaaaatgccgccctgttcagccaggtcaagatccgggccgaccacgacggcctgacccgcatccacaaccgtcgggcctttgacgaacggctcatcgacgaactgcgccgccatcaacgctaccaccaccccatgagcctgctcatgattgatatcgaccatttcaagggcataaacgaccgctacggccatctggtcggcgaccatgtgctgcgcgaggttggacgcatcctgtccgacaccctgcgcagcacggatttcacggcccgctacggcggcgaggaattcgtggtcatcctgccccagaccattgaggagcactcccgcatcctggccgaacgcctgcgcagccttatagccgaggcccagttcatccatgacggcgagacctttgccattaccgtgtccatcggtgtggccaccatacagcccggggcgctgaccaagcgcaaggatctgctggaaaaggcggacaaggctttgtaccaggccaagcatctgggtcgcaatcaggtctgcacggccctggggcgtatctcccgcaccgaagacattacgctggaagcggtgcgggccggctgacgcccagggcgattgtccgggtaaattccactgccggcgcaagttattgttgacagcgacaatgcctgggcgtaagagcagctttcttcgggcaattagctcagttggatagagcgttggcctccggagccaaaggccgtaggttcgaatcctacattgcccaccaagcgaattcaaagggttacggttaacgccgtagcccttttttcgttggcggataagtttcggataagttttatccccgaaactctcagcacgggttatccccgacgcatggccggcaagtacatcaagacccgctttcggggcgtctactaccgcgaaagccccacccgaaagtgctcctacggggctgaccggtgctatgtcgtgtggcacaaggacgccgccggcaaggcgcactggcacacggtcggctggcactccgacggcatccggcccgcctacgccgacgagatccgcaagcagctcatgaccagcgctgcccccagttcggccgccgttcccgtccaggaaacaacgccgcccgcaacctacaccgttggcgacgcggtcgcccgctacctcggctgggccgtgggcgagggcaaacacgtggccccggagcaggcccggtacgacaagcacctcaaggcgcggctggacgcggttcccctggacagcgtcaatctgcaaatgctctgggacatcaaggccgccctgcgcaccaccatggccccacagacggtgcgccactgcttcagcctgctgcgtcggtcggtcaaccacaccctggagatcgaggcctggaaaggcgacaacccgttcgccatcaagcggcacagctcgtttaagctgcctcgggccgacaaccaggccacccgctacctgacccggcacgaggcgcgggcgctgcttgcggcgctgcggccgcgctcccagcaggtccacgacatggccgcgctctcgctgcggaccggcctgcgcgccaccgaaatatttggcatccacacccaggatctcgacctggacggccatgtcatccacatccgggccaagggcggtgatgcccagtccgtgccagccccggccgatctcatgcagatcctggccggctaccaacgccagccccacgaaaccgtgttccaggatgacgccggcggccccatcacctggggcatcagctacaccttcgaccgcgtggtcaatgagctgaagctcaacgacggcgtcacggacaagcgccgtcgtgtccggttccacaccctgcgccacacctttgccagctggctggcccaatccggtcaggtcaccctgcaggagctgatggagatgatgcgccacaagcgcatcgaaatgacgcttcgctatgcccacctgatcccgggcggcggccgtcgaaaactgaccatcattgatcaggcgctgttggaccctgaccatgacgactagctccgccctgtggtcacgatcacgttggcccgcaaaaacgcctcgacatcctcgcgcagatacaacacccgcttgcccggtttgacataggccggccccttggccgctgaacgccaatcctcaagggtgcgcgccggaataccgtactccgcctccacatcatcaggagtaagcgaccgcttgaccggcagcgccgggatcggggcctcctcgccgcgcgggtcacggatgtcgatacgcacgtccaggccttgccccagctccccggctactgccgccagcaactcgcgcactgcctgtgagcgtcggccctgcccgagttcatagaccatacgccggccgccggcctcgaacagcaccccgttggccacgggctcaatagtaatgatcgcctcactcacagcacacctcccattgccttcagttcccgggccagccgccagccctgctccaggctgccgatcaggcacaccagccggtgcagcagcacccccaggagataatcgtccttaaggaccagcgtgctcggcagccggcactcgagcagctcgaatgcgctggcggcatagcggtcggcgtccaggccggccatgcgcagatcgtgctcaattttggccacgcggacggtttcggcgtcagcgtccatggctacgcccccaccagctgcagcagggccatgatggcggtcacggcctcatgcccctcgcgcatgatccgcgaccgctcgtcagcctccaggctgccgctggcaaggccctcgccgcaggcggcaatcagctcgccaaattccttgaccgcgatcatgcactggcgctgcaccggatcggccgtccccaccacgggcggcaactggatgtagaccccgcccagttcacgggccaggaaatgcatgggcgcatccgagccggtcgcatccatgatcggcaaaagccgatccgcgccgcacttgtgcccgggctggccggacagctccgacatcatggtggcgtagcgccagcccagcatgtcggcgatggtcatggcgccgatgcccgaaggggcgcgcatcacgagacgatgcaggatcggtgtgagttgcggatattcgtggcgggccatgcgattactccggttgattttgcgtggcagagagtgtgctgacgcgatagcctgcaaatatcagaggccctatgcggcctgggaggccgcccgaggcttgggtccgggcttcatgggggcacgaggctcgggcagtagttcggacgggatgccgtaggcaatcaggcgctcaatgtgcccctggggggcgcggtggtcggcgaaaatcgcgtggacgacggtccggcagatacccgtatcctgggcaacgctgcgaaccgtcttgcgatgcagggccagccaggaccgcaagcggtcttgacgggtgggggaattgttgcgactaatggcagcggtaaccatatcaattaccctcatttttcgtcacgcaaggcgttaatgggtgctcgcgcggcttgatctagggctaggacgttgtgccaattacggtgacaatgtccatgaatttggcgattaggctatttataggatttttgtcaatcaaaatgacagaagacgtcaaaaatatttgcagcacccttatccggaagctgattgcagcccacggaatgaaggactccgaattcgcaaaattgttgggcctcgcccgacaaaccatctccaattacacgacaggcaagagcgaacctaactggtctgtattaaacgacattgtcggaaaactcggggtcaatcccatctggctgctcaccgggaacggcgaaatgctcggcagcgacagcgcaccaagcccaaacctcccagccgaggaactcaacgaaaagctgaccccggcccaacgcgagatgctcacctacaagcgcacgatgcaggagctgggcgctccccctgaaagaatcctcgacggcatcgaagccatcgccatgggcaagacgcgtcagcccaaaagcgccacctatgccactgccgagcctccagccgatcctggatatcatcacatccatgagcccggatctgatttcgggtcagacatctaagccaccgattcaataggagcggacaatgacctcctccaacgcccttgacgcccacggccagcccatgaatcgcgcattcaatgccaaacgactccaggatcgcggcgctgacgaactgattggtatctgtcggggtctgattgcggacggtgatgtcaatgaggcggaaacgcgatatttgcttgagtggcttgagaccaatagcagcgtggcaacccagtggccggggaatgtcatctatgcccgggcctacgaatttctgcgagacggccatctcgacaagaacgaacgggtggaactcctcgaactgctctccaaggtctcggggcacatcagcggggcaagtggtgtccaggcatcaacggcgctccccttcgaccagccccggccccaaatcttatttgaggaaaaggtctttgtcctgaccggccgatttgcttatggcagccgccgagaatgcacagacgctattcacgatctcggaggttgggtccgaccgaatgtgcttaaggacaccgatttcgttgttgtcggtaccctggccagtccggactgggcccatacgtcctatgggcgcaagattgaatcggcgctcaattggaaggcaaagggcgagtccattaaaatcgtctccgaggaccactgggcagaaacattaactttctagactataaatcgaaccacccaacgcaccaaagagattctctaaacgggcagtttccctcgctgcctacaaaacccaagtctcaccaagtcacagccgtcgccgaaaaaaacgtattggccctacaaataaaaaaaggcggaccgaagtccgccttgctggtgctcttcagcttgttaacgacctactgaagaccccgttttcccttctgctacaaagggtatggggaaaatgccaaacaaacaggagcaagtcaagtgtccagcgaacatatcccgtatcgcctctccctggatctcggcacaaattctatcggttggtgcatgctcaaactgctccccgaaggcaatccgggagaagtcatcaatatgggggttcgcattttttctgatggccgagacgccaaaagcggcaagtcgcttgctgaggacaggcggttggctcggcaggcacggaggcggcgcgatcgttttctcaagcgacgcaaggaactgctcaaggcgctaatcggcagtggactcatgccccctgacgagcgccagcgaaagcagcttgcagcgctcgatccatatctgttgcgcaccaaagcgctggatgcccggcttgaaccctttgaacttgggcgcgccctcttccacctcaaccagcggcgcggattcaaaagcaatcggaagacggataaggatcaggaatcaggaaagataaaggccgccattgccagattgacggcaacccttcaggagtccggaacaagaacgctcggggagtatctgcacaactgccgccaggccggccggccaatccgctttcgccccatcaagaagggggccggagtggactacgccctctacccccaacggtctctggcagaagccgaatttgacgccattatcgccgcgcagcgcccctatcacccgcaacttgatgcaggtgtagaagggaaaggagggctgcgtgacatcattttctatcagcgcccccttaaaccagtagatccggggctctgcaccttgatgcctttgcaccccagagcgcctctagcccttccaaccgcccagcggtttcgtattcttcaggacctcaaccatctgcgcgttctcgacacgggcaacctggccgaacgactcctgaccctggatgaacgcaacaccctgctggtcatcctcgaaaccggcaaggatctgagtttcgacgcaatccgggtcaagcttggactccctcccagcgtcaccttcaacctggatacaggcaccaaggacggcatcaagggtgacgtatcggccaaaatcctttccgggaaaaaactattcggcaaggcctgggccagtttttctcgtgagattcgagaggatgtggtggagcggctcatcaaagcggaagatgaggaagaactcgtcgccgaactcgtttcaggctgtagcatcgacccagccaaggcagccgcagtggcccaggcctcgctgccaagcggctacgcccgtttttgccgggaaaccctggccgctttatgcgaacagcttgaaagggacgtgatcccctacagcgaagcggttgtccgcgcggggttcaagtcgcactctgacctttccaccggcgaagtgtttgaacggctgccctattacggcatcgccctgcctcgaagcatcaagcccggctccggcaagcacactgacccgcaagaggtgcgccttgggcggatctccaacccaaccgttcatatcgccctcaaccagttgcgcaaggtcgtcaacgagttgataaaggaccatggcaagcctgcccagataatcgtggaagtggcccgagaccttaaaaacggtccggccgccatgcaggagatccgcaagcgccagaaggagggaaaagacgccaacgacagacgtcgcacccggcttgtggaatgcggagtcaaggtcacggccgatgccttgctgcgtctcaggctatgggaagacctgggccgcgacgagacggtccggcgttgcccgtacacgggggatgtaatcggactggccatgctgttgtccgacgaagtggagatcgaccacattctccccttcagccgcagcctcgacgacagcccgaccaacaagaccgtttgcctgcgacgggccaaccgttacaaactcaaccgtactcctgccgaggccttcggcgactcccgggacggctactcctgggaaggtgttatggagcgcgcggcccggttgtcggagaacaagtgctggagattcgctcccgacgccatggagcggctggagcgtgaagcagactttctggacagacagttggttgatacccagtacatcggccgcattgccggcgaatatctggcctgcatctgcgacaaacggagaatatgggtgactcccggacgtctgacgcgtcttctggcccatgcttgggggttcccgaaaaaaaatcgcaacgatcaccgccaccacgcccttgatgcggtcttgatcggggtctgcgaccgcagcctgctcaagaaggtggccgaccacaacgcgcgagaggttgccaatggcctggatcgtttcctggccgatctcgaacagccatggcctggtttccgggatgaagcccttgccgctcatgaccggatcattgtttcccatcgccccgaccacggcctggggggacgtttgcacaacgatacggcatacggcatcttaaacctcaccccgaaggctcgaaacaacgcacagcaccgagtgtcggcggagactctttcaaaaccgagagatctcctcaagataaaagggcgcggcctcagggcccgtctcatcgcagcctgcaacggcatgccgctcgcacaatgtctgtccctggcccaggaatgcgaagggatggctgaaagcaaagcagaagcacagcttgtcaaagccttaggcgatctgtccgaaaaacagttcaaggaaaaagtgcatcaatttttcaaaaaaaatggaattcgacgtcttcgacttgtcgaaacaatcagactaactcctattcataatgcagaaggaactgcatacaaaggattcaagactgactcaaatgcatactatccgatctacctccacaaagatgggtcatggcatggcacaatcatatcaactttcgaggcaaataaccaagaaacagcaaacacatccgaaacagatccacttattacaaagttattcaacggcgatatgattgaaataaacaacaattcaaaaaggatcattgctcacattgtaaaacaatccgcccaaaaaatagtggtcgccgagcattttgaagcaaatctatcaaagcgcagcaaatcaaatgaatttaaatacatatgcataacaagtccagaatcgcttcgtaaatgccaggccaaacctttgtacgtcagtccgacaggaaaagtgacctacatgaggatcatgcgccatgcagaccctggagatcgccggctctaaccgccacttggctaaggaacgtggtttcattaccgtccgctcgggcaacgaggcactcggcagaatccccttggatgatttggcctgcgtgctcgtctcgggccacggagtaacgtattccaacgatctcctggcggcgcttgccgaacgcgccgtcccggtcgtgctctgcggcagcaacatgcagccgctctccgtactctggccgctcagcagccaccatctgagcggccagcgcattaaggcccaggccgaggccggactgccattgcgcaaacgtctctggcaatccctcgtccaggtaaaaatcctgctccaggccagcaacgctgaactgcatgaggcaaagggcgggcacctgcgcgcccttgccaaatccgttaaatcaggcgatcccgacaacgtcgaagccgaagccgcccgactgtatttcaagacctgcttcggtccggacttcagacgggaccgtgacgctccaggcatcaatgcccaactcaactacggctataccgtcctccgtgctgccactgcccgggctgtcatgctcgcgggcctgcaccctgccttcggcttgcatcactgcaatgcccgcaattccatgcccctcgttgatgatctcatggaaccttttcggcccgtcgtggatatgctggcgttgcgccttcagcggagtgaaatcgagtctgtggacaagaaagccaagtgcttgctgagcgccctgcctaacgtcgacatgcccctgcgcaaaaagaccgggaccgtttcaagctgccttgcagccctggcttcttccctggccgacgtcctcatgggggagcgaaggcaactcctgctgccgtctgcattgatcccgctcggagatacccctccaccgccatggccatcctgagcaggtaccgcatcttgtggatgatcgttatgttcgacctgccggtccttaccaaaaaggaacggaaagaagcgaacgcatttcgcaagcgcttgcaaaaccaagggttcgagcgctgtcagttctcaatctatatgcgttggtgcccaggcaaggaagtcgcggaacgccacgtaaagcaaatcaaggggtttctgcctgaaggaggcaaggtggatatcgtgacgataaccgacaagcaatacgaaaggatcatcacctttgtctcgagtcggcgcgcttcgaagaagaaacgagatcagtacacccttttttaatcgcgccacggccgtttttcccaaccttccacagagaaatagcctgctatttcagcaggctatttccgtatgaagcgtagcagaagggaaaacggggtcaagtcgcaacgctccaccgccacgccgtggtcctcgatctagcgtagcagaagggaaaacggggtcaagtcgcaactgcgcc

SEQ ID NO: 1680 - DNA, 23786 bp, synthetic construct
  source 1..23786: mol_type = other DNA
  misc_feature 1..23786: note = Synthetic
caggatggtatgccgacattccggaagatggggaatacgcggtgtatgtaagctataagactcttcctaattccacccgcgacgcgcgttataccgtcaactattccggaggcacaaaggaatttatagtaaatcagcagatgggaggaggcacatggatatatttaggcaccttcccgcttgagaaaggctacagcgattcagagcctgttgtcaccttgaccaacctctcctcaaccgacgggaatgtagtgacagctgacgcagtcaaaataggaggcggtatgggtaatatcgcccgaagcaacaatcgttcggatgtctatttcgatccctctactcccgagaatgatctctccgaatatgacgaggaggatgaggaagatgtgattgaggaggatgaggatggagatgacagtggggatatagatgcccctccggcaggaacccgtgagtattccgctgccaatcgtccggtagaggttgctaccccgacaacaagccgaacagcaccgaaattctccacctccggtatgccccgctgggtggagggtgcccgctactggctccattgggcaggtttcccggagtctgtatattccccctatcatggcagggatgactataaggatgactataccgaccgcggaatgtgggtgaattacctcgccggagggtcgcgtgtccttcctgatgaggagggtctcaatctccctatcgatctctctttcgcgctccattcagatgcgggcataagaaaagatgacagctttgtaggcacattaggtatttattacactaatggcggtcgttcatatgaggatggtactccgaggatgaattcccgtattctgaccgatcttatcatgagacagatcactaatgatatccgccagacatacgaacctaactggacacgccgctccatgtgggataagtcttatctcgaggcgcgcgtggcggaagtgccgaccactcttatcgagctgatgagccatcagaacttcgccgatatgatgtatggtctcgaccccaacttccgcttctctgtcggccgctccatatataagggtatggctcgtttccttgctgagcgtaaaggtcgggaggtggtgatccagcctcttcccgtgcagggattcgctatcaagaaaaccggacgcaacagttatcgcctgaattgggcacccacacccgatcctcttgagaagaccgcgatgcccgacaagtatatcatccttgagcgtaatgagggggatctcggtttccataagattgctgagacaagctccactcattttgaccttaaagtcactgacagggatattcacagctataaagtgattgctgccaatgccggtggcttgtcattcccctccgaggtgctggcgctctgcgaaggcacaaaggatgagaagccggttttgattgtcaacggctttacccgtgtgagcggtccggctcaggtgcgcgacagctcgcgtgcgggcttcaaagctgatgaagatttcggcgtaccttatatcaaagacatatccttcaccggctatcagcaggaattcaaccgcagcgcaggcgaccgtcacggtgccagcggaagccagtatgctacccgcgtaattgccggtaatacttttgattatccagccgttcatggtgaggctatcgccagaaacggatatggttttgtctcttgctcagctatggcggtagagaaaggagaggttaaattaaccgactatgagaacgtcgatcttatcttgggtaagcagaagaccaccgttgtgggcaacggtaagagcggcgtcaattatcaggcgttccccgaggcgctgcaacatgcagtgaagaattatcttgataagggaggcaatctgattgtgagcggcgcgtatgcggtttccgacctttttgatcgccgttccgaccgtaaggaccaggaatttgcggagaaagtgttaggcttcctcactcttgccgagcaggagaaacgtaacaatgagcaggctctccgacgccgtctggaggagatgagaaataatgaggagaacgcagaggtcgagactgctcccgatggtcatatctatgcttccgacaggattgccgccgagcgtaatgctcagaatgtctcagctcccctctcgaatgtccgccgcccggacggaagaatctccactacttcaggcagacgctttgactattcaaatactctgaatgataagatctatattgtagaaaatcctgatatccttgttcccgtagaaggctcttcggcggagaaaatcatgaccttctcagccaatgatctcggagccggatataaagtgaaacgccataaaggggaactgaccattatgtccgtgcctatcgaggcgataaatgatcaggcggagcgtgtggcgctttttaaggattttcttaaataacagccaatccgttatttataataattggcagttgcttaaacagtgaaagataattatgaacatcataagattcaaaaatgtaaatgccctgagagaggaaatcttccgctcccctctcgagcaatatgtactcgtacagcttgatgaccgtcccatcaatcttgaccccatctacatcaaccgcgtggtcgacaccgcctccgagattgactccacgctgacctattgctggttcagggaaaggcaggcggatggctctctgcttgaccatccggtaaatgactatcagcccggctccttgcgcgatgatttcgatttcggaccattggtgcttcttaattccgccgatgtcctttccgctacagaatcttttaccgataaggagtcggcgatgctcgacggaggatggtatgccctccggctccgtatgacgatcggaaagatgatatgcatgattccggagtatctatacactgttgagaggcgggattatcgcaagagcggcgagaaacagcatgattatgtcgatccccgcaaccgtgcctatcagatcgagatggaacaggtccttacaaatcatctaggcatgatcggcggcttgtggagcggcaacactgagaaggtggattatgactcggagcaatttccggtcgaggcttctgtcatcatccctgtgcgcaatagagcgcgcactattcttgacgctgtaaattcagcgctctctcaagagaccaacttccccttcaatgtcatagtggtggataatgattctaccgacggcacccgtgaggctctgcactcagtgggggatgaccgtctgaagattatagaggtcagggatgaggagaaattagggataggcggatgctggaacagggcgcttctctcggagcattgcggacggtttgccatacaacttgactctgatgatatctataattctccatcggtattgcaggcaattgtaaataaattccgctcgggcaattatggaatggtgataggcagctacgccatgatagatttcgagggtaatccgctgccgccgggagtgatagcgcatacggaatggactgacgataatggacccaacaatgcactccgtataaacggcttaggggcgccacgtgcttttttcaccccgattgcacgccgtatcctcttccccaatgtgagctatggagaggattatgccatggctttgcgtataagccgcgaatatggaataggtcgtatcttccgtcccctttatctctgccgtcgttgggaggggaattccgatgctgccttgtccattgagaaagttaatgccaataatgcatataaggattgtctccgctccatagaattgatggctcgcgtgaaggcatcttttgatgaggcgacacgcaacggtaacaacccctttaatcccgcctcactgtttgacagcaatctcctccccccctttatcgggggagacgacgatatttctatcgaaggttttgatgacgatgaggatgatgacgactgaagatatcaataatcttgtggagcatcaattggactgctggactcttgcccgcaataattttgatgccctccgcgccgtaggtcgccgtccgctcaaatcaggcgatctgactctctatgcccagcataatcccgcccgcgctgtcagcacaggggcaaagactgatgcggcttccattaaggcgcgtccctgcttcctctgcaaagccaaccgtccggaggagcaaatggatggcgaatggatgccgggctgggaactccttgtcaatcccttccctatactccctattcatttcacgattgttgataccgcacatcgaccgcaggatgagattcctcttgaaatggcagctatggcggaggcggcgcccgatttagctattttctttaacggcgcccgagccggagcctccgcgcctgatcatcgccattgtcaggcggtgctcaaatccgaactcccgctattgcggcttgctgaaaaagcgcatactcacgatatggcggatatcgtctcctctgaatctttcggtctggatctccccttccatttctacagcgctattatccgccctgatgagatagggatggctaatctctatcggatgactaaaatcaagggagtggacgccaatacaggctgccctgatgccggactggtcaatgcctttttctggattgacgcgagcggctatctccgtataatagttattccacgacgtgctcatcgtccctcatgctattatgccgagggagacagacacttcatggtctctcccggagcgctggatatggcgggactcctgattcttcctgccaaagaggattatgaaaggatggatgccgataaggcaagggagatatatgcggaggtggcatttgctgataaactcccttgatactctttttccgactccatgaatgagtctttaccaagcgtgtaatcatgaaacattctacttcaaccgacattaataaaaggtctccgtggttttggattcctactctctatattgctgagggtctcccctatttcgcagtcaatacgcttactgtactgatgtatgtaaatatgggtatctcccttaccgagatggcattctttaccggttggctctatctcccctgggtgatcaagcctttttggagtcctttcattgaccttttcaagaccaaacggggatggaccatagcgatggaagctatactgtgcatggctatggcggcagtgggttttctacttcctttctcttttttcttcactgcaactctggtttgcttctggataatggctttcgcttcggctactcatgacatcgctgccgacggctactatatgcttgagctctccgatcatgaacaggcggcttacgtcggtgtgcgctccactttctatcgtattgcgagtgtgctgggtcagggaggactggtaatgttggcgggtatacttgaggagagcaccggggtagtctctacggcatggagtatcgtcttcatacttctttcccttctcttccttttcttcaccctctatcatatccgtttcatgccccgtgccgcttccgacatgccaatggcgggtgtgactccgcgctcgatcctttctgatttcggaaaaacttttgtcactttctttcagaaacccggcatcatctccgctctccttttcatgctcctttaccgctttccggaggctttctgcgtaaaactggtgcagcctttccttgtgtcgcctgcagaagcgggaggcttagggttatccactaaggaggtgggatttgtgaatggcacggtcggagtgatcgctctcctattgggtggaatattgggaggtatcgctatttcacgcggcggtttgaaaaaatggctatggcccatggctctatccctcacactcccctgcgcggtatattgctatctatcgatgtgtcagcccgataacttctttgtaatctgcagtgcgatagcctttgagcaattcggatatggcttcggattcaccgccttcatgctctatcttatctatttctcccaaggggagaataaaacttcccattatgccttctgtactgccttcatggctttgggaatgatgctgccgggaatggcagccggtaagatacatgaatggctttcgcaacttaatatcttcggaggcgcgggcgagcagggttatataaatttcttctggtttgtgatgctttgctgcattgtgactttcgcggtgtgcatgaatgtcaggattgaccctacattcggaaaggcggcaaaaaatactacatcaaagaactgacctgtttgccggataaaaagggagaatctattgccggataagagggagttttataactttgcataagtgaaacggatttcttcatattttcatctttttctgctgttgccggcatttttaatgttggcagcctgttcctctacccgccatcttccggaagggtctctgctccttgacaaagtgaagatacatgtaaatgacacgacggggacgctggatgaaacggagatgatgacctacgtccgtaatcgtgagaacaaccgtatgttatggagtgcgaagctcaggctcgggatctataacatgagcggcaaggattcgacaaaatggtggaaccgctggattagaaagatgggtgagcccccggtgatcttcagcgaggcgaataccctttcagacgccgagcagctgcgcaaggcgatggttaacgcaggttttctgaaagctgacgtaactattgacacctctctcaacgcaaagaaaaggaagatgagggtggattatactcttaatgccggagagccatacgttatcagaagtatcgagtatgttttccctaacgatactctgcggagagtggcgatgggcgacagttcgagacttatagtacgtcccggagatttccttgaccgtagcgaattggaaatggagcgtgaaaccatcacaacacgcctgcgtaatcatggctattacgccttcgccaaggaatatataacattcaatgctgatacaacggagggaagtcgggaggtagacctcactctcacccttaaccctgccttggaaatgaatacctccgcccccttagtagattcccataaggaatatattatccgcaacgtaatatatattatggattattctccgggagtgactgaggatatagagcattatgaggctaccgacacggtgaagtataaggatattactattttatacggaaagaaacattatcttcgccccgacgtattggcggataattgctttctcatgcccggcgagctatataaactgcataatctcaataagacttattccgcactttcacgccttcctatcctcaaatttatcaatatccgcttcctccctgtcgggaatcagtcggagaagagtcctgtaggcttcctggatgcctacattctccttacaaaggggaagagccagtatttctctgcggaattggagggcactaactctgagggcgatttcggcgttgccgttggtcttaattactctcaccgtaatatcgggaaaggctcggagaccttgattgcgaaagtgcatggagcttatgaagctttgaatggtaacattggcgactttatccataaccgttacatggagtatggcgtggatttaggtgtgaccttcccgaaattcaaggcgcctttcctacgcgattctttcaagcgcaagataatggcaggcacggagttcaacctctccctcaattatcaggagcgtccggaatatacccgcattatctccactgccggatggagttataaatgggtggagaataataagcgcaaccgtcatacatttactcccatcgatatcaattatgtgtatctcccggagagcacatataatttcattgatcagatagcacctgacaatcctttactgagatacagttacgaagatcatttcatcatgcgtctcggctataatttctatcataccacgaagcgcaccgagcgtccctggacccgttcgccgcaacgcaatatctttaccttgcggttgaatgcagaagtggcgggcaaccttctatttaccatcaactctatcttcacccatagagccgacttccatcaggacccttataaagtgttcggtatacgctattcgcaatatgccaaggctgaagtggatctctctttccttcatattcttaatgagaggaatgcgttcgcctggcatacgggattcggtatcggcgtaccttacggtaattcaaccatcctcccctttgagaagcgtttctacggcggaggggcaaatggcgtgaggggctgggatgtccgcacattaggtccgggacgtttccccggcactaactccgtttccgattttatcaaccagtgtggcgatatccgtcttgagctcagtgccgaatatcgtgccaaattattctggatactggagggtgccctctttgtagatgccggcaatatatggactatccgcaattatcccaatcagccttacggtttcttcaaattcaaggagttttacaaagaattggcggctgcttacggcatcggcatccgcatggatttctcctacttcctcctccgtttcgacctgggtatgaaagcgcataaccccgctatcaacgcggagccttggcccgtcattcatcccaactggcatcgtgactcatccttccatttctctattggatatccattctgatgataagtagtggcttgaatccttgtaagcataaagctccatccactaaaataattttgtttatcttattattttatatacttttgtaatagcctaagagctaatttgaatctctctgaattatattagtcatgaattccaacgataaagaaacaaaatctctataccgcgaaacttccgataatacggataacaggctcatcagattcgactgggctatcaaacgccttcttcgccataaggctgaccacactattctcaacggttttctcagttctcttttaggtacggagatccgcattcagcgtcttttggagagcgaggggaatcaggagaatgaggaggataagtataatcgtgtggatctccttgcagagaatgataaaggtgagaagattctgatcgaggtgcagaatgacagcgagattgactattttcatcgtatggcttacggcacctccaaactgattacggaatatatcaaacggggggaggcatacgataagatttcacgcatatacagcatcaatatcgtatatttcaatttaggtgtcggcgaggatgtcgtctataccggcacaacagaatttcgcggacttcacgaccataaagtccttgagctttcagagcgcatgaagagacgttatgacatatcaaaggtaagcgagattttccctcaatactatattcttaaagccaatgatttcaaccgatggtcgaaagtcccgttggaacagtggatgtattttctatcaaacagtgagattccggaggatgcaacagccccggggctgcaggaggcgcgggaggaattaaggatttccagactgaataaatcagagcgcgagtcctactatatccatcttgataatatacgtagcgcacgaaatgtccttgagacagctcatgatgacggtctttttgagggcatggaaaagggtatagaaatcggtaaaaaggaaggtctcaaggaaggtctcaaggaaggcaaagagaaaggtcggcttgagcagatcagaaagagcatttcccggatgagagaaaacggattcgacgatgagatgattgccaagctgttggacatagacattgccgatattgatgcctgaccccaaattagtaccaagcaattttctggttatttcctcttatcattattttttactcctataattatcaggagtaaaaattttgtgtccaagttcccaccccgaatttgtagaattttataattcaatacgatttatttttgttttcctttttacttttcattatttttcactatttttacgccatatataaatatcttaaaagatattgacttttatttaacttacatattaatttaaatatgagaattctcggattagatcttggcgttgcctctatcggatgggctctaattgaagtggatgataagtatcttcctgttaaaattgatggacttggtgtccgtatcgtttcccttgcagataaagagggatcagatttttcttccggcaagggtgtatccgcttgtgcccaacgtaccatctaccgtacagccagaaaaggtaatgaccggtatcgtatgcgtcgcactactctcaaaaatttcctaaataaactcggaatgattgacccgaaggtaaatctcaatcttcttccccctttagatttgtgggcattacgggcagacggcgctgtcaataggaaattaacccttaatgaaattggtcgagtactactgcatcttaatcaaaagcgtggctaccgccattctaagaatgacacatccgaggatgcaaaaaacaccgattatgtcgccaaaatcaatgagcgatatgccgagcttagaaagagcggtatgaccatcgggcaagtgggttatcaaatcctgaaagactcaatacacacctccgtaaacggtaagaaatttgtaacaggaagaataaaagagggttcagacatctactcagcaagtcatctctacccacgccaggctcatatagatgaattcgataggataatggaggtgcaatcctccttttaccccgatctcctcactcccgaagttatcacaaagctgcgccatataatatttttccagcgtccccttaaatcatgtaaaaatctcgtctctgattgtgagttcgttgaatattttgtcaaggatactgctaccggggagattaagcattatcgccccaaagtcgcgcccgtcacttcacctcttgcccaggagtcaagaatatgggaaactgtcaataatctccgacttgaaaatcccatgaataagccccgcaaagggaagaatatgaatgaattatctctgtgggaaccggagataaattctcatgagtggagacttctacagagagaatatatccttaccttggatgaaaagaagaaagtagtggacttcctccgtaaaaatgagaagctgacctccacaaatcttcttaaattactcggtctgaaaaagtcagacggtttcaaacccaacatcggagctgccggtattaaaggtaatactacttattttaaacttaatgaaattttacaatcatatcctgaataccgccatcttctggacttcaatttagagattgaggagaaaagagtggatcaggaaacgggcgaagttataccggagatttccgacagatgttatcatcagcctctatatgaattatggcatctcctttactctgtgtctgaaaagaaggatgttgaagcaactctcaaaacgaatttcggtataacagaacaggaagttatcgatagccttttcgctcttgacttcaacacagcaggattctccaagaagtctgcaaaatttatacgccgtattctcccttatcttatggaggggaagatgtatagcgaggcatgcgaggcagccggtgtccgtcattccgactatatcacatctgaagagaatatcgaacgccaacttaaggaaacactctctctacttcccaaaggctctttgcgacagcctactgttgagaagattctcaatcagatgattaatgtagtcaacgcattgattaaggaacatggagccatcgatgaagtgcgcattgaattagcgagggaacttcgccaaaccaaagatcaacgcagtaacactacgaaggagatatcccttcgcgagactgacaataaacgaattgccaagcttatcgagcaatatgggcttaaggcatcgcgcaacaccatacagaaataccggatgtgggaggaagccggaggtcgatgcgtctactgcggcaagccaatcagcattacaaccttccttgccgggaatggagctgagaaggagcatatcgtgcctcgctctgttctctttgacgatagcttctcaaataagacactctcttgtacggaatgtaatcgcactaaaggagcaagaacaggatatgatttcgttgcttctcagggtgagaaaaaattggaagaatatctcgcgcgtgtggagaatatggctaacaacagtaataagaagttacgtatctcccgcaccaaatataagagactcctgacacccggctctgacattcccaaagattttctcaacagagatcttggcgagactcagtatatctctcgcaaagctatggagctccttagagaagtggtgcggaatgtcggagcttccacaggtaagataaccgacttcttccgacatctctgggggtatgacaagattctccatgaccttaatttgtctcgctatgaatctgctgatcttgtgattgaagacacatttactcataacggacagactcataccgaaagacgcataaaggactggtcaaagcgcatggatcatcgccatcatgccatcgatgcgctcactgtggctttgacccggcagaggtatgtccagcgcttgaacaatcttaatgccgagcatggcaacctgaaaggagatattgaaagtaacggaaagaatttcaaatcagacaagagccttatcacccaatggggcgaggcttgccctcatttccctgtaagtgtagtaaaggctgccgtcgatcgtattgctgtttcattcaagcccggtaaaaaagtagctacctccggtaaaagaaagagaaagaacggaacagagtttaaaaccttcgtccctaaaggaggtttgcatcttgatacaatctatggtaaaataaaagtccccacagctgctcgttcccttaaagattgtctcaagaatcccgacatggtgagcgatagagagattgcaatgaaactaaaggaagttctctcctcctgcgcgggtgatatctccaaagctcagaaggagataaagaaaaatcctatcaagtttgataaagagaaccagcctatactctatttcccatgttacgaggaacggatgacagtaagagctggaatagcctcccttagtcagaagaacgcatccgaaatagttgatccggttatcagacgtgttgtggaagagcgctttcaggaatgtggatcggagaaagcctatcagcagtcactcccggagcgtcctattgagcatcccgcaatgccgggcattccggtaaaatatgtaaagatattcgcttctgtcactccggataccgttgtacccgtgcgtaaacatggggataaagctatcggttttgcaaaaccgggcagcaatcatcatgtggcattctatcagcaggaggatggaaatatctccgcattggtcactccattctgggtggcggtaaatagaaaaaaactcggattagaccccatcatccataatccgcaagaggcctgggataaaatcatagagttaggcgataagattgacgaaagcctactgacctccatgccacttcccaatgaccaattcatgatgagtcttcagcaaaatgaaatggtaattctgggattaagtgatgatcagtggaatgatgcatggcagcagaaagatttaaagacacttacaagtcacttatatcgagtgcaaaaaatgtcagatggagactacttcttcagactccacaataatacctctactgaatttaatgcagatcatcgtatcatgcaaactgtaattagatgtacaagtctaaaaacatggaagtctctcaaccctcataaagtttctctcacccataccggacaaataattcctctccatgattaaaagaactctccacttctccaatccggcttatctctcactccatttaggacaaatggtaataaaattcccatccgaaaatggagaggagagaaaaaccgtgactcgtccgatagaagatatcggaattgtcattattgaaagccacgccgtcactattacatctgccctactttctgaattattggcaaataatgtggcggtcgtcacttgcgatgagcgccatcttcccaatggtttactccttaatttagatgggaatactctacagactgaacgtttcttagcccagatcaatgcctccattcccctcaaaaaacagctctggcaactgactgttaagcagaaaattgccaatcaggcagctctacttaaacacgtcggcggcgtagaaaccggttgtatggaggcatggagcagaaatgtcaagagtggcgacagtgataatttagagggacgcgcggcagcatattactggaagaatttcttccctgaccttccggaatttcgtagaggtcaatttgaagatgcgcctaatcatctgctgaattatggatactctatattaaggggagtcatagcacgctcattggtcggcagcggcttacacccaactttgggtatctatcatcacaacaaatataattcatattgcttggctgatgatatcatggagccatatcgcccttatgtggataaagtggtaatgaatatcggtaatctattcggatgggcgactcctatcacaaaagatgtaaagaagatattgctctcgatccctacattagatgtggtgatcgatgggttaagacgtcctttaatggtaggagcttccatcacaacagcatccttggcacgctgtttcatgggagaacaaaggaaaatatcatatccgcggatagatgaaaacacgtttaaatgaatataagattatgtgggtaatggtattctttgatcttcccactgaaactgccaagcaacgccacgcttatactcagtttcgcaaagcgttgatagcagatggatttgagatgtatcaattctccatatatatgcgtcattgtccatccaaggagaatgcggaggtacatatcaaacgtatcactgcctcgcttcctgtagaagggagagtttgcatgatgaccataactgacaagcaatttggagaaataaaaatatttgatggcaaagcaccaaccaattccgagatacgatctatccaattagatctattctaaaactttgtatagaattgaaaaactaaaattaaaaaatccggctctataaaaaagaagtcggattttttaattaagaatcaccatttatatttctgtctatcagcgtatttcacacattgaggctgtgattctatatgcaaatataataaaaaggacgcaaatcacaactatgcagtaataggattttccaaattgtcggctgtgattctatatgcaaatataataaaaaggacgcaaatcacaactgcatctcttccgaagcaatacgggtaggcgctgtgattctatatgcaaatataataaaaaggacgcaaatcacaacaccatggatgaagtaatttcaggttttcaagctgtgattctatatgcaaatataataaaaaggatgcaaattacaacgcggagcaggaagaggcacgcgtatctttttgactaaagcatataagaaaatatggatattatcatatctgcacataagcttatctctttgttgagttctaccaggagttgaggcgaaccctgggggaggaaaggacgttatatatgtaaaaaattatagaaattacaggatatgttaagtaagaaacttgaagatgctcttaatgagcaggtgaacgctgagatgtggtcagcttatctatatctctctatgtcgatttatttcaactatgagggcagaccgggggtggctaattggtttaggattcaatttcaggaagagcaggcacatgccctcgccctcatggattatctgaatgcaagagatgcgaaggcagtgctccaacctatcgcgggcgttcccgagtcatgggattctgtgaaggatgcgttcgtagcaactcttgaacatgagcagaaagtgaccgaacttatcaataatctttatgcacttgcagaggaggaaaaggattttgctacgcgccaaaaactcaacacttttgtggctgagcaggtcgaggaagaggagactgtacgccagattatcgatgaccttaatcttgtcggcagtgacggcacaggactttatcagatcgatcgccagttggcaacgcgcacttatgtggctccacagctctgatctactgattctccaatcaaaaaagtataatgaagagaaaaaagatttatttcgcaggagggtgtttctgggggacagaacaccttttttcgcttgtagccggagtggttgggacggaggtcggctatgccaacagtcgcgtaccttatcccgaatataaggaggtatgcagcggacagaccggggctgcggagaccgtagaggtggaatatgatgatatggaggtctccctgacggaattgctttccatttatttcaaaagtatagatccgacttcactcaaccgacagggtaacgaccgcggcactcaatatcgaaccggaatatattatgttgaccgggatgacgtgccggtgattgaagcgttcgtagcggctgttgaaagaagaaacaccgagccgattgttgtagaagtcatgcctctggagaatttctatccggctgaactttatcatcaggattatctggagaagaatcccggcggatattgccatatcgatccggcactttttgaggaagtaaagagcagggagggcaggaaaaatgaaaaatcgcaactcagggagcggcttacgcctctgcagtgggaagttacgcagaatggcgcaacggagcgtccgtttgtaaatgaatatgatgaggaattccgaaaaggaatttatgtagatatcactgacggaaccccgcttttcatttcctcccgtaaatacaactcaggttgtggctggccggcgtttacccgtcctatttcatccgaccttattactgaacacaccgacacctctttcggacgtgtacgcacagaggtacgctccgcctcaagcggtgcgcatttaggtcatgtgttccctgacggtccggcatcggaaggaggacagcgttactgcataaattcagcctccctgcgctttatccctattgaggatatggagaaagaagggtatggagactataagaatctgattgaagaagagtgagtcgcagggaatgacgaatgagtccgaccgtagcgacttaggctcaatccactaaaaattatcgatagtctttaaatagtaactgaaaaagatcagaattttctttttaatttaaaggattttccttaactttacatcgcaaaataaaaagacgcaaatcacaataaggacttttagtccgatgtgaaaacaacctattcggggctaatcatttgattagcctcgttttttatgttctcttcgttatcagcttcccttatgcttcatatataagcttttttatccttatctctgccggctaaagtctaaattaggggctacctcctatctttactgaatatttttgttatatttgtatggaagtcgctccgtatcattaatgatctaagaagaggcttcaaaaatattgattgaaatgaaaaaattagtaatatttgatcttgacggcacgctgctcaatacaatctccgacctggggaatgcctgcaattatgccctccgcatgatgggatattccgaacatgccctctctacatataattatatggtcggaaacggtgtcagaaaattagtggaacgcgccgtgccggatgccgatgaggaaactatcgataaacttctctccattttcagagaatattatgacgaacattgcactgactcaaccctcccctatcccggcatcccggaattattgaaggaattgactgagaagggtgtggctattggcgtgacttccaataaatatgagccggcggtaaaaaaaatagtcactcacttcttccccgatatccctttcgttgctctattaggacaggttgaggagcgtccccctaaaccggatccctccataatcttcgctctactcaatgagagtccttgcgctaaaaagaatatcctctatgtgggcgattcagcagtggatatggagacagcccgcagagcttgcgtcacatctgccggcgtgacctggggcttccgtcccgtgtcggaactccgcagagcctacgcagagcatatagtcaacaaaccatccgaaatccttagacttgtagatgaattatgagcgaatatattttcaaacattcctttctcgtctctgccaatgaggctaacccggaaggagaattggctgtcactatcctcgtcagcaatctgatcgaggtcgccacacgcgccgcgatggatctaaatataggaaatccggtgatggctcatctaaatgccggatgggtgctctcccgtctcactatcgaactgtcgcggtatcctaaggtaaatacttattactccatcgagacatgggtagagagctggaaccgtcatttctccgttagatgtttcgagattaaagatggcgacggagtcacggtcggttatgcccgctcggtgtggatggtgcttaacacagaaacacatgagaatttcggtttgggtcatctttccctgccggagggagcaattaaggataaggattgtcctatcgcacggcaggagaaacatgtggagatagtgaacgagggcgaaacgggttcctcatcttcctctctttcagccaataccgagactcttctttatactttccgatacaacgatattgatttctaccgtcatgtcaatacggtaagatacgtctctcttctccttaattcatactcgcttgaggaatttgacaaatcatttatccgtcgtcttgagctttcttttcttcatgagggcaactttgacgaaacggtggagatacgacgtttcaatcatgactcctcactctcctctttttctcttttctcaacaaagaaaaatctgcctatcctctttgcaagaataggattagagaaaaggattgattaagattccggatattttcaatctttaattataaaatctgttgatgcacatgatatgtatttgcacatcatgtgcatctcttttgaagtaactttgcatcataaaaaataagaattatgtgtaaacattgtcatacttcaaaagatacagagagtcatagtcatagtcactctcacgatcataaacattgccattcccacaatcattctcaccaccatgagaatgaatcttgcggatccggttcagcctgcggatgcagtcatcatcatcacgaaaaagaggaacacgcgaacttcttcacaacttatgcaaaagagctccttacaggcttgctactggtgggcggattaatcctctcccattttattccttcacaattatggtggatatattatatagccgcggtgctaccggtcggtctccccattcttaaagagatgtttgagagctggagagagggaagcgttatgaatgagtttacccttatggtggcagccactgttggagcatttcttatcggggaatatcccgaaggagttgcagtgttgctcttttactctttcggagagaagatggaggacacggcttccgaagatgttaaaaaacggatcaagtcacttctcggacgccttcctgagactgcaagattgaaggaggatgagaacctgcggacagtaaatccctccgacctgaagatcggagatataatcatggtcaatccgggcgagagaataccggtcgatgccattcttacgggaaaccgggatattgatttcgatacctctgctatcacaggagaatccgtaccgcgcactttccatccgggcgatgaattatcatccggcatgataccggtaaacagagctgtggaattgcgcacttcccgattattctccgactcatccatgacaagagtgatgaagatgatagaggaggctcaggaatcaaagtcaccgaccgagaacatgcttcgtcgaatcacccgctggtatactcccgtggtttttaccgctgcccttcttcttttctttatcccctggattatagccggggcacagggtgtctcttttgaatggatgaaatggcttcgccggtcgctgatattcctggtgtgcagttgtccctgtgcattggtggtgagcatccctttaagttatttcgcctctttgggaaatgcttcgcgtcgcggacttcttttcaaaggttccaagtttgtggatgccatgcgtgatgtcaagacagtgatgcttgacaagaccggcactcttaccactggaaaattccatgtatcggctgtatcctcagatggaaaagatgaaaaggttattgcttttgcggctgcactcgaccgcgaatcggcgcatcctcttgccatagccattgtggaatatgccaaagagaagaacttgaatgacgtagaggctactgacgttgagacggtatcccatggaatgtcagctatcattgacggcaagatatgtctcgtaggatctcgctctctaatgcgcagccatgacatagcactcccggatacaacttccgatgcttctgaaatctgtgttgcttatgatggagaatatttaggttctatctatctacttgacactgtaaaacctgaggctcgggaagccatcgcccgcctgcatgaattgggtgtggaatctgtggagattctctccggagatcatgaagctgccgtgagtcgggtcatgaaagaggttggagcggatgccttccatgcttcacttcttcctgaggataaacagcgtattatcaatgaacgtcgcgaaaacacatccgggaaagttgcctttgtcggagacggtataaatgacgcaccggctattgcagcgtcagatgtcggtgtggctatgggtacactcggcacggatcttgcaatggaaagcagcgacgtagtgatagcaggtgacaacctcacgaaacttccggaggctatctccttaggaagaaaggtaaggagagtggtgactgagaatgtcactttcgcaatgggcgtaaaggctcttgtaatgactctcggcgccttcggtatagcttctctctgggctgcagttttcgccgacacgggagtgactctgataacaattttatggactcttatccgtttaagaaagtagaataatcttctatatggctgatgaggaaataatagagaaaatgaatagactcggcgtgcgtcccactgccgtgagaataatggtcggtcgtctgcttctgacagccgaccatcctctttccggtctggagattgagcaggtgctggacacggtggatcgctccaccatcacccgctccttatcgctttttacagaaaaagggattgtccatgttattgatgacggttccggggctgccaaatatgaatggtgtgactcgcatgatgatagtgactctgaccgtcacatccattttcactgtgtgaattgcggcagaactttctgtctacattccaaccctatcccggatattcctctccctgaaggcttcctcgccgagtcagccaatttcacgatcgcaggaaaatgcgacaaatgcacctcgcatttctcgaaggtataaggctccatccactaaaaaagactgtgtcagtatgtaataattcattccgacacagtcatttatattaggtttgtgataatgtagtatcaattatataacgccctgcgccatcattgcatcagctactttcaggaagcctgcgatattggcacccttcatgtagttgatatagccgtcgggctgcttgccatgctcaacgcacgcattgtggatatcattcatgatggtatgaagcatatcatccactttcttcgcgctccattgcagatgctctgcatcctgagtcatttcaagaccggatactgctacaccgcccgcattgaccgccttaccgggtccgtaaggaatcttatgctcaaggaagcagtcgatagcctcaggagtacatcccatgttggaaacctccgccactaacaataccttattatctacaagctgcttggcatcctcgccattgagctcattctgagtggcacaaggaagagcgatatcaaccttctgttcccacggtttgcgaccggggaagaatgtagagccggggaaacgatccgcatagggagccacaatatcatcgcccgttgcacgaagctcaagcatatactctatcttctctgcatcaagacctgcgggatcgtagatatatccgtcaggaccggagatagtcacgaccttgccgccaagttcagtagccttagtagctgctccccatgccacatttccgaatccggaaattgctatggtcttcccttttatatcagtgccgaggtcgttgagcatattgcatgtaaaatagagtgctccgaaaccggttgcctccggacggatacggcttccaccgaatgaaagaccctttcctgtgaaagtaccggtattctcccgtgccaatttcttatacatgccatacatatagcccacttcacggccgccgacacctatatcgcctgccggaacatcgcggtcaggtccgagattgcgccagagttcaagcacgaatgcctgacagaaacgcatgatctccgcatcgctcttgccacgcggggagaagtctgagcctccttttgcgcctcccatcggaagagtggtcaaggcattcttgaaggtctgctcgaaaccgaggaatttcaggatagacagattgactgacgcatggaaacggatacctcctttgtagggaccgatagcgttattgaactgtacgcgatatccgatattgttctgcacctcacccttgtcgtcagtccatgacacacggaatgtgaaaatccgatccggctcgaccattctctcgatgatcttcgctttctcaaattcaggatgagagttatatacatcctccacagacatcaggacctcttttactgcctgaagatactccttctcgccggggtgcttcgcctcaagcccggacataatgtcatttatgttcatgtgtaatagtatttagatttataggtcttatataactaattgaaatttctgtatatgtgatttcatggtacagattcatcggttagctccgatttttctgtattacaaatctacagtatattctgcggataagcaaaaaaaataatatgtttaaaagcagaaaaggctcccccggatggggaagccttctcctatattatttttagaattatcttacttctgagtgaagattacgatacggttccagtcgttagtgctgtagggctgaacatcagaaccatcatacttaacagtgaggcggttagcgtcgataccgtagttgttgatgagggcgtcagcaacagcgttagcacgtttctcagagagctggaggttgtactcagctgtacctgtatccttatcagcgtaaccaacaaccattaccttctcgttggggttagccttaagccactcagccatgttgtagatgttcacttcctctgtaggcatgatcttagcagagttgatagtgaagcgtacagttgacatgagaggagcgtttgcacaatctttctgtacaacgggctcggggcaaggaagctgtgcctgaagagctgctacagttgcgccacaagcgaggagctcagcgcggaggtcgttaacctgaccgttgagagcggcgatctgagatacatactcacactggttgaacttgttccagttgcggccaccaacgttgatgttgaaaccacccattactgatacgttagcctcgatagaaggaccctgtgcgataccgttccagttgtcaccgtagaatgaagcacgtgcctcagcgaagaaatctacatactcgcaaagacggaagcggaact

SEQ ID NO: 1681 - DNA, 15290 bp, synthetic construct
  variation 9324..9325: note = n is a, c, g, or t
  variation 9222: note = n is a, c, g, or t
  variation 9432: note = n is a, c, g, or t
  variation 9174: note = n is a, c, g, or t
  variation 9417: note = n is a, c, g, or t
  variation 7941: note = n is a, c, g, or t
  variation 9423: note = n is a, c, g, or t
  variation 9183: note = n is a, c, g, or t
  variation 9428: note = n is a, c, g, or t
  variation 9186: note = n is a, c, g, or t
  variation 8634: note = n is a, c, g, or t
  variation 8379: note = n is a, c, g, or t
  variation 8454: note = n is a, c, g, or t
  source 1..15290: mol_type = other DNA
  variation 9075: note = n is a, c, g, or t
  variation 8352: note = n is a, c, g, or t
  variation 9519..9520: note = n is a, c, g, or t
  variation 9354: note = n is a, c, g, or t
  variation 9321: note = n is a, c, g, or t
  variation 8787: note = n is a, c, g, or t
  variation 9123: note = n is a, c, g, or t
  variation 8640: note = n is a, c, g, or t
  variation 8022: note = n is a, c, g, or t
  variation 9276: note = n is a, c, g, or t
  variation 9102: note = n is a, c, g, or t
  variation 8774: note = n is a, c, g, or t
  variation 9096: note = n is a, c, g, or t
  variation 9402: note = n is a, c, g, or t
  variation 8691: note = n is a, c, g, or t
  variation 9039: note = n is a, c, g, or t
  variation 9054: note = n is a, c, g, or t
  variation 9306: note = n is a, c, g, or t
  variation 9042: note = n is a, c, g, or t
  misc_feature 1..15290: note = Synthetic
  variation 9192: note = n is a, c, g, or t
  variation 9474: note = n is a, c, g, or t
  variation 8511: note = n is a, c, g, or t
  variation 9420: note = n is a, c, g, or t
  variation 9351: note = n is a, c, g, or t
caatggctttatcgcgaacgagttcactatggatgataagctcttcacggagttgctccattccaggagcagaataatacttatctataattgaatagggattcatgcaaagaggaaataatgtggaacttcagcggccttcggcgcgctgcacaggacgagcttcgcgctaaccctgaattagaaatgagcattatgaaaagactcataatgctcatttatctcttatatcttaagttctctgctttcaagcttcagtctcgatgatctcacaccagttgtgggtatcgggagcctcgccatactggatagcgcggagggcgttatagagcatagttgatttcggacctgcctcaccggtggtgtagacaaatttgcggccgttgtcgagatcgtgtatctccgcgatgggggaaatcacagctgccgtgccacagttgcctacttcctcgaaggtttcgagttcctcataaggaatctggcgttcctcaacagtcattccgagatcagcagcgatctgacggatgctcttgttggtgatggaaggaaggatagaggggcttgcgggagtgatatatgagttatcgcggattccgaagaagttggcggcaccggcctcatcgagatatttcttttccttggggtcgagataaaccataacggaatagccgagctcatgagccttctcaccggccacgagagaagcagcatagttgccgcctaccttgatggaaccggttcccttgggagcaacgcggtcgtattcgcggctcatgcacaccttcgtaggcttgaaaccctccttgaagtaggggcctacagggcttacgagcatgatcaccatgtattcatcagcaggttttacaccgacgcggggtgagagaccgatttcaagcggacggatgtagagggaggctccggtgccatatggagggatgaagcgttcgttaagtttcaccacctttcttaccatctcgcagaagagttcaacgggcataggctgcataccgattccttccgcagaacggatgaaacgtttagcgttttcttccattcggaatacgcggactttgccatcgacgccacggaaagccttgaggccttcgaatgattcctgaccatagtggagacaggtagcggcgatgtggagagggacatactctgaatcgcttacctgaatttcaccccattctccgtttttataagtgcatcttacgttgtaatctgtcggtacatagccgaagggaagtttatcccattcaagatcgggctgctgtttcatatcagttttgtgttaagtgtctatggtaatagatattatgatttgaattaactgtttaaaaagaaccgttatcagctgcccataacattcggatcagatggcgaccttgcaagtgatcgacccggtcttgactatgtagactccgtgggccggaagctgcaggcgggatgtgccggcgggaatattctccgaaatgaggagacgtcccagaatggtgaatacctgaatcttaacgctatgatttgagctgattataagtgcattgccggaggttttgatttccagttcggattctttgaacacggatttggcatcgacaacctcagtacggaccagttcccatttcagtgcggccatagcgggtattgccgggattaaagatcccaacaaaacacaaaagggtatgagcgcacggatacgcatggttcgatactatttctatggtaaaattaataaattcctttgtaataaaaaagaaacgcctccggaaaatccggaggcgtcttgatgatattgcaatctggcaataatggagggggagggattagcccttcttctcctctttctgcatctgctccttaagagcctggagagcgccgaggtcaccgagagtggttttctcgatctgaggagtagcgatctgctctgcagcaggcttggaagccttacgtgcgggagccttctcacgacgctcaggtttgttggcgtcctcagaaatacggctgtggctgaggatgatgcgcttattgtctttattgaattcgattaccttgaagtcgagcttctcgtcaagcttagcctgagtgccatcctcttttacgaggtgcttgggagtggcgaagccttcaacaccgtagggaagtgagatcacagcacccttgtccatcatttcggtgatggtaccctcgtggatagaaccaacggtgaagatagtctcgaatacatcccagggattctcctcgagctgcttgtggccgagagagagacgacggttatctttgtcgatctcgagaacctgaacttcgatatcattgcccacctgagtgaactcgctggggtgtttgatcttcttggtccaagaaaggtctgagatgtggatgaggccgtcaacgccctcttcgatctcaacgaatacgccgaagttagtgaagttgcgcaccttagcagtgtggcggctaccgatagcgtatttagtttcgatattctcccagggatcatccttgagctgcttgagaccaaggctcatcttacgctcgtcgcggtcgagagtaagaaccacagcctcaacctcgtcgccaaccttaaggaaatcgttagcgctgcggaggtgctggctccagctcatctcagaaacgtggatcagaccctcaacgccgggctgaacctcaacgaatgcaccgtaatcggccataacgacaaccttacccttaacgcggtcgccaaccttaagatcggcagtaaggttatcccagggatggggctggagctgcttgagaccgagagcgatacgcttcttctcgttgtcgaagtcgatgataacgaccttgatatcctgatcaagctccacgacttcgcggggatctgaaacacgaccccaagaaagatcggtgatgtgtacgagaccgtctacgccaccaaggtcgacgaatacaccgtaaggagtgatattcttgacttttccttcgagcacctgacccttctcgagcttggagatgatttccttcttctgctgctcaagctcggcctcgataagagccttgtgagaaacgacaacgtttttgtattcctggttgatcttgacaaccttgaattccattgtcttgtcgacgaatacatcgtagtcgcggatggggcgaacgtcgatctgagaaccggggaggaatgcctcgataccgaatacgtcaacgatcataccgcccttagtgcggctcttaacgtaacccttgattacttcgtcgttctggagagcctcgttgacacgatcccagctgcgagtctggcaagccttcttgtgagagaggcggagctgaccgttcttgtcttcgagagtctcgatatatacctcaacttcgtcgcctaccttgaggtcggggttgtaacggaattcgcttaccgggatgatggcgtcagacttcataccgatgtctacgcgtacctcacgcttgctgatcgattttacgataccggaaacgacttcgttttcttttgctgtcttgagcgattcgtcgtaggtattggttagctcttcacggctcttctcacctgcggtctcgccgtttgcatatgcatcccaatcgaaatcttcgattgctgtgaaattctttgattcagacatttagaatcaagttggtttttgtgcctcagccgggaaggatcaccgtgcggtatccaattaattattccgacttcggcggttaattattaatgttatttatctctatggtcagggcacattatgcccacaccattgcaaaattacaatttttttttgattcaggcaaattttgcggggatatcctgccgacttaattttctgatatactgccataatgacattcggacctcaggacagccgctatcccgacaccatgccttaacctatgccatgaagagccggcggtattcgctctcgaaattaggggtgaatatccctttaccgatattctcggagatctctccggaagtccagaagcggccaccgctgagctcggcacttggtttgggagcggaggcatccactgtggtgcggtaggtattcaccaattcacgctcgcggtcggattcaaatacataggaatccagaaattccggttcgaatccctccagacctaattcttcctttgcctcgcggcggagcgcttgctccacatgctcaccgagcgcgacatggccgccgattgccgtgtcccacttcccgggctggatatccttccattcgggacgctgctgaagatagaggcgcccggcggggtcgaatacatggagatgcaccaccggatgcaggagtttcgagcctccgtggcattcctgtcgcgtggcggctgaaagaatctgcccggtctcatccaccaccggaaacatctccgtcatgtcatcttttataatttcctcattcatattttttgttttcgatgtaagattttatgcaatgtatcgtctaagtaagtaagactccatccagtaaaatatgttaaacgcagggcggtctctttttgagataaattcttgaatctcagagggagcagccttttggctgtaactgatgagattcaggaatttagccgaaaagaggccgtctaaaggtaactttttcatataggccggagtccattggaattaagtattaatataattaataattcaaatttataaaaattactccattccgcatctcaggggcatctctgtccttttgactcagtcacatagcccgctatgctcctgagtctgcaagaacatatctgcgccctgagctgcgaccctgcattaacagattttattggatggagtctaacgttcaaacgaaatcaatgattatttcagcacattcatattcttcgataggaacaggggaatccccaatacgcaatggtattcccgggcatcgactcaggagcgcgttcagatggatctgtgcccaaatttccgtcaaccgggaaggccgcgagagacgccggcgatttgactctatcctggctgccaatcatccgatgataaaaagaattgcgttctcatatgccaattcgatgcaggattatgaagatctctgtcaggatattcttctgaatatctggaagggaatcggggaattcagggaggaggcgatggtttcgacatggatctatcgtattgcgctcaatacgtgtgtctccacaatccgtagacgcaaccgggagcctgataaggtggaactttcggagatggtggcccaggtggccgacaataccgagaattattccatgaatgaggagctgatggagcttcatcaggctatctctgagcttggaccgatcgataaggcagtgatcacgatgcgtctcgatgaacggtcgtacgacgagatagcagaagtcaccggtctgtcgaaatcgaatgtcggtgtgcgtctcaaccgtatcaagcaccatctggccgaaaggttgaagacaccggagtaactttcagacaatcatgacattatgaatatcatgacacataaacatcatattcagatatttttgacaacattacactaattacaatcacaatattatggtatctaacaattattcacgtgcgtggagttcgatggggaatgggtcgtttaattccaacttcaatcctgaccggaagacggccctggagaagttggctgctatgtaccgcaggtttatgaccgtggcgttgatactcgttccgtattcctggctgaccttcacgcgtcccaacttgatcgagaattccacgggacgtatcttacttcccattctcttctcactctatgctttgtcggcattccttatcgaccggtatctgtatcatggtatcagaggaatcgactgtttccggatgaccgtaaaggaagtgggggagagggcctatcgtcttcggcggattcatctccgttcgatatgttttctggtgccggttatcattgtattcatcggcttattgggatactatgtcgtatcgaatatctatttcatctatggaatggtggcggggtctgtgatcggagtaatgatcggattgtggaatctccggaaatttatggtggaatataagatgctgacagataatgaggaaggatagccgatactacatactattcatctcaaattagacggtagtggtctacgacccgggcaacgggaaaataattttgtagttggttcgtttttcataatatggtaagatatggaaagtcctgttctgaatcatacctattccggagcaggactcctgatgttttccgaaatatacttttctacaaagaatatatacctgcaaggaaaatacttaactataagatatgaaaagcagattcattggaattattgcgctgctgatgagcgcatgcgttgctgtgccctgttcggctcagtttaatctcaacaaaatcaaaaaggctgcgagtgccgttcaaaagggtgtgcaggccgctaccctctcggatgccgatatggcggcttatgtgaaggaatccgttgattggatggataagcataatcctgtgctgcccgaggacaatgaatacaccaagcgtctccgccgcctcacagccaatgtgaaggaagccgatggaattccattgaatttcaaggtttatgatgtgattgatgttaatgcgttcgcttgtccggatggatcggtacgtgtgttctcctcgttgatggatatcatgagtgatgatgagctgatgggtgtgatcggtcatgagatcggtcatgtgctgaagcgtcatagcaagaatgctttcaagcaggagttgatgcagggagccatcatcgatgcagccggagccatgagctcgacagcagcggcccttactgattctcagctcggcaaactcggtcagtcgctcatgaatgccaagtattctcagaagcaggagactgaggctgatgagtgcggttacgattttctggttcagaatggtctgaatccttggggaatggcaatggcattcgagaagctttccggatccgagggtgatcagaaagcgagtgcaatccagaagatgttctcaagccatcccgatactcagaagcgtatcaagcgtatgtcggaacgtgctgcaaaagatggtttccagaaaccggaagctaagaaataatcccttgtcattcctaacaaaacatacaaaggtcgactccatattcggggtcgacctttttgagtttatatcacagatgtggcacagataattttcacagattcccacagatttatatgaagacatgtctttagatcatctgcgtaactctgtgaggcccatctgtgaatcatctgtgagcacgagattcgaggcacctttgtgaaaggactgtatttcgtggacgtaacgttatttcagcggtgtgacggagaggaggtcgatgagagcatgattggtagtgatgttcatgttctcattgtcagggaggaactcgatagtcaccacgtgctcgccgggagcaagctcaccaatcaccgaattagtccagccccagtcgctccagttggcacgcccacgttgcggaagtaccaccgtgccaagctcacgaccatccacctttatagtgcggataccgcaccggttttctgtattcaccggcccgttgccattcgcataacggagcttgaaagcataatttccagccttatccacactcacgggaatagagattgccggagtggtcttatctgtctccacgaacccggcaccactgaatccggcgatagcctcctccggcttataagccacttccgcagaaacgatggaaagagtttcaccgggcatctcgatcagctgcgccggacgcgtggaacgaggctcggaagcaaaactctcgacaccattgtcagaaacaccgattaccatatactctcccggtttggaagcatcaaaagtggtggtcttcacatttgcaattctcttgccatcgcgaaccacaatataatggttgatatattcaatnggattccaaacgagagtggtgccctcaagccaagtaataggcgtgatgggagtcttcacattcggagaatgtttcattccnacaggctcgatctcattatcagccatcacaatctcaatgttcatcacccccttagcctttttagcatcaatgaaaggagcctgcgccttaccattgaccttaaactccctgatgcggtcgccatatccggagaccgtgatatttaaaatagcatcgcgatacttgaaattatcaagcgaacgggtggcggccatagccttcggcacaaacggatggaaagccagaccatccttctggaaatcgataccgaaaagaatcttatgggtcagcgcgatattaccgctcagacaccagagcatattcgaagaattcaactccgtagcgatatcnccattatcgagattgaaattctccttnttggtggcgaaaagggcagccgggcggaacacggaaccaatcgcctccattacgccctgctcattgccggccttngcattcgccaggccccaccaggctccgacccatggccaaagtgaattattatgatangccggcatgtcaggaatctgagggaagaaagtgccgacaccatagggagtggtcggattagacgcggaaatcttcttggcctgttccggagatgcgacaccccacagcatggcgagcgactcnccgagngtatctacacgcggattggtgatgagattatcgcgaccgtagagatacatngcatagaaaccctgattatcgagccaaagggaatcattgatacccttgcggatagactcagcctgagcgaaagccttcttagnctcctccttatgnccgaggatctcggcaatctcgccgagcacctgccaagcctgagcatgcaccacggaagtggagagagtctccgtattatagatgtcggcacactgcatccatttcggatggctctgctcgcgccagtcgataaacgatgtctcacccttcacgagacctgactcaggattgtaaacggaagcggcatctgtctcaagcgaacgtttgataatgggatatatatacttaagccaatccttatcgccggtcacnttntaaacctcatangcagccacggcccaaatctcncggtcggtagaaacgggccangcaccncccgagccggtatcctgaatnatacggcccataggatccactttcttcatcagcgaaatcctggaagcctcnggctgcatntangccatngaaaggaggatcgaatagctgacatcgcgngtccagacgccggcccactccttaccggtgcggagggtggtgtcgggttccacngcattcaccatctcatcgaggcccatattntagatagcgcggtgnagnnggttgggggttgacagttgaggatanttnctgatatcatttttcttatgccattccttatcgatccccatataatanccgggctgcgcggantanttngagangatngaagaatcggaaggggctgtagcgaagaaagcgccctggganatggtgtcgccatgccagacataggcatcggtctggacgatagcnncggaggccaccgccgccacaccggaaataagagataagagcatcatatttataggtattaaatttcgtaaaaatcgtaaagattggtattaaacttcggatcatacttatccccgaaagctctaaaggataaggtaagacaaatttaatcaatccgagggtaaaatccaacggcaatacgaattcgataagaatcgatagactcagattgaaattatactactccacggagtataagacaaggataaacgtacatataaaaagacgaggcttatcgtgagataagccccgagtaagatttcacttcggacaaaagtccttattgtgattcgcgttcttatttttgcaatgcaaatttaataataaatttttaaataccaaaaattattactaattttattgcaccatatactaattgacctttatttattggtatatatcactataaattcatcactaatactttagttctaagcgatatatgaaaatcttaggtttagatttaggtgtaggctctataggatggagcctcattgaagtagatgatcaatatcaactgattaaaatcattgatatgggcgtccgtattgttcccctcgcagaaaagcaggaaatgaacttcttacaaggtagaggggaaagtataaatgcacaacgcacatttcgtcgcacaacgcgtaaaggatataagcgtagacgaatgaggcgtaaactgcttgtgaaaatcctgactgatgccgggatgtatgatccggaggctacccttgatgacctttccccgttagaattatggaaactccgtgcggaggctgttgagcgtaaacttagtctcagagagataggacgagttttgagacatcttgctcaaaagcgaggctacaaacattccaagaattcaaccgactcggagtcaaaagatacagactttgtcggagcaatcaatacgcgatatagagagctattggaagaaggaatcacaatcggacagaaactatattccatcatcaagaattcaatacgcgaatcgaagaatggaaaaatatttgtatccggacgtgtgaatgaaggtacagatccctacactgaaagtcatctttatccgcgacaggcacatattgatgagttcaataagatcatggaggagcaaagcaaatattatcctgaattgctgacttctaaaatgataggtcgccttaaccatgcgattttcttccagagaccattgaaatcctgtaaggatttggtgtctgattgcgaatttgtggagtattgggtgcataaggatgatggaactcttactacatatcatcctaaagtagcgcccatatcatctccattatcgcaggaaacacgaatttgggagactgttaataatatacgactggaaaacaggactaataagcctcgaaaggcatcaggtacatcagctccgaccaagaatagtactgagatagaatcccaggagtggagattactacaaagagagtatgtgcttacgatggaagagaagcatagagtggtgaattatcttcgaactaatgaacgcttgtcttccgctaatttgctgaagctgttaggattgaaaggtcaagggtttacacctaatattcctaagaatgggttgaagggggatataacatacgtagaaatagcggaggttcttaatgattatccccaatatcaccatcttcttgaatttaaacttaaagaggaaaattccgccgataaacttaaggtgaataaagagacgggagagataattcctgaaatatcagaagcctgttataatcaacctttgtacaagctctggcatctcctctattccgtcacagagcgtaatgatgtggagaaagcattgcgacagaactttgggattaaagaacctgaattgatcgaccgattatatgcccttgatttcaagaccgcaggatttggtaatcgatcagctaaattcatgcgtgaaatccttccattcctaatgcagggaatggtgtatagcgacgctgtggctgcgataggaaagagacactccgattacctgacatcagaagagaacgaggcaaggattctaaagacccatctaatacccctgcagagtggtgcactgcgtcagcctacggtagagaaagtgctcaatcagatgatccttgtagtcaatgatttggtcaaacgttatggttctatagatgaggtatgtattgagatggctcgtgagttgcgccagagtaaagcccagcgagaggagactaataaaaacataggtctccgtgagaaagataacgaacgtattaccaaggctctcaaacagtatggtgccaagcttagccgaaacaatatccaaaagtacaggctttgggaagaggctgcgcatcggtgtgtttattgtggggaaatgattaatattaccgagttcttgaatggagaaataggggaaaaggagcatatcatcccgcgctcgcaattctttgatgatagtctgaataataaagtattggcttgtaaaagatgcaatggtcagaaaggggcacgtacaggctacgactttatggagtctcagggcgaaaaagctttggaaggatacatggagagagtaagacagatgtatgagaatcctgataagaagttgcgtatctccaagacgaaatataatcgtttgcttactccagggaatgagattcctgccgactttcttaacagagatttaggggagactcagtatattacccgtaaggctatggagcttctgaaggaaatatgccgtaaggtggtgccgtcaacagggaaaatcactgatttcttccgtcatcactgggggtatgacatgattctccatgatcttaatctgcctcgttatgaagaagcgggactggttgaggatgtggagtttacgcataatgatcagacccatacagaaagcagaatcaaggactggaccaaacgtatggatcatcgacatcatgcgattgatgctttgaccgtggctctcaccaggcagaaatatatccaccgactaaatcgtctaaacagtgaacatggattcttaaaagatgatatcgaattattcggaggaaaatttaagaagaataaaagtcttcttactgaatgggccaaagcgtgtcctcacttcggtgttaatgaagtaagcaatgcgattagcgagattgctatatccacaaaacccattgacaaaatattctctcttgggaaaaagcagactcgtaaagatggatctgaatcccgtgcatttgtgcccaagggccaattgcataacgaaaccatctatggaaaaatccgggttccgatggagaataaacaatcattgaagtattgtctcgcgcatccagatatgattcaggacaagggaatcagagaggctgttaagcatatcctcgaagcacatagtggaaatacaaaagatgctcttaaatgggtgaagaagcatccattgaaagtgaccaagcagggagaacctgtagaggagtttgcatgctgggaggagaaactgacaattcgaactgcagtaaattctctaaaaagagacaatatagcaaaagtaattgatagacctttactaaaacaactcgaagagagaagtaaggaattcacagatgataaagcctttcaggcaagttttaaagagcgtccgatctatcatccggcaatgcctggcgttccggttaagtacgtgacgtgctatgccaggtggacaccagataaggtgatagctgcaagaaaggtaaatggtaagacgataggttatgccgctccagataataaccatcatgtggcattctatcgttcgccagatggtaaaatagaagagcaggtcatctcaatgtggatagcagtgaagcgagcgaagttaggccttcccggtgtaattacaaatcccaaagaagcatgggatatggtaattaaccgttctgaggatgtagattctgaagtagttaataccttaccgcaggaaggatctatgtttttgggtagtattcacaagaatgaaatgttcgtcttaggtctaagcgaggatgaatggaatgatgcaatatcacagggctacaataaagtcctgagcgatcatctatatagagtaaaaataatcacaacgggagattatactctgagtcttcatacatatgccccctctcccaagagtacgaaacttgagaataagcaaaatatgctaagatgtagtatcaagaagtggatatccttgaatcctcacaaagtagcagtatctccatctggacagattactccaatatttgattaatgataagtagctgctaaaaatataaaatgatgatcaagcgaactctccttttatcaaatccggcctatctacgccttaagttgggtcagattgtgattaccattcctgcttccgaaggaaaagaggaacgaactgtaacccgtccgattgaagatttagggttggtgataattgaaagtcattctgtcactctcacctcagctcttttatcagaattgttggctcataatgtggcggtcatcacttgtgatgaccaccacatgcctcaggggttgatgttaaatcttgatgggaatacattgcagacagaacgattcctggcccaaatcaattcctctgttccactccgaaaacaattatggcaacagacagtgaagcaaaagattgcaaatcaagcagctgttttgaaatttgcatcgggtgcagagactggatgtctggaagaatggagtaaggcagtaagaagcggagatcctgacaattttgaaggaagggcggcagcctattattggcgtcgtctttttgaagaatcctctaatttcaggaggggtcggtttgaagaagaaccgaatcatcttctgaattatggatatgctatactccgaggtattgttgcccgcgcattagtgggaagtggattgcttcccacgctgggtattcatcattgtaatcgctataattcctattgtctggcagatgatataatggagccatataggccttatgttgatatgatggtggttgagataggtaaaaactttggcctggacactccattgaatcgagaagtaaaggcaatattgttgggtttgcctgtggtggacgttactattgatggtctacgtcgtccgttgatggtggcagcatcaatgacatcagcatccttagcacggtgctttttaggagaacaaaagaagatctcctatcctcaattaaaagtgacgacataaaccaccacgagaaacagatgaataaggaaacacgatttagcgaatataagattatgtgggtaattgtattctttgatttaccgacagagttcaaatctcagaggaaagcatatgcagcctttcggaaagctttagtttctgatgggtttaccatgtttcagtattcgatgtacctacgtcattgtccttcgaaagagaacgcagaagtacatataaagagaatcagagcatcacttccaggcgaaggaaaggtatgtattatgatgattactgataagcaatttggagatataagaatctttgatggaaaagctcagacccattcggagacggaatcgaataatttagatctgttatagggatcatctcctctaaaatctaattttagaaagctgaaaatgaaaataaaatgagagtcggaattgagccgactctcatttttttattgaatatatttgcataagtcgttgatactcaatttatagcatatactatgttgtgaatctatatgcaaatataagaaaaagaacgcgaatcacaactgataa

SEQ ID NO: 1682 - DNA, 14521 bp, synthetic construct
  source 1..14521: mol_type = other DNA
  misc_feature 1..14521: note = Synthetic
tccgtggagtcagagacattcctttcttccttttcaggcttgccaaactcactgcctgatctttaacattcaatctgactatattaacatttcaaccggatatttacattgacccgaaatcttttgtatttctctttcacaaaatttattcaggcggcgtatatgggaggggggcgacagacgggagtaaaaataaaaagtcaaatcttttcagacttgacttttctgaggttccaaccagattcgaactggtgtgaacggttttgcagaccggtacctaaccactcggacatggaaccttgttgctgtttgcgagtgcaaagttagtcacaatttcttattttgccaaatattttcccatctttttttaatcaatcacattaattcagttgttttgagagatttatttagtttgcattaacatttgttcgtttttattgttatttatatatgcagtcggcaggaagcaatctgccgttgcctacttaacaaccattgcaatggataaaaccaatttcaggcctgagggcaaaaacctttatggcattttcaacgatagtttccccccgattctcgacggggtcacactcaccgttgaaaattatgtctattggcttgcccggaagggaagggtcccgtgtgtcgttactccctggaaccctgtaaaggaggagcacccctatgatgtgatgcgctttttctctcttcccattcggtctcgccacccttatcgttacggttatcctaaacttgacccctatatttggaagaatcttcgcaacactgatttcaagattgttcatgcacattgccctttctcttccggacgtctcggcgtttatgtcaagaagaaaaacggcgtccccttgatcggcacgtttcattcaaaatatcgggaggatctgaaacattctttcaaatatgtgccgtggatggtaccgattataatgaagcgcattcttgattttttcaacgcttgcgatgaggtgtggattccgcaggccgaagttgagccgaccgtgagagaatatggctacaaaggccccgtcacggtcgttgagaatggtaacgacctcgcttctaaagtgaccggacctcttgacctatataagaaggatgcaaaaaggcgtctgaatatcccggaaaatgagattgctttgctattcgttggacagcatatatgggaaaagggtctcgacacggtcatcgattctctgcgcctgctctcggataggggagtcaatttcagaatgaacctgattggcaacggttatgccgcccgcgagattcagcagcgaatcaatgactacggtctttccgggcgtgtcaccctcaacggaataattcaggaacgcgatcggctcagtgatttttacgcagcctccgacctattccttttcccgtcgttctatgataacgctcctctcgtagtaagagaagccgcggcgatgggcgtcccctcaatccttctggaagggtcgacggccgccgaagttatccgcgacggtaacaatggattcctcactcaaaaatcccctgaaaaattcgccgaactcgtcgagcatctctccaacaatagggaggagcttgcccgggttgccgtcggagcaagggaatccttggtgagaagctgggaggatgtggtaaatgaggtgatcgaccgttacgacagtcttatccggcgaaagcaaagataaccgattgatgtcttaatctgatttcggatttctctcttcccggaatcatatcattggagataaaaacttacagatgaataatccggaagatacttctaaagtcgtgaatatagaaaattcctccgaccgcggacacaaggattcggaagagtccaaagccttttccttgtggaaggtattgctcccagtccttataggcctcggagtggtggcgcttatgttctggcacgaatctaaaaaagaaaatcttgatcagatttggagccggatagaatttacaccttgggtgattttctgtctctttctcggcgttttctgtatgggtctgcgtgatatcggcctcacatggcgctttcgcgcgctgaccgaccgtcaactctcttggaagcaggcttggagggtcgatatgatgtgtgagtttacaaactgcgtcactccctccgccgttggcggaagttcgctcggtcctgttttcctgaacgctgaaggaattgaattcggacgggcaacaaccctcatgctcaccacgctctttatggatgaactctttttcgtcgtctcttgcccgattatcgttctccttacccctcagtctgaaatatttagttcgggagccgcaactttctcctccggcataaagttcaccttctgggcggtttacgcatttatatctctttggacttttattcttttcaccggtattatttggaagccgatgtggatccaggcagtgctcaacaagattgcgaaatggcgtttccttcggaagtggagcacttcgattcttggtcttgccgagaacatgatcgctacctctaaggaactccgaactaaacccattcgtttctggatggaagttttctgggggacagctctctcatggaccgcccgttacttcgtcgtcaacgctctctttctcggcttcctccccggcaccgaccgctatcaatggataatccttgcccgacagttcgttatatgggtggtgctgatggtcagtcccactcccgggggggccggcttgagcgaatggatcttctctaattattatggagatttggtcggaacttccgcaatggctctgattctggctattttctggcgactgatcacatattatctttatcttgtcattggctcggtgattgtgccccaatggttccgcaccacttatgcccggttcaaagcgcgtcataagagcgaaacctcggatgcgcccactttaaccgcgcaagcagcatcctcaggagcagaaaccacaacagaatgaaacctcttgttgtcatacccgcccgttttgcctcctcccgttttcccgggaaggttctggcccctcttcaaggccggccagtcatcgagcatgtgatgagggccgtggagaaggctgatttcccattgattgtagcaaccgacaatcagcaggtcgctgactatgtatcggagagtggtaggcgcgtcgttatgacatctcccgatcattcctcagggactgaaagagttgcggaggccatttccctggtcggcgacgaggcggagattattattaacgtgcaggcggatgagcccttcctaacatcaaggcaaatcgcgacattgggcaatttgcttgaaaccgatccggaagtcgggattgcaaccttggcaagaccgtttggtaagagcctgccggtggagatgttggagaatcccaatttagtaaaagtcgtaacagacgaaaaggggagagcattaatgttctcgcgttccgtgataccatttctgcgcgacatcccgcggaatgactggccgtcggcccatccctatcttatccatgtcggcatgtacgcattccgtagggaaacgctgaagagggtagttgcccttccctccggcccgcttgagcaagccgagcgcctcgaacagttacgatggcttgcagccggagagccgataaaagtaggcctcacacatcatataggtattggaatagacactcccgaagaccttgccctcgctgaggagtgggcaaccattcccttatgagtccataattcacgcgaagctcctccgcttaatacaaaagaaaaacgaggtcaaaccgaatggtgtgaccccgctttgaatgttttcacatcgggccattggcccttattgtgatttgcgttcattttattttgcatcggcaaaattataaaatttttgtgagctaacaaaatatttcgtaattttattgtgcgaaaatttaaggaaaagcatcccgattctgcttttcatgtttccaatactaactaacaaactgaaaataaagtatgaaagttcttggtcttgatctcggtgtcgcctccatcggatggtcactaattgaagtagacgaaaaattcaatcccatcgaaatattaggtatcggttcgcgcatcgtgcccctaaataaaagtgagccgaccgactttgcgggtggtaaaggaatcacgcgcaatgcggagcggactatgcagcggactatgcgcaaaggctacgaccgtttctccatgcgaagagatcatctccgcaaccggttgacatcactaggaatgtatgatgccggaaatactcttgacaatcttccccctttggaactttggggactgagagccaaagcggctacagtcggcaatcgcttatcacccgaagagctcggacgggttcttcttcatctgaatcaaaaacgcgggtatcgacatgcaaaggattccaccgacagcgaatcgaaagacaccgcctatgtcgaggctattaacaaccgatacaaggcgttgaaagaggagaatctgacgattggccaaaaaatgtatgatatacttaaagagtcggccattgtgacgaagaacggtaaaacagttgttacgggtcggataaaggagggagatccttactcggaaagcaatctgttgccgcgtcaggcccatattgaggaatatgataaagtcatggaggtacagtcggcgtatcatcccgaccttctcactcccgaaatcataaatgaacttcgacatattattttctttcagagacccttgaaatcgtgcaaacatcttgtttcggattgtgaattcattcgttacaagattgcggacgagaatggcgtgataaaggaatatggtccgaaagtggctccggtatcctctccgatttctcaggaaacaagaatttgggaggccgtcaataatctccaccttgtcaataaatcaagaaaagcttctcgaaagagagcaaatgccgacgtcccttccctttttgatgagggactgccggaaggaatcatttcccgcgaggcaagactgctcggccgggaatatcatctttctgatgaggagcggctgagagtggtcgaatatctaaggaaaaacgagaagctcactgcatctaaactactcgaaattctcggtctgaaaaaatctgatggcttcacacccaatataaatctcggcacgtcgggaatcaagggcaaccttacttatgtacggatcggccaagttttagaggatttccccggatatgaccatcttttgcgctttgatttgaaagaatgggataaggtaaatacgaaaaccggcgaaatatatcccgaggtttctgatgactgttatgaagaacccctctataaattgtggcatattctatattctctatccgagagaaaggatgtggccaatgcattggagcgccatttcaacatctcggattccgacctcgtggacagactgtttgctctcgactttaaatctgccgggttcagcaatcggtctgcaaaatttatgcgtcgtttgctgccattccttcgtaagggaatgaaatacagcgaggcctgtgaatgtgttggagttcgtcactctgactacgagaccgcagaggaaaacaaagtcaaagttctgaaaacctcgatcgaacgtctgcggaagggtgaactccgtcagccggtcgtcgaaaaggtgcttaaccagatgattaacatcatcaacgagctgacagaaaaatatggtgaaattgatgagattcatatcgagcttgcacgcgaattgaagcaaagcaaggagcgtcgcgctcaggccacgaaagatatctccctaagggaaaaagacaatctgagaattgctaaacttattgagcagcacggagaaactgccactcgaaaacgcattcagaagtataggatgtgggaggaggccggcggccggtgcgtctattgcggaaagtcgataaatgtgaagagcttcctttcgggcgacgactcggaggtcgagcatattgtcccgcggtcaatccttttcgacgacagtttctcaaacaagacattggcatgtcgtaaatgtaacaatgaaaagaacaaccgcacggcattcgatttcatgagctcaaaacctgagaagcagtttgaagaatatcttgctcgcgtaaaggaaatggcggagaatcctgtaaagaatctgcggatatcccggaccaaatattctcggttcctgatgccggaaagtgagttgcccgagaatttccttaatcgtgacctgaacgctacgcaatacatctccaggaaagctatggagttggcgaaggaaatttgtcgcaatgtacatgcctcctcaggaatagtgaccgactatttccgccatatatggggttatgacaggattcttgagcagttgaatctcgatcgttatgctggggcgggtctcgtcgatagggtagaggttgaacataaaggtcaatgtcatgtcgagaagcgcatccgagattggtcgaaacgtcttgaccatcgtcatcatgcaatcgatgcactcactgttgcccttactcgcccgggatatgttcagcgtcttagcaatcttaacactgagcgcggtttccttaaggaggatattgagactgaaggtgtcgatttcagaaccagtcattcccttgtagagcaatgggctgaatctcgtccccatttctcagtgaaccgggtgtcggaagccgttgatggtatcgcagtctctttcaaagcaggtaaccgggccgtcactcccggcagaaaggttctccgcaaggatggaacgatcgtcagggaatctctggtaccccggggagcaatgcacgaagcctccatctatggcaaaacttatgtctcgataggagagaagcccttgaaatattgccttcagaatcctgagatgattgttaacagggaaatcagggaaaagataaccgacctcttgaaaaagcatgataatgatattaagaaggcatccgcgtggataaagaaaaatcctcttgcctgcgatgactccggaaatgccgtgacaaagtttgaatgtgttgaaccccggatgacaattcgatataagctcgcggcaatcaattccaagaatgtcgacacgattgttgaccctgtcctcaaagatataatcaggaggcgactcgatgaaaccggtgaaaaaagtttcgcaagaagtcttgaagatagtccgatcacgatgccgggtagtcctcgagcgattatcaaatccgtgaaatgttatgcaaagctgaaagaggaatccacagtcgccgtgaaacattccaacgggcgtcccgtaggcttcgcgaagaagggcaacaatcatcatgtggctttatatgaaactcccgaaggaaatattgaagcacctgttacttcgatgtggatggctatcaaacgtaggcagctcggattgcctgaaatcatcagaagatcggatgaagtctgggataaaatatgcgacctccctgaatccgaagtattgacggaagtggcctctgaattgcctgatacacaatggaaatttaaattcagtttgcgtctcaatgaaatgtttatcctcggactatctgaagatgaatggcgagatgcaatcacttcgaatgatcgcaagactcttacaaatcatctttacagagtgcagacattatcgcctggagattatagattccgtctccacaaggatattgcatctgaattcaatcaaacgcaatatgccttaaggcatgcaataatatgtaagagtattaagtctcttttctctcttaatccgcacaaagttagaatctctcctattggagaaatagatcctgtagatgattaaacgcactattcatatctccaaccctgcatatctttcgttgcgtctgggtcaacttgtgattaagattccggatgctgaagatatgccgggcagggaggttacgcgcccaattgaagatttgggactcattattatagagagtcatctcgtaacaatcacatccgcagtcctatcatatctacttgaccacaacgttgctgttgtaacttgtgacgaacggcacatgcccaacggtttatttctgaacctcgaggggaatactctgcagagtgagcgttttgcagcacagatagaggcctcagttccattacgaaagcaactttggcaacagacggtccaagctaaaataacaaatcagggagaattgttggaaattgcgtcgacagccgaatgttcttgtatgaaaatatgggcaaagaatgtccggagcggtgatccggataatctcgaaggccgagcggcggcattctattggaaaacactcttcgctggtttgccacgatttaagcgaggccgctttgaggatgcacctaataatttgctaaactatggatatgctattctgcgcgctatcatagcgcgctcacttgtcggaagcggattgcttccgactctcggaattcatcatcataatagatataatgcttattgccttgctgatgatattatggaaccttaccgcccgttcgtagataaaatagtcctggagattattcgaaaacatggatacgatgtggaattgacaaaagatataaaggtggaattccttaagctccctgttctggatgtattaattgaaaatctcagacgtccactgatggttgcagcttcaatgacatccgcttcattagtgaaatgttttctgggagagtgcaaacgaataagttatcccaaattgaaataaagaaaatgtcttcaagatttaatgaatacaggattatgtgggtaatgatattttttgatttaccgaccgatacgaaaccaagacggaaagcttatgccaatttcaggaagtatcttctttccgacggattcacaatgtttcagtattccatttatgctcgacattgtccctcaaaagaaaacgcggaggcccatattaagagagttaaagcatttcttcccgaggaaggaaaggtctgcattatgacaatcactgataaacaatttggagacatcaggatatttgatggaaaatctccgggacatccggaagtagacgcgattcagcttgatctattttgaaaatttaaagagacactcaaattgttgtaacttcacatgatcgggttgtttctcaaatacaaataatcattttagagcggttgcgctgaaaataaaaaatcgtccgatgaagaatggtttccgtcggggaattcccatttttcatcggacgaatctcttatatttgcttaaataacagtcaaatatgagctatctgctgtgattctatctgcaaatataataaaatgaacgcaaatcacaactaactctctctcaactgagatcgtaactgagctgtgattctatctgcaaatataataaaatgaacgcaaatcacaacacaatttacattaaatcttattatatatatgctgtgattctatctgcaaatataataaaatgaacgcaaatcacaacaacggcgtagctaaaaatttacagaatgccgctgtgattctatctgcaaatataataaaatgaacgcaaatcacaacagtaatatcattctatctcgccgtgcatttgctgtgattctatctgcaaatataataaaatgaacgcaaatcacaactgctttcttatcatatcttcgagccacattgctgtgattctatctgcaaatataataaaatgaacgcaaatcacaacgtggcaatgttacaaactatacaatcggtgtgctgtgattctatctgcaaatataataaaatgaacgcaaatcacaaccattcagccttgcgaagacccggcacgcccgctgtgattctatctgcaagtataataaaatgaacgcaaatcacaacgattaacggcgtatcgtcttcggcttcctcgctgtgattctatctgcaaatataataaaatgaacgcaaatcacaacctaccaataacagaggattaactgcttgatgctgtgattctatctgcaaatataataaaatgaacgcaaatcacaacttatggatggcagcccccgagcctcccgaggctgtgattctatctgcaaatataataaaatgaacgcaaatcacaactccgtattttttcgcgccttccgattcccagctgtgattctatctgcaaatataataaaatgaacgcaaatcacaacgacgcaaacacactccggattaatggtaatgctgtgattctatctgcaaatataataaaatgaacgcaaatcacaacttgtttccggcaatgatgcggttgttcttgtgctgtgattctatctgcaaatataataaaatgaacgcaaatcacaacttaattatcatcatgctggcggcctggatcgctgtgattctatctgcaaatataataaaatgaacgcaaatcacaacacgtttccgaactcccatacacccggattcgctgtgattctatctgcaaatataataaaatgaacgcaaatcacaaccgaacgtcgtcagtttgtcgagctgctctgagctgtgattctatctgcaaatataataaaatgaacgcaaatcacaactcctctctcaatacgttcaatgttatttttgctgtgattctatctgcaaatataaaaaatgaacgcaaatcacaaccaaagttaagcgcttattttttaatttccagctgtgattctatctgcaaatataataaaatgaacgcaaatcacaaccgggaacgtctcctccttgagctgccggaagctgtgattctatctgcaaatataataaaatgaacgcaaatcacaacggagaatcgtatgctatggaacaatgctctgctgtgattctatctgcaaatataataaaatgaatgcgattcacaactccggacatatttactatcctttatgttgttgtgattcttaggttggaagaaaaattgccagtttaaaaactaattgctatttttgtaggttcacggcacgttggccgtttgaatgattttctgagtggcgtccggacatcattggtgaattcccctggtcgggaggctactccctttttcaaaggtgatttttttaatgaatccaaccgtgaaatttaattttcgggagatttatacccttttcgctttcgtggctttgatgatagtcggaggcgtcccctattgttatgcccgggaggaaactacggataccattttttccggcgatctgaatgaatttgtggttacccaaaagaagagaggaattgcaaaatcggtcgatgtggagaataaaacgttgatcaacaggaccgaactctttaaggcggcgtgctgcaacctcggagaaagtttcacgacttccccctctgtggatgtgagctattcggatgcggctacgggtgctcgccagattaaactcctcggcctaagcggtacttatgtgcaatttctcacggaatctatgcctgccttccgaggggcggctgcgccttatgctttcagatatgtgcccggtccttggatgaagagcatttctgtgtctaaagggagcagtacggtcaaaaatggatatgaatctatcacagggcaaattaatatcgaatatcttaagcctcaggatgaacagggcttcacggctaatgcttattttgattccgatttgaagctcgaactcaatgccgacggcaatatccatataagggatggccttagcactgagattctcgctcactttgaagaccgtttcggcagtcatgacggtaataatgatggcttcgccgatatgcccgacatccgacaggttaatttcaacaaccgttggcaatggcgcgcgggtcgttatattttccatggtggtttatcagtcataaatgaaaagagtagggcggggcagatttccggtcatagccattccgcctccgacacagcagatccatttttgattgatttatacacccgccgttatgaaggctatatgaagcacgcatatattctcgacccggagcgcaacgggaatattgctttcattggctcgctcaatatgcatcagctcgacgcctcctttggcagaaagggttacggagtcaatgagaaaggtgcatacgctcagctgatatatgaaacggattttgacgataggcataacttgtcggccggtttcagtttcaattatgactttctcgaccaacgggtcaaaactgaccacgacccggcatttagtcccgactatattgtagaaaaggagaacgtcggtggagtctacgcccaatatactttcaccatcagtgacaaactgattcttatggccggtatacggggagattacagcagtttgtacaagtggttcgtcactcctcggtttaacattaaatatacgccgattgagcgattaaacttgagagggtcgatagggaaaggtgctcgcactgtccatccctgggcagaatataataatcttcttgcttcgggacgcacaatggtggttgagcaacttaagcaagagaaggcttggaattatggcgtctccgcagattataccttccacctggggaacaataaaataattcttaatgcagaatacttctatacggattttaaatctcaggcaattctcgactatgacagcaatccggggtatcttacgattacccaactatccggaaaatcatattcgcatactttccagagtgatctcacatgggagtctccattcggactatctctcacaggagcttatcgactaattgatgtaaaatccacctatggtggcgtcctgcttgagaagccccttacaagccgttataaagcacttctgactgcatcttattccacgccgcttgaaatatggcagtttgatgttacgttccagatgaacggcggaggaaggttgccggctccttacactttgccggatggaaatatgagttggggacctcgctttaaagcgttccctcagctgaatctgcaggtgaccaggtggtttcgccatttctcaatatatgccggcggagagaacctgaccaattttaaacagaacaaccccgtcgtctggagtgctgatccatggagcaactattttgagccgacaatggtctggggtcctattcacggtgcgatggcatatatcgggattcgctttaatttcggacggctttaaaacaaatcatgtctaataaccaaaaatataagtataaaatgaaaaaacaaattttagttgcgttaatgtctttggttgctcttttcggagcggcaaaggatcttaagacactgcgggtcactactgaacccaggatggtgtgtggcaactgtgaaaacaagattaaaaagaacatccgctttgaaaagggtatacatcagataacgaccgatctcgaaggtcaggtcgtgacaatagagtatgatgccgacaagacggatgagaataatattatcaaggcttttgaaaaaatcaaatataaagctgtaaaacttgaagatggctgtgaggatgtctcggttgaaacgtgcgataaatgtagtcctgctgagggttgctctttagtcgaagtgtcatccggtcaagaatgagactcttccaagagatctgcggcaacttctaatccgccgtggtcatgcacgctctttagtagaggctttcactatctttgcagcagattctaaatccaatctgattttttccacgtcagcgaaagtcattcgctgttgagttaaaatcggttggattttttctttatccacatacagcagctttccaacagttatccatttaatccattcatggtcttgattgggggatagaccggaaatactgtttatttcgaggccatcccgtttgaaacctaaagtgacgccgacaagaaagtgtttcccgtccttctctaatgagttcagattcttagataattttgctatctttgcgtccgaaatctccggaagagatggcacatagcccggtgcttcggcatggctgggccagtcctcaggggcgactgtcttatcttccggagatttttttgtatccgtaagcactttcgccctcagtgcccatgtaggctgggaatcatttatagaatatcgcaggccttcctcagcaaattctcctacgcccagctcatgctcctttgccgctcgtgcagccgtgccgagtatgcctttgaaccttcccggttcccgaaggttctcatagctcatccatagaacatatcgtagctcattgtcgctgatcttcatgttgccgctgaatccgcaggagcgcaggaagtccatgaagaggcctttcagtttctgccaccaccgggacttgacatccttgaagctgccgtcctcggcgagtcccgccgtgtattcctccgtagcgatccggcgattccagccgttctgcgtggcaagcaggtcgatccgctccttgacatcattgtcggcattctcatacacggcgtcaaggaacgcatcaaacttatccccgaagtggtcgcgcagtcccttatgcgcaaccatctcatgcagtaacgtagcctctacgtcggcgatagaggagtggttgcccagtatgataacgattttgccggtccggggatcaaaccatccctttgccgtccg

SEQ ID NO: 1683 - DNA, 6373 bp, synthetic construct
  misc_feature 1..6373: note = Synthetic
  source 1..6373: mol_type = other DNA
cccacaatctgtgacatgcctctggcgataatccgaagtacctgtgcccccaaccttcagcgccggggctggggggttccggcgttcgtcccccgcagaggccgcttgcggcctcccatacccccagccctctttgtcgagcgacgcgagcgaagctcgtgtccccccaaaaaacaacgaaagcctgtcacacgacaggctccgaagataatgttttcacaacggacatttagtccttattgtgattcgcatcttttcatttgcaccacaaaaataacattactttttgggttacgcaaattttttactaattacgcaaattttttactaattttatcaccggagaaccacggagaaccattttcctctctttttcagaatgtgttcaccttttaacttaacccagaaacaatggtttatccaccaagacagtccttaagctaacctgcgttttggcttactgccgatctatttccataacccctcacatccaaatccgataaaatatgaaagttcttggtcttgacctcggagttgcctcgattggatgggcactcatcgaactcgacgacaatctgagacccgtggagatctgcggtctcggcagccgcatcgtaaatctcgcggtaaacgaagattccgatttcattaagggcaagggagaatcagtaaacagtcaacgtaccctcaagcgaacccaaagaaaagggttccgccgtttcgaaatgcgtcgagacaaccttctcgtccttctttcccatcctggaatggtcgacaaggacaactcgctgctgagtctgcctcctcttgaactctggcacctccgcgcccgggccgcgacagatggcgaaagactttctctcccggaactcggtagagtcctgcgtcacctgaatgcaaaaagaggctataaacatgccaagacttcctctgacagcgaatcgaaagacaccgcctacgtcgaagcgatcaacaaccgctatgccgaattgaaagagagcggtctcaccatcggtcagaaattcttcgcggaacttcaggagtcggtacaaacgactccgaatggccacaaggtggtttccgcacgtctcagcgagggagatccctacagcccatcccaccttctcccccgccaggcccatatcgatgaatatgaccggataatggatgttcagaaggaatactatcccgaaatcctcaccacggaagtcatcgaacgtcttcgccgtgcgatctttttccagcgccctctgaaatcgtgcaagcatctggtttcggactgcgagtttatttcccatacaggcagtgacggaaatacctacaggccgaaagtggccccttccacatccccgttggctgaggtcacgcgcatctgggaagcggtcaacaatatccgcttgtcaaaccgccacaataaaccccgaaagataaaaaatatagagacaggccttttctccgacgatattcctgaagaaaaatcaagagactggcgcctgctgcaacgcgaattcattcccgacagcgaggaacggctgaagatattccaatttcttatggataatcctaagatgtcctcaaaagatcttctcaagatcctcggactcaaggttgcggatggattcactcccaatattgactcccgacgcggacttaaagggaacgtgacccggtgcgagataaagaaagctctcggcgatacccccggcgctgagagtctcctgcgtttcgttctcaaggaggaacaggcggtcgacaatgagaccggagaaatcaccagacgcatatccggagatttcaaggacgagcctttctatcgtctgtggcatcttctttactcggtcgaggacaaggagtgcctcaccaaggctctgcgaaagcaattcggaatcaccgacccggccaccattggctgtctctacaatctggatctgaagaatgcgggcttcacaaataaatccgcccagttcatgcgccgcattctcccctatctcgccgaaggagagatgtatagcgaggcgtgcgcgcatgcgggcttcaatcattccggctatatcacagccgaggagaacgctgctcgtaaattagacaccagcctatcgccgctcaggaagaactcactgagacaaccgactgtagagaaagtcctcaaccagatgatcaatctcgtcaattccatagtcgaagaattcggccccatagatgagattcgggttgagctggcacgcgaactcaagaaatccaaagaggagcgcgcgaacgcatcctcggatatcgctgcggccgaaaagcgaaacgacaagttcgccaaactgattcttcagtacggtatcaaaccgagccgaaacaaaattcagaaataccgaatgtggaaagaggcggacgaacgctgtgtctattgtggaacccagctcagtattcaggcctttctttccggagaggacacggaagtagagcacattattccgcgttccctactctttgatgatagtttctccaataaggtttgctcctgtcgccgatgcaatcaggagaaaaaggcaaggaccgccttcgatttcatgtcgtcaagaggagaagaggaactacagaaatatctcgtccgtatcaagaatatgttcgagaaaaaggaagaccgaatctccaagacaaagtatacccgcctgcagatgaccgagagcgaaatccccaaggatttcatagcccgcgatctgcgcgagacccaatatatctcacgcaaggcgatggagattcttcgccggatatgcagaaatgtatacgcctcctccggaagtgtgacggacttctttcgccatgcctggggctacgacaacattctccatgatctcaacattcccctctatgaaaaaggagacctggtcgtcgaagaggattacgagcacaagggccagatacacaaacgtcgtcgaatcgtagactggaacaaacgcctcgatcaccgccaccacgcgatcgacgccctcacggtggcgctgacccgccagggctatgtccagcgcctgaacaacctgaatacccagcgtgagtttatgcgcggagatattgagaacagtggtgcccgattcaaagacagtcaccgtctcctcacacagtgggcagactcccgtcctcatttcccggtcagtcgcgtagcagacgcgatcgatgccgtcgcagtctctttcaaggccggcaagaaagtggcgacccttgggaaagctcagaaaagagccgacggaacgaaatcccggcctctggttcctcgcgcccccatgcatgaggaatccatctacggcaagatgttgtatcctataggtgagaaggatctgaagtattgtctgtcccatattccgatggttgcggacaaagaaattcgggaacgactcgaaagcattctccgggataatgacggtgatgtaaagaaagccattaaatggcttaagaagaatcctgtcatcaatgaaaagaccggagaggaaaggacggctttcaagtgcttcgaagaacgtatggtgatccgctataagctctcgaccttgaaagcgaatcagatcgataagatcgtggataaagccgtcagggaactggttcgcgcgagatatgatgagtgcggaagtgacaaggctttcgaacagagcctcgccacagctcccctccgcttcaatccctggtccgcaccgatcaaacacgttcgatgctttgcccatttggcaccggaaagcacaatcgccatccgccacgatggggaacgcgcggtcggttacgccaaatcaggcaacaaccaccacgctgctttctatcgcaagccggacggttcgatcgagcagatggttgttcagttctggaccgcattgggacgcaagaatatcggcttgcctccggtgatccgtgatccaaaagcagcctgggcccacatagaaaatcttccgtccggaaccaagattgaggaaatagccgcctctcttcccggccacgactgggaactgatccagagcctccagtcaaacgaaatgtttgtcatgggcctgagcgacgacgaatggcgcgatgcgttggccggtaatcggaaccttcttagcagacacctataccgggttcgtgtggtatctgaaaacttttatgtattcaggcttcatacctacacatcttcggaagtaaaccagagccacctcaatatggggactgcaattagaagtagaagcataaactctttccttggcctaaatccccacaaagtcaagattactcctactggaaaaataatcccgatagatgattaagaagactctccatttctcgaatcccgcctatctgtctctgcggctcaagcaacttgtgattacccaacccggcaatgccaaggagccgcagaggcaagttacgcggcctatagaggatataggagttataatcatagagagtcatgcggttacgataacttctgccctgctttcctatctgctggcaaacaatgtggctgtcgtcacctgcgatgagcggcatatgccgaatggcctcctgctcaatcttgaagggaataccctgcagtctgagcgtttcatcgctcagatcgaggcctcccaacccctcaggaaacagttatggcaacagaccgttcaggcaaagatagccaaccaaagtgcccatctgcgtcttgccacctcaaccgaaaccggatgtatggattcctggataggtaaagtgaagagcggagacagcgataatctggaaggccgggcggccgcctactactggaagaacatctttcaggatattgacaatttcaagagggaccggtttgaagatggtgtcaactcgttgctcaactacggttatgctattctccgggctgtaattgcccgctcgcttgttggcagcggattgttgcctactctcggaatacaccaccacaatcgctataatgcctattgtctggccgacgatataatggagccatacagaccatatgtcgatatgctggtagttgggatcctcagggaattcggacccgacgcggaattgaacaaggcaacgaaaaccaagcttcttggtcttccggtaatggatgtggtcatcaatggtctgcgacgtcccttgatgatcggagcatcgatgaccaccgcgtcccttgcacgctgctacctgggagagatccgaaaaattgcctatccgacacttatcgagcagccattatgagttcacgttttagcgaatataagattatgtgggtaatggtattctttgatcttccgaccgagacaccgggacagaagaaagcgtacgcacaatttcggaaggctctgctgtcagacggcttcactatgtttcagttctccatatacgctcgccattgtccctccaaagaaagtgcggaaacccatatcaaacgggttgagatggcactccccaaatgcggtaaggtatgtgtgatgatgataaccgacaaacaatttggagccataaagatatttgaaggcacagttcccgcaagagccgacgtcgacgctatccaactcgaactcttttgaatcccaaaatcagaccaataaaaaaacggaaggccacaaagccctccgttttttcatttgcaacattcatctcaacatattaatccataatgcattacaaacattgagatgtgattacttgtgcaaagatagtgaaaagaatgcgaatcacaacgtcagcatctttcttacattttgacgcaaagatgtgattacttgtgcaaagatagtgaaaagaatgcgaatcacaacatcttcttgaactcctcgtttagcgcgccggatgtgattacttgtgcaaagatagtgaaaagaatgcgaatcacaacttcattgtcatactgccagtcaggatttgtgatgtgattacttgtgcaaagatagtgaaaagaatgcgaatcacaactctgacgtaaaagagtacattaatgatgaggatgtgattacttgtgcaaagatagtgaaaagaatgcgaatcacaactctgacggcctcaaacacttgcgacaataagatgtgattacttgtgcaaagatagtgaaaagaatgcgaatcacaacgctgaaacaaatatcctcatcgccatgcttgatgtgattacttgtgcaaagatagtgaaaagaatgcgaatcacaacatggagactttaaaaactccctctccttttgatgtgattacttgtgcaaagatagtgaaaagaatgcgaatcacaacattgctgacttgcgttagagatttacgattgatgtgattacttgtgcaaagatagtgaaaagaatgcgaatcacaacaatgtctcggcgcttcgtcctatgcctaaagatgtgattacttgtgcaaagatagtgaaaagaatgcgaatcacaaca

SEQ ID NO: 1684 - DNA, 14701 bp, synthetic construct
  source 1..14701: mol_type = other DNA
  misc_feature 1..14701: note = Synthetic
aaactgatctcaggtccattgttccggaaaaatacagcgcccttgccatttgggtaatgcgaaaggcacgtgtggttgtgcctaatgaacgcaattcaccaaactcaacacattccgggtcaggagaaacgccaatctcatcaaatatttttaaaaatacgccatcttcaccataacaggggcaaggacgaaaaccttcatattgaaatatgtttttacgaaacttattgaggtcgatttcttttttttgcattcaatcttaccttatttatgttattgaaacccatagccaaaaaagttttcatctcgctcaataaatttaattaatttggtgcagtaacgttaacttggtgttcttttgcataacctgtttcagattggaaagtttctgcatggccctgcaatttatttttatcaccataaccatggcgttcattgatattctcattaaaacactttatgcattttgagggtagccggcctcccaatcactcggtcttaaaaaatatattgttcagttttaagtgtaaagtcctcaaaagagattaccatttaacttaaggcagattactttttatattgagcatcactgtatttcattaaattttttaatagccttgtgcctgcatgacaggagatgaagtaataatattcgaaaaggggcttaacccccaacacgcggatcaaaatgcgcggcaacctgctgctgcatcccaggagtcgtaacggtcagtggccggtccatggcaattattgcgacatgcctttaaatttggcgatgactgcctgaaagggttgataaaattcttcaagcttaaagtttcctacacagttgatagcgagaaaatcattttctgttatcggcatgtcatttgccatttgattgagcgtcttgtctgagaaaatagcgaaggctagcactgaacgctatttggtcagatgaagccacagttttttcagctcggcaaaaagttcagggttgttctgcaccatcgcagaggccggggatgcaggggccagggttcccgctacgataacaagccggtaccgaccctgaaattcgtctccaatacgcccatatttgatcatatgatggaggatatggacgtgaactgcggcaccattgtcgacggtaccgaaaccctggaaaagattggcgaacgcatctttcaggaaatgctagccacagcgtccggccgcaaaaccaaatccgaacaactaggggtaggcgatgcagagttcgtcccatggcagacatgggcgcagatgtaggttgctgtctcgtcgcggatccaatcctgtagccagcatgatttcgctgcgataggctatgggcagggagtgaccattgcgttgcgtagcagtggcaactttgatgcagtcattttttccacccagaatgtcattaagcccatgcgagcatctacgcattaaggggtagaggtattaaagggggattactggccacgcgtatataaacttttagaattaaataaaaagactgcgcaaagtgaattaaatttgtagtgttgaatatgcaaaatgttaattgatcaaggtatcgattaatccatcgacgatgatgactatttcatctcaaatcgggaggctaatttggataatttcaacaaacggggaaaagctgaggaggcaaaagccgctttatcagccgagcttcaattcaaagctgaggcgagaagaaacaagcgtgtcggcctgtggtttgccgataccgttctgggattatcgggggatgaacaggaagcctttgcatccaaaaccattgaggcagactttgaggaaagcgggtctgatgatgtgttgcgctttttgaggcaacaggcggaaaatgcaggaaaaactttcgatgaaggtgcagtcgtctcacagatggacaaagaatatcgtctggctcttgaagagttgtcacaaaattagtcatcctgttaccagaatgatagcggaggaggaactcccccccgtcacgcgggctatgattacgctggcctgacccaatgagatttacccatccaagccgtttaaaacttatatatataccctgttatgcggcaacgtgacacgcaatatgcaaactaaaaattagtatattaaaatcaaaaatacagaattaactttatttttagggcctctcaaaatgatttctcgtattttgtttctaatgtttatcgtcattccggtaacagcctttggtcattcacccgttgcatacgttttgccgcaggacggatcggtaataaagaaggctcccgatgagatggaaatagtgttcacaggtccatcaaaacttataaaacttacactgcagaaatttgcttccaatgagaaaaaatcattcatcgggagccttttgaccgatgaaggtgagactgttgcgcttagtggcgactatctgatgaaagaaaataaacggcatctcatcgctctgccacctctcgacgaaggtacataccaaacaaactggcgcgctttaagtgaagacgggcatacgatcaagggtgaattttcgtttgaagtttcacctgaagggatcgattttgtcagcgctgaaagtgcatccctgaaaggggaagggcaaatcaagcggatcaggggttccaaggtgacgatcaaacacggtgcaataggtgacttgatgccagccatgacgatggaatattcggtccctgacaaacaaactcttgcgagccttaaaaaaggagacaatgtccttttcacattgaacaaggacttggaaattatcgatttaacaagtcagtaagataatccgaccttacagttccaatttgcagatgcatgaaaatgactttatttcacaaccattttacgttgaccaagtctattcaggaaacgctatacggcgttgctgcaggttttattgtcctaaccgcggtaattttcagtggaaaggcagacgcgaacgaattgcctccatctacccatgaatacaagtcggtgttcgaaagttacgcacaatgggagtggctggatacggaggattggcgcgaggccaatgaagatgttggtgagattggcggttggcgatattacgctcgcgaacccaaaaaaggtgtcgaggaaaactgatatgaagaacagttacctgagcattgctttagtattaataaccaccggctgcagcagctatgatttcgagcagaacataagcgccgtgaatgaaaattctgaggtggtttttgctggtgaagtcatcgctgccaaggatatagatgagcaaaatgcgttaaaggaacgagccaaaacactccttgaaaatcaaataggtgaggctgaagctgttgagttaatgctaaccaagagtccagccttccagaaacttctcttcaacaatttgagggaaggttcactggcggcccagacaggccgaattcccaaccctgcttttgcatttgagcgaatggtgaaaggtagcgaaaccgagtatggaaggtttctaacatttggtttgctcgacctggcgtccttgccctcacgacagaagtcctcaaagatcgctgtggaaatcgctaccgttaatctggagtcagagattttttcctcgatcatggaggtcagatttgcgtggttggatgccgttgcggctgagcaaagattttctatagccgaagatacattcgttgcgctctccgcatctgctgaaatggccaagcggatgaaacagaccggcaacatgacgacaagtgataggataaggcaacagttgctatactccgaagcgacaatcgcccttgcgaaggcaaaacaaacaaaaattacaaaacgggaaaggctgatccgcttgattggccttaacgatgatgaagccgacacgttttctctgcccgactccttgccggatgttcccgaaactccagcattgatggaagagattacacgaaactttgagaaccggttcgatgtaaccctggcgcgcctcgactacgaattggcacttgctagaactggtgtcgaaaatgtcagctcttatacggacattgagatcggcttgcgaaatgaccggattaacgatgatggcagcatatcgaacaaaaaagggtacgaaatagaaatccagatccccttgttcgattggggcaacctgcaaagagacgcaatgcaggccgaggttttaagcaaacagcagaattacaaacaggtattgctgtccgcggtatctgatattcgaagcgcatacaatgcataccggacctcattcgatattgcgcagcattatcaaaatcaaattataccaatgcacgaaacactactcgaagaagccacatacaattacaatggtatgattattggtgtttttgaactgttggaggccggccgcgaaaaatccctggctgaaacgaatggcatcgaggccaatcacaatttactggtctctgaattaaatttgaaaaacgttgcccttggtaaaccggctaatgttgaaaccggcgccatatcggcaacaaaaattaaaaagaaaaagggccactaagcaaatacactctagacatccataactaaagacagtgcaagtaggagatattaaatgaacacaaggcgcgacttcatgaaaatgtcagcactggccggtgggatcatagctgggcagtctgttacgtcaacagctttggctggtttgcccgatttggtctcacaaaattctccagacacccaagatccagtccagcctgacggacccactaattacaacccggtggttacacttaacgggtggacattgccgtggcggatgaaagacggtgtcaaggaatttcacctggtcgcggaacctgttgttcgtgaacttggccctggcatggaagccaacttgtggggttataacggacagagccctggcccaacaatagaagtcgttgagggtgataaagtccggatctttcttaccaacaggttgccggaacacaccagtatgcactggcatggccaaaggttgccgaacggtatggatggggtggccggcctcaatcaaccggctgtatcacctgggaaaacttttgtgtatgaatttgaggcaaaacgcccgggtacatttatgtaccacccgcacgctgatgagatgacgcaaatggccatgggcatgatgggtttttgggtcactcatcccaaaacaaaacacccatggatcaacgaagtcgaccgggactactgcatccttttaaacgcgtttgacatagtaccgggttcggcaacgcccaagatcatgaccatgcttgattttaatctttgggcatggaacagccgcatttttcctggaatagcaccgttagtagcgagaaaaaacgaccgtgtcagagtgcgtgtcggcaatctgacaatgaccaatcaccctattcatgttcatggaatagagttcgaggtaacagggacagatggaggaccaactcgtccagaaagtcgctggccggaggtcaccaccgacatcgccgttgggcaaatgcgtcagatcgagtttatcgctaatgaagaaggtgattgggcaatgcattgccacaaaagccatcactcaatgaatgcaatggggcacaacgtgccgaccttaatcggtgtagatcacaggggaataaccgaaaggattcaaagactggtgcctgactatatggttatgggcgagaggggtatggctgacatgactgaaatgtccatgccattaccggacaacactctccctatgatgacgggtgagggaccttacggatccgttgagatgggtggtatgttcagcatgttaaaggtgcgaaaggacattccccacggggtctataccgaccccggatggtaccaaaatcctgtagggcatcaagcctttgaatatacgggggagctgccagaaatttccaagcagctttcatccggagacggacttttggaaccaaaaacatcaccacaggtatcgcaattcatggctgtaaaaccaaattatagaaagggatagcaagacttcatcccagcctgtcatgaattatggacggtgtggatagcagacaaagaggcgagggtttggttttgttgagccctggacagacggtaaagccatggacatttggatcgtttttaaccctgtaataaggcttttgctttatggttcagttctcgttgcaaccggttcactcttgtttgctttccatttcaacaaataccagacgatcgaaaataaggcttattgctcttcactttcaaagaacgcatcgcttctgggattaataatttcagcattgttctttttatcaatcagcggaaatatgggtggcgatctaggcagcgtgttttcgccgttgatgctagggcttgcccttgactccaagtccggacttgcagcaatgctttgttcggctggttttttggtgctttatctgcaaggaaaaatttttccgtcgtcgttgaaatccggttctaggttactcggcgtattcctcttgttactttcctttgtgatctcgggccatgcttcaaaactaggaaccactgcccagatattgctgatctttcatttgacagggatcgcattctggattggttcattattaccactgcgcaacatgtgtctttcaagcaacattaaaaacctgcaccaagttacccatcaattcggcaagatagcgatgttctatgttcttggcttgctcatagccgggatatcattcgcctacatgttgattggtgatatctcattactgatagaaacctcatacggcattgtgctttgtgtgaaggttctcattgtatgtacattgctttttctgggcgcactcaacaagttttggatcgtcccattgataaaatctgacatggagaggggcgcaatacgtctcaaaaattctgtgcaggctgaaattatgctggtgcttttggtatttttatttaccagtttattgacgacatcactaaatcttccaatgggtggataaccactttttgcttaatattgttaccaattcggcagtgcgccgaagccatgctggtgagtgactattagccaatggcgatccacgtataggaagtgggctacataaccgacatgggctgtgttcagcggaattgttcgggttatcgtgaagagaaatggtagcggaggagggacttgaacccccgacacgcggattatgattccgctgctctaaccaactgtaatctccggttttccttgatcttttataatagacccgtaactcggtcactcctgtgtcacataaggagactaaagtggctactttcaggaaacgcaatggcaaatggcaagcaatagtcagacagagaaacttaggaacagtatcgcgctcttttatcaaaaagacccaagccatcaagtgggcttttgagcaagaagaacgcatagaaagaggcgtctttggctctatagagccgtctgaggtgaccctaggcgaactacttcaaagatacagccaagagattacccccgccaagagaggcgcagagactgaacaaaggcgcctaaggaggctgattggcgaccccattagcagtaattccatccaccaactcacctcacaggcgctagccagcttcagaaatcgtaggcttatcgatgggcaacgcacctgtcagtacgaccttatcctcatcagacactgcctaaagatagccatgagtgaatggggactaatgttgtctgttaatcccatcgaccaaatcaaaaagccaccctcacccatggcaagagaaagacggctgaacgatggtgagtatgaaagattagaagcagcatccaaacttacccagaacccacacatctggccaattgttgtctttgccatcgagactggcatgagacgcggagagatacttagcttgtcttgggacaatgtcgacctcaaacgccgcatagccttcctgccgatgacaaagaatggaagcagcagagaggtaccattgtcgaataaggctgtctctgttctccaacaacaacgaacgataacaggcagcagccccttccctgtcaactccaacgccttcaggttagcgtgggaccgcctcagaggccgcgctggtctcaacgaccttcgtttccatgaccttcgtcatgaagccatcagcaggttctttgaaatggggctaggcatcccagaagtggctcttatctcaggtcacaaggacgtgaagatgttgtttcgatacacacatttaaaagtggataatctggtgtcgaagttagcttaaatgagtctttggctcgcatcttgcacaataagaatacggttattcttaacgccaaagaaatgacatcaaactaacttatgcatttcctcccttagacttcgcccttgctggtttgcgctagtgagggctcttcttatgaagtcaattgggtcccataccaccataaaaatgatcctcggcacctcttggtatcaatcgatttcaaaataatggctaaagggtcctttgttgttattaatattgttatttttattaattgaagacgagaaagatctgtttttcatggttgaatggattagaggtcagtttcgttattcgcttacaacggaggacttaaaagctgaaattcaagttgagcacactagaggtttggatcctgaagttatgcgtccgaagtttagtttcggtttgaatagagcttagacaaaatgggctggtactgaaatcaaacttacctaaaccacacttaaagcgcgtgagataagataaggttcttcaagtggaattgggttgatttttaatcgtagaaattagttgtgactgctatgcaacgcgatagtgctgctaaccacgattatgaattctaaatgtgcgctttcaacatctgggatactgcctctcaatttaataacgaggtctcttatgattattagcgctaaggcttcatcttgtatgcttccaccggctttattccagctaactaatcccgtgtgcattgggtttttatttgcatcagttatcggaagctcaatcagcgcgccgtcataatcaaattccatacccaatgatttaagcttcattacttcatcttgaagaatttctctggttgcatgttcttgctcgtcactgtcggatggggcaatgtccaagttccatgcatagatggtccattttccattttcagcatgaaaggtttgtgaaccggagtcgttgccgtagtagcgaatgttactcccaagcttttgaagaaagagatttgtgccttcaaaacccaatgtttccggtaggctttggagaaacgatctccatgggagttcagtttgagctccatcatcggcttgttcgatgtgggcttctttgtgtttttgattcatgcctaatcttgtatggacacgcatcaatgcatgagcgtcaggatccacccgtgctttactaattaaatcatcagatactccaacgaggcgggcatattcctcaatattatcttcaccattttcatttaatgatggtaagtcatcagctaacaagtaggcggcaaatcttatatcgagatctctctcatcggcatcatagtgcttgataagagtatcaagataagctctgacaaatgggttggtccttgctctttcagcatgttcataggctcgtttctcaacggggtctatggaatttgattttcgcctatagaggcgtttcaagaaatctatcatcttactagctgcagctattagtaaattagttggaatgaattataaactccggacgtgtttttgagcttgccctttttcattcttcacaacccatgatcgagttaaggcgttcaagtcgttttgcttggaggtcaaggatttttgtcccttatttaattcttgtactaataacaatatctttcgtgattaaacctacgtgctttttcgaacaagtatgagaagatagtatttgccgtggtagcattaaagcaaaagggccgcccagaggcggccctccgatttgtgcgggaaacccacttgttaaccataggctcctcaatcaccagagtattatatatataaatatacgatatagatatatgataaggttgtcaaataaggaggagaccttggcagctatgaggcttggcctggacataggcacgaattctataggttggtgtttattaaacttagatgatagcggagatcctatctctatattcaaaacgggtgtacggatattcaatgatggaagagacccaaagtcactaacgtcacttaaggcaaataggcgccaagcgagatctgctaggaggaggagagaccgcttccttcaaaggcagtcatatctaataaatgagatggtcaggcgaggcctgatgccagaggatgagaatgagaggaaatctcttgctctaaaagatccctggcaaattagaaagtccgccctcgataatgagcttaacccatttgacgttggaagggcctttttccacatcaatcagcgacgcggctttaagagcaaccggaagtctcaggataatgaggctggtgttgtaaagcagtccatcgcagagctcgagatgcgccttttcgaaacgggagctaggacacttggcgaattcctcgcagacaggaatgcgtcagggaagactgtaagggcaagaaggctcgggaaccagacgtctgctctttatgacctctatcctaatagatacatgctcgaaaaggaatttgacgagatttggtcgtctcaggccttatacaatccatcactcttcagtgatgaggcaaaagacgccgtcaagggcattatattctatcagaggaagctaaagcctcaggaagtcggtcgatgtaccctgatcccagaagaggagcgcatcccaaagtgcctaccttctttccagaggttcaggatttaccaagaactagcaaacctctcctggttagacagggatggcaaggctcatcaagttatatcttctatggaagcaagagacgctctattcgaagaactcgaagctaagaagaaggtcacctttaagaggatgagacgaatcttgaagagaatgaatgtcttcgactttgacgcctctttcaatcttgagtcagacattaggcagcatctcgatggcaatatgacatcatgtcttatgagatctgatgacttgatcggaagcgcctgggacagcatgaacgaagacgaccaagacgcgttaatcaaaatgctgaatgataaccagattgatgatgaagaagtcgagatgagcctctcatcagactttggactaactaaagagcagatcgaagcatgccttgacgtgagactgccagacggccacggtgctctctcaaagtccgccatcgacaagatactcccgatcctaaaggatcaggggcttgggtattatgaagccgtaggggaggcaggatttggagaagcaaacctatacgatccgaatgcgccgctttctaactgtttagaatattatggcaaagccctctcgggacatgtgatgaacgcctcgggaaaacccgaggaacgagacgaggcaaggtatggttcaataactaatccaagcgtccacatctcactcaatcagatcaggcaggtcgtcaacgagatcattcgcctctatggcaagcctgacgagattgttcttgagatcggaagggacctgccgatgggagcagacggcaagcgtgagctgaagaaccgtcaaaagcgcaatcaagataaaaatgaagaagcaaggtcagccctaaaacggcttggcgttatcgacactaggaagaataggcagaaattccaactatgggagcagctcgcttctgatccaacagaaaggtgttgtccatttacaggacgaatgatctcagtttcagatctgttcagtgataagattgaagtcgaacacctccttccgttctcctcgacgctggatgacagcatgtcgaataaagttgtctgttttagagaagccaatcgcgtgaaggggaagaggtcacccttcgaagccttcggatcttctcctgacagatacgtttgggaagacatacttgatagatcaaagcgcctgcctggtagcaagaggtggcgcttcctcccaaatgcgatgaaaatgtttgaagaagagggcggcttcatggagaggcacctcaacgacatgcgctatatctccagatacacatcgcaatatctctcaacgatccttccaaagaataagatctgggttgtgacaggaaggctaacttcgatgctgaggggtttctgggggcttaatagtgtccttagaggacataatgatgacgcagaaggaacttccaaaaagacaagagatgaccataggcatcatgctgtggatgcagttgtcattgctatgacttcgagaggcctcttacaggctatatcaaagtcagcgagacgttctgagatcgattggatcgatcacctttttcatgacaggatcgacccatgggatggctttagggacgaagtcaagacgaacatcgacaatatcattgtctcccataggtcgagaaagaagtatcagggacagcttcataatgacactgcatatggcctcgtagagcataacgaaaacggcgcaagtaccgttgtaaggcgaaagcccgtcgatggcttcaaaagcctaagccacgtcggagaaataagagaccacttaatcaaaaaagcgcttgaagtggagctccaaagtcactccggtaaagacttccagagtgtaatttctgcctggtgtggagagaggggcatcaaatcattacgcattgttgagaaaatcacagtcataccaatcaaggataaaaataacctcatctataaggggtataagggtgacggcaacgcatatatggaaatctatgaagagcctggcactggccgttggaagagtgaaattgtttcacgatttaatgctcagccaattaaggctttcacgccgaactggcaaaaggaacatccaacagcacggcttgtgatgcgccttagaaagaacgacctcatcatgctcgaagaagatgatcaatcagttatttactatgtacagaagataactggaatacgtgtgtatctggcgccgcattttgaggcgaatgtcgatacaagagacagaactgcagatgatcaattcaacttcacaattaagtctgcgagctctcttaagaaaggaaaagccaaaagagtgcatgtcagtgcaactggattgatttcagaggcataaagacttggttggcagagttgtagagataagtggtgaaccaaggcatattggcattaggcgtggatcgctaactgtatcagacaagtcctctgaaattggtactattgatctcgacggggttctggcaattctgataacctctaggggggcctccttgacaagcccttttatcactgaagcgtcaagaagaaacataccaataataacctgcaatgaccgctttcaaccggtatctatctcactgcctcttatacagcatagtgatcagacaaggagatatgaagcgcaagtgggtgttaaaaaaggcttgaaaaacaaactctggaaacaggtggtggcaagcaaggtaaacaaccagtctgctcttcttagcctccttaacgcatctggagctgcgaggctgaagcgtctagcggctaacgtgcggccaggtgacccggaaaacattgaagctcaggcggcgcaagtctattggaaagggctttttggtaagtcttttaggagagaccggaatggggccgcgccaaacaactttcttaactatggttatgcgttgcttcgcagttcaatgacaagtgctgtccttgcatcaggtttgcatcccacatttggtctttttcataagaataaaaacaatccgttatgtctggtcgatgaccttattgagccatacaggccgctggtcgaccaagttgtttttcgtattcaagagaaaggtcttgtggatctaacacccgaagcaaagcgagtccttgctgcagttcttgttgcggatcaaagtaaaattggtagcacctcgccattattcaaacatatgcacaaccttagtttggcgatgtctgatctttttattggtaaggaggctacgctacatttcccaaacttgatgtccgagcttgaggtagaggcgttagtgagcgaatgttaagtggatacaggctgatgtgggtcttagtgttattcgatttacctgtttctactaaaaccgaacgcaggaaagccttatatttccgaaacgtactactcgaccttggttttgaaatggtacagtattccgtatgtataaaacattgcgctggaaaagagcaagctgaaggcgtgcaaaataaagttagcctagccgttccagagcatggaaatgttaagcttatattcattacagacaaacaatttggaaatattgtccaccttggaagccataaaaaacaaagggttgtttcagaacaacttgcgttattctgaatgcttacaacgatttatcccaagtctactatagcactctggtgattgagggcctatagcaactggacaccactgtcagatgcagtgcgtgatactatagcactctggtgattgagggcctatagcaacatgttctgtgtcattgtatatcctcaatccactatagcactctggtgattgagggcctatagcaacggaaagcgaccccgggattggcaagaccgcactatagcactctggtgattgagggcctatagcaacggcccgtccggtttcgtcatgggagaataactatagcactcttttgattga

SEQ ID NO: 1685 - DNA, 14536 bp, synthetic construct
  misc_feature 1..14536: note = Synthetic
  source 1..14536: mol_type = other DNA
tttcaatgttgcgcaccgcgcgattggcgatttccagcgttgattgcaacgcggcacttgcctgttcgaaatgcgccaaggcggcgttgatccgtgccatattcatatctgatacgatgcggttggttcgctgcgagatgcctaaggtgacttgtgacgtgcgctccatattatcaagcgtacgggtaatggatgcgctgttactggcgctggcgacattggcaatgttctgacttgcttgttgcatattggtcatgatctcgggcgcctgttgtgaaatttgtgatgtcagccctgtcatgcctttaagcgcttctctgccttcgctatccagaatatcgcggactgtatcaagcaagggtgccagactcgattgtgcgatcatggtcagcttatcagcagtgcggctaatttccgccatcacattaaccgcgtccattgatgctatttccgatccgacaggcaaacgttcccctgaacccgctttgatctgaatggcattggctgacagcaaggatatggcggatatttcggcaacactatcttgagggatatgccatccggatgtgatgtcgagattaatgcgaaaccgcattcccttatcgctggatatcggctcaatcgagtcaaccgacccaaccgtatagccttcataaaccacgacagcaccgctacgaagcccggcgacattcgaaaaaaacgcgtgatagcggtcatacagacccagctgcccgcggacaatcacaaaaatcgtcacaatcaggaaggcaccgccaagcacaaaaattccggccataagatcagcttgtttcaaacgcatggaatattcctctgttcatcaggcttcaccaagaagccgtttcagatgtgtttcctgactaatgacttcatcatcggcaacacggtttatgagattctgaatacgctgattagcgctggattttatgtcgtcaacagaccctgaaaaaatgatatagccgcgatcaagcacgacaatgcggtcggcaattttaaaggcactttccaattcatgcgtcaccaccacaacactcatcgcaagattgtcccgtagtttgatgatcaagtcgtcaagtgaagccgagatcaccgggtccagacctgccgaaggttcatccatgaacacaatacgcggatcaagcgcgatggcgcgcgcaacagcagcgcgtttgagcatgccgcctgaaagtgccgatggtaacaatgcttccttgccaagcaagccaacgaaatcaagcttcattcgcacaatgatttcgatcatatcagaggttagattggtgttctcgataagcggtaatgccacattatcaccaacactcagtgacgataaaagcgcgccagtctgaaaggcaacgccgatatctttaagcagatgcagacggtcatattcaccaacgtcataaagcggctggccaaataacttaaccgcaccctgcatgggggttttaagtccgataagatgtcgcaaaaaggttgatttgccggatccggagccacccataatcaccacaatttcatgcttgtcgatatgcatgttgcaatcatgaatgacggcctgtccggcatatccgccatacagatttgttacagtgaggggtagcggcatggtaaattcctataaaatcagcgcaaacatggcgtcggcagcaataatcgctgcgatacatgacacgactgacgatgttgtggccgcgcccaggcggtcagcgccgccagaaacccgaagccctttgcagataccaatcagtgcaatcagcacggcaaagatgatcgctttgccaaacccatgtatcaggtcggtaatcgtcacaactgccagaatatcagcccaataggcggctggggcgatgccaagcaccgcatcaatataaaggctggctgtccagaatgcgctgacattggctatcgcgacgaggatcggcagggcaaaaagcagagccaccaaagcgggtgcgacgacaaagcgtataggtgatatgcccatgacctttagcgcatcaagttcgccattcaactgcattgatccgacccggcttgtcagttgcgatcctgatcgtccggcaacgatgatgccggtgataagtggcgcaaattcccgtggaattgacaaagccaaaccgaacgtaacctggctttcagcaccaaagatgcgaagcgaatgcaccccttgaattgacagcattatgccgatggttgccgccatcaggataacgacaggcaaagcgtcgataccgcttgatctgatatcgcttaccacatgccgtaagcgcacgggttgaccgcgccgaaatccggaacataaaagcagtatggcggtggcgaaaatctgcgatatgaaacctgaaaaagcgacaaaattcaaaaccggcataccaatgcgggtaagacggtgattgatcttttcgatagcgctcacgagccaaaaaccccaaataattttaatttataaattagggttaattaattaataggcaggagcgaaatctgcatgaccatgatttttttctgctttcgtggcaaatgtcgttgttcttgttgtctatgtttagtttttgtcataaccttgatatattattttaagtacaacgaaattttacattttggttttatcagaaacatttctggtggttgccagttgtttggttgtttcggcgcataaccatcaaagttaatgtcgttttgggggataaatagtgactgaccagacttcacaggttggcaaagccgtatttgttggcaacattaaaggtggtgttggcaaaagtacgattgctgtttatttgacagattatttgcgccaacgttttgctgaacgctccattatgatgattgatactgatccacaggggtcggcttttgaaatgctggaaccgcacagtaatgggtctgacatcaaattcctgccggtcggtgatcgctatgatggcgttaatgtgaccacccttgatggcattttgcgtcgcatgctggctgaagataactcattgaccatcgtcgataccggggctggcaaaatgggtgatatctggcaaatggcgatgctgtgcaacacaatgattgtgccaacatcaatgtcatggaccgatttacgtccgacaattgacttcatcaaggaaattgacgagcgcaaagccgattttggtcgtataacaccgcatgttattgtcattcctaaccgtacatcaccaagccaacgcaatttcaatgtgctttcggaagccttgcaggaagtgaatgccattatggcaccgcctatttcggacttatctgccgcccggtcaagaagtgctagttttggtggcatcaaagctgttgagggttcacggtttcatactgaaatcgaacggcttggtgaatttattgttgattatgttgtcagcggcgagctggatcgcatttatcagcaatagttgtcgccagcatgcgcctttgtgccatcattaggattggcgctggcacaggtggagataataggcaactggacgggctttgaaaattccaatagattggttctgtcgcactccgcgacaattttggagcattttcagtgctggcatatttcaattctttgcgaaagcgacctgacgttctactgatggtatttgccgcggcgatgcccatctcgtttttgtcctggtctttgcttctcaataatttcactatcgaggtagcgtcttttaccgggcgggaaatcggaattctgcaatctcttcgcgaagtgccgggctttctgtcatttttggttgtctatattcttttggtgattgccgaacaaaggctggcgtttctttcattgataatattggggggtggggtggccatcactggctacttcccaacggcaatcgggctatatatcaccaccatcatctcctctattggctttcattattacgaaacctgtaatcagtcacttgccttgcaatggctggataaaaagaccgcaccggctgttctggggcgtatttatggaattggtgccaccgcacaggtgctgaccttggggtcaattttcattgtctattttattgtcagtggtcaggtctcatggtctttcctagctgactcgactggcctcgtcacatcgaatgacacctataatatgatctatgtggccacaggaatgataacagccattatggcgcttgcggcctggatcatctttccgcactttactgaaaaggtacgccagacacgcaagattgtcctaagacagcgttactggttatattacggtctgacctttctggctggtgcgcgtcgccagatttttctggtttttgccagcttccttatggtcgaaaaatttgaatattccttaattcaggtgaccgcgctattcctgctgaacgcgatcttcaacatctggtttgcgcctatcgttggccgtttgattggccgtattggcgagcgcgcagctctggtgtttgaatatgtggggctggtttgtgtatttgttgcctatgcctttgtcgagaacggcaccatcgctgcgggcctatatgtggtcgatcatatgttttttgcttttgccattgccatcaaaacctattttcagaaaattggcgatccagcggatatggccagcaccgccagcgttgcctttaccattaatcatattgccgcggttgtggtgccggtcagttttggcttcttgtggctgaccatgcccgaagcggtatttttggcgggggctggcatggccgcattatcgctaattctatcgctgaatgtgccgcggcatccggatgcgggtaatgaggttgtttatggtccccgtggacaggctttatcgccggcctcacaacctgctgaatgatatcagggctgaatgatatcagggctgaatgatatcagggctgaatgatatcaggccgcaggaaatttgatccgcgctcagacgcttagttcgcgtgccacccatttatggaaatgataggttgattcgtccataaccgcagaaaatttgccaccatcataggcaggtgccttgcgccctttttgcatgccttcgacaaccgatatgtcttcggcaaagacagtttgccacatgcgagtattagtggcgcgcatctcggcatagtcatcgctcagggctaggggatcagtatagtaaagctcgatctgttcatgggtgtggcctgtaccatcaggggtcagcaaaatattgaaataatgatccttatgaaccccaagcaagacattcggaaataaggccacatattcggcgcctgtatcccatttgcttgacagcttgtcgaatgttgggaagcgcgcgcctgtatcagacacctgcggggcgtagaccgttgtgccttgtccggcataattatcatgatcaaggatattataatggtcttccagccgtgaatagctgttcagagcagggtgaatgaagggtagatgataggcttcgcaataattttcgacagccagcttccagttgcatgccagatcaaagctgagagatgaatcagcgccgccatgatatagcggctggttaaattcgtgccagcggtcaatcaaagcggccatctgtgtggtgaatgcaggcgcatctccaccgacattgacaaaaacaatatcattccagacatgcgaacgcactttgttgagggggtaatcgcaatgttgcacactgtccagcgtatcaacattcgggccgccaatatgcggggttttgcgcaggttaccatcaaggtcatagctccacgcatgataaggacaggtgattgggcctcgcagctgctggggcgcatcaaccagaatcatgccgcgatgtctgcatacattctggaacacattgatatccccattctgagtgcgtaccataatcatcggaatgtccagaaagcttagcggcttgaccatgccgggactggcaacatctttgccaaagccgatagcggcccagttattacggaaaagggtgtcttgttcatgctgatatatctgttcgtctatatagcatgcgttaggcagaccgttggcgcgctcgataggagcactaacattactaagatcaagcattagaacctccacttctgtgtcacttcggcaagccgaatggaatttagacaatatacttgtgtcaaacgccaagatgcgattgtctgttccgactacggcgttacaagtcgcttttaagtaaattacctgtcatgacctctgccgtgacggaacaagtgagatcatatgaccaactccgcttttacatttgacccgcaaaccattcacacggctttggatgaacgcttttatcgtgttgtgaagccagcgacgtttcccgatcatatcatccgttaccgcaatcaggatgccgcaagttcaattgggcttgcggatctgtctgatacggcatggtgcgatcatttcgggcggtttgtgccatttgagggcagttttcaagcgcctttggcattgtgctatcatggtcatcaatttggtcattataaccccgagctaggggatgggcgcgggtttctgtttgcccaggcccgcgccgccgatggccgccttctggatatggggacaaaaggttctggcacaacgcctttttcgcgctctgccgatggccgtctgacgttgaaaggtgccgtgcgtgaaattctggccacggaaatgctacaggcgcttggcgtcacaacgtcaaagaccttgtcggttattgaaactggtgaagcgctgacacgtcatgacgaaccatcaccaacacgatcggctgttatggtgcgactgtcgcatagccatattcgcattggcagctttcagcggctttccttcatggatgatgccgatggcatagaaaccctcacacggcatgtcgtccggcattattatgctgatgatccagcacttgatccggcggctgattttgatcaacttgtgccattatttctggaaaaggtcgccacatccatcgccaccaccgcagggcagtggctggcggctggctttgtgcatggcgtcttgaatacggataatttcaatataactggcgaaagttttgattacggaccatggcggtttttgccgcattttgaccccggacttgtcgctgcctattttgatgagacgggtcgctatgcctatgggcgtcaggcagatgcggctttatgggcggtatgccgcttggccgattgctttgtccggtttgtcgccaaggatgtgatcgaggatcgtctgcgtggcttttttgccgatatggaagccagtctggcgcgccagctgcaatggcggcttggcgtgaccctcgatgaccagacccaggcaccgactctatgccggcatcttttcaccgccgccaaagccagcaaattgggctttgaccagatttttcatgatctatatggcggttctgatcgggttggtagctatgctaccgatgactggaagccggtgttggataccttggcggcgtcaacaccaattcatgttatggcgcatccgcattttgcccgcgccgatgcggtatcgatgacgattgacgaggtcgaggcgatctgggcacccatagccgaggctgatgactggtcagcattgacgcgcaagctcgacgatatcaaaagtctgcgggctgcccttgcgggggcagacaccagcacctgatcaggctcaggccagcgaggcctgcatcccgcgattcatcacctcgcgcagaatgaagctgctttccatccgcagaacatgcggcaaggcggatagatattcagaatgaatccggccaaaatcggcaacgtcgcgggcggatacgcgcaagatataatcattttccccggcgatcagaaaacaggccagcacctgcgggattttggccacttcggcttcgaattcggccatcatatcggctgattgtccatgcagggtgatctgcataagcaccagcacatcatgccccagcttcgcggcgtccagcgccgcatgatagcctgcaatgacgcctgatttttccaattgtgatacccgccgcaaacaggccgacggcgacaggcccacatcggctgccagctcgacattcgaaatacgtgcgttattttgcaacgcgccaagaatcgtaagatcaattttatccatgtggcacccaagatccgcatttatgatgaacgatgaatttaaaaacagaactttgttgcgtgttttctataaaactacgaattttctatatcactataataatacaccacaataaaaagcaaggaaatgccgtaggtttttgaatattatgtctatatagacattaacaaatcttggcacggccaaggggtatgaggagcttgtcatgcttgtaggtgttccaaaggaaataaagactagggaatttcgcgttggcctggtgccatcatcggttgccgagcttgtcggtcgcggtcataaggtgctagttgaaaccaatgcgggggcgggtattggcgcgggcgacgatgcctatcgtgctgtcggagccgagatcgccgccactgccgccgacgtattcgccaaggccgagatgatcgtcaaggtcaaagagccgcagccttccgaatgggtacagctatcatccgatcagattctgtttacctatctgcatctggcggctgatgcgccacaggcctacgggctggttgattctggctgtacggcgattgcctatgaaacgatcaccgatgatcagggcggtttgccgcttctggcgccgatgagcgaggttgctggccgtctggcggtggtcgaaggcgcgtcccatctcaaagccaatgcgggtggacgcggcattctgatttcgggcgtcccgggtacggcacctgccgaggtggttatcattggcggcggtgttgttggcgtgaatgcggcgaagatggctgttggccttggtgcccgcgtgaccgtatttgaccggtcggtgccacgtctgcgctatctgtcggatattttcggcaatgcgatcagcacccgctattccagcaatgcggttctggccgaagcggtcaaacaggctgacatggtcattggcgcggtattgattccgggtgcgagtgcgccccagctgatcacccgtgcccagctatctggcatgaagccgggcgcggtgctggttgatgtggctatcgatcagggtggctgttttgaaacgtcaaagccaaccacgcatgatgacccgacttatatcattgatgatattgtgcattattgtgttgccaatatgccgggttcggtgccgcgcacctcgtccgaggcgctgaataacgcgaccttgccgcatgtgctggcgctggctgacaagggcgttgccgcgcttgatgatgatccgcatctgatgaatggtctgaatgtgcgtaatggcgagattgtctatcaggcggtgcttgatgcgctggggtcacgctcggcggcgtaagctggattggcggataggcgcggcgcagttgaattaggcacggctggtttgggtgcggctgagcgatggcgagttgaaatattatgattcctcctggaaatggggacggcttagcggctgtccccctttttttggccagaaccccgaaaaaggggttgacccgcacgccgcattagaagataaccgccctgttctggtgatgcaccggacatcccaaaggtctcgcctgacatgggcgaatgtggggccatagctcagctgggagagcgcgtgctttgcaagcatgaggtcgtcggttcgatcccgtctggctccaccacccctttttcgttacatagcttgaattagcggcgtttttggcaggggattttgacgcctgaaaatcagggtgtttccacttttgcaatttttgcgcttagatatgggcatctataaacccacaaagcaaaagagccgcccggaggcagctcttagatttgtgcaggaaacccacttgttaaccataggctcctcaatcaccagagtgttattgcaatcaattattaatggccgccattaataattgatgtcaacgatattcaatcatatgtcgcatggtgatgactgatgagacgtttaggccttgatttaggaacaaattcaatcggctggtgcttgcttgatcttggtgatgatggcgagcctgtatctatcttcagaacaggcgcccgcatattcagcgatggccgagaccccaaaagtctggggtcattaaaagccacaagacgcgaagcgcgtttgacgcggcgcagacgtgaccgttttatccagcgccagaaaaatctgatcaacgcgctggtaaaatacggcttaatgcctgccgatgaaatccagcgtcaggctcttgcatataaagacccatatcccattcgcaagaaagcccttgatgaagctattgatccgtatgaaatgggacgggctatttttcacataaatcagcgccgcggctttaaaagcaaccgcaaatcggctgacaatgaggctggcgtcgttaagcaatcgattgctgatctagaaatgaaactgggcgaggcaggtgcgcgcacaattggtgaatttctggccgaccggcaagcaactaatgatacggttcgggcgcggcgtttgagtggcaccaatgcgctttatgagttttatcctgacagatatatgctggaacaggaatttgacacattgtgggcaaaacaggcggcatttaaccccagcctttatattgaagcggccagagaacggctaaaggagattgtgtttttccagcgtaaacttaaaccgcaagaagtcggacgatgcattttcctgtcagacgaagaccgcatttccaaagccctgccatcattccagcgttttcgcatatatcaggaactgtccaatctggcatggatagatcatgatggcgttgcccatagaatcaccgcttcgctggcacttcgtgatcacttatttgatgaacttgagcataagaaaaagctgaccttcaaggcgatgcgcgccatcctccgtaaacagggtgtggtggattatcccgtaggtttcaatctggaatcggataacagagatcaccttatcggtaatctgacaagctgtatcatgcgcgatgcaaaaaagatgataggtagcgcgtgggataggcttgatgaagaagagcaggatagcttcatcctgatgctacaggatgatcaaaagggcgatgacgaggttagatcaatactcacccagcaatatggtctgtcagacgatgttgccgaagactgccttgatgttcgattacccgatggccacggatcactgtcaaagaaagctatcgaccggattttgccagtccttcgtgatcagggattgatatattatgatgcggtcaaagaagctggccttggtgaggcgaatctatatgatccttacgcagctcttagcgacaaacttgattattatggcaaggctctggctggccatgtcatgggcgcttcgggtaaatttgaggacagtgacgaaaaacgttatggtacgatcagcaacccgacagtgcatatcgcgctgaatcaggtgcgggcggtggtcaatgaacttatccgactgcatggtaagccggatgaggttgtgattgagataggccgtgatttgccaatgggcgcggacggcaagcgtgaactggaaagattccagaaagaggggcgggcaaaaaacgaacgcgccagagacgaactcaaaaaacttggtcatatagatagtcgcgaaagccggcaaaaatttcagctatgggagcagttggcaaaagaaccagtcgatcgttgttgtcccttcacaggcaaaatgatgtcgatttcggatttattcagtgacaaggttgagattgaacatttgcttccattctcgctcacgcttgatgacagcatggcgaataaaacagtctgttttcggcaggcaaatcgggataagggcaatcgtgcgccgtttgatgcctttggaaactcgccagctggttatgactggcaggaaatattaggaagatcacagaaccttccttatgccaagcggtggcgattcctgcctgatgccatgaaacgatttgaggcagatggcggttttcttgaaagacagcttaacgacacccgctatatcagccgctataccaccgaatatatctctaccatcatcccaaagaataaaatctgggtggtgacagggcggctcacgtctctattacggggtttctgggggctcaatagtattctacgtggccacaatacagatgacggcacgcctgccaagaaaagccgagatgatcacaggcatcacgccattgacgcaatcgttgtaggcatgacatcgcgggggttgctccagaaagtctcaaaagcggcaaggcggtcagaagatctggatttaacgcgcctgtttgaaggccgcatcgacccgtgggatggtttcagggatgaagtgaaaaaacacatcgacgccatcatcgtatcgcacaggccgcgtaagaaatcgcaaggcgcacttcataatgataccgcatatggtatagttgaacatgccgaaaacggtgccagcaccgtggtgcacagggtgccgattacatctcttggcaagcaaagtgatattgagaaagtcagagacccgctaataaagtcagcattgctgaatgaaacggcagggctatcaggaaaatcctttgaaaatgctgtgcagaaatggtgtgcggataatagtataaaatctttgcgtatcgtcgaaactgtatcaatcatccccataacagacaaagagggtgttgcctacaaaggctataagggtgatggcaatgcctatatggatatttatcaagacccgacaagcagcaaatggaaaggcgaaatcgtttcgcgatttgacgctaatcagaagggatttataccatcttggcaatcgcaattcccgacagccagattgattatgcggttgcgtattaatgatctgctgaaattgcaggatggtgagattgaggagatttatcgtgttcaaaggctctcaggttcaaaaatattaatggcaccgcatactgaggcgaatgtggatgcacgggatagagacaaaaacgatacttttaaactcacatccaaatcaccgggtaaattacaatcggcttcggcgcgaaaagtccatatcagcccgaccgggctaatcagggaaggttagaaaactgcgcggtagagtgatcgaaattagtggtcagccgcgtcatattagcgtgcgcaggggtgccattatcgtttcggacaatgaaacggaattggggcagatcgatcttgatggtgttttgtccgtgattgttacatcgcggggtgcaaccgtcacaacccccatgattaccgaagcggcggcaagaaatattccgataatcatctgtaatgaccgttttcagccggtttcgctatcattgcctcttgttcaacatagtgatcagacacgacgctttgaaacgcaggcacttgccaaaaaaggaataaaaaacagaatctggcaaaaaataatcaaaggcaaagtcaaaaatcaggctactttgcttgtactttatcaatccgccagtgttgagcgcttaaaccgtcttcacacactgattaaatcaggtgatccccagaatattgaggcacaggccgcccaagtctattggccagccttgtttggcagagatttcagacgcgacagacacaaaggcgatgttaatgcccttttgaattatggctatgctatcatcagaagtgctatggtaagcgccgttctttccgcagggcttcatccaaccttcgggatgtttcataagaacaaaaataatccgctttgtctggtcgatgaccttatggaaccttatcgtcctcttgtcgatcaactcgtaaaaagactggttgagcgcgggcattcaaatgtaacaactgaggtaaaacggtgtctggcatctattgtaacaagtgatcaggctgttgtgggggctacatcaccattatttcagcatatgagccagttaagctactcgctatgggaaaatcttgatggacagaagacaaccatgccaatgccgcaattgatacccgaactggaaattgaggcaatggtttccgaatgctgagtgggtatcgacttttgtggattatgactctattcgacttgccggtggtaaccaaagctgagcgtaaaagggcgactgttttccgtaacaaactgctcgatttgggtttcgaaatggtgcaatattctgtttatatgaagcatgtagctggtaaagaacaggccgaagcgatacaggtaaagatcaaagacgctgtgccggaatatggaaatgttaaacttttacttatcacggacaggcaatttggaaatatcctccaccttggaagacattccaaacgccctattaacgccgatcaactggcacttttctgatataaaacaaaaacttgcaaaaaccttagtatagcactctggtgattgagagcctagagcaacgtcttcggtctcgtcgaacctttcgtaggaagtatagcactctggtgattgagagcctagagcaacgctataagtcaacacaacaaatcgatgttgagtatagcactctggtgattgagagcc

SEQ ID NO: 1686 - DNA, 9851 bp, synthetic construct
  source 1..9851: mol_type = other DNA
  misc_feature 1..9851: note = Synthetic
ccccaataagctaataggtatatatagcactttgggggtatagcagcttacggacagcttaatgccccgcttaattgaaagcaccggcaatgaacccacccggttcaggcgcatctgtaaattgacggttttaagaacccaatctcgggtcaggccggtctacgctaacccctataccccgcctggcactcgccccccataccggtttcgaacggtagaacaaacggtagaacatttccgtgacttaacgccggcataatcctctgataacatgtggatattgtagcattcagggctatcggatgcctgtcggaggagccatacctctcgggtgcgccatttactgtgacaaagcatgtctaacacattgattcgtaggcttattgcaatgcttgcgaggatttgtgatggaatttctgctgctgtgggtcctaagtggaaatatactggatagtggaatgcgttatgaggacgctggaagttgttatgcggatgcgcaaaatagcggaattgaacttagagaaattggactgactccaccaaaatttacatgtgttccagtaggtaaaggaaaggaccttaaattggtggttcctgcaacaccacggtcaaacttcccctttaattgagttcagcgatgccattttttcggataatgaccagaccaaatccttcctcataaccgtcccctacagacgtcttcgaccatccgcctaactggtcaatcatttctgatgggcagttgttgacggcagcgcgcgaagatgtgatttttggaatactctcgcctggtagtgctagcagttgcttacgcctttgtgcagcaagattgctaaccgtgattagagtgccgaagaaacttgcagcccccgtaaattcatattaaccaatatctggaagaaggtttaagcatatcacatggtaaatgcattgctgttcgggtctattggagttttggctgagacttccgaaatccagcgtcaagcctataaccaatcgtttgaggagcatggcctagattggtattggaatatcgccaattattgtgagttactcaaaacacctggtgggaaaaggcggctaaaagatttttccaacgtaagtttgcctgatgacgtgattgatagcattcacgaaaggaaagaaagtatatttttcgaacaattaaagtcagacctcagccctcgtgacggcgttacagattgcataagggtatgcagacaaaaagatataaaaattggttttataacaacgacgtcacaacgtaacgttgagtcattggcccaagctttagaccagcatgtcgatttcgagcagtttgatttgattactaccaagtccgatgtctgcaaggaaaagccaaacggtgaagtgtacaaattcgcgttgtcgaggcttggaacgtcggctgaaagaacaatcgcaattgaagatactgaaattaatcaacaagctgcgctagaaaatgaaatacagtgttatctgtttgctggtgaatatgccactacgcaacacaacttcaacgctgttaagacactcaaggccatcagttctcagttgtgaaattgggtttggcctcaagactcagattaagcaaaacttggaaaacttgtgttaacctgaacccctctccatagccttcccctacagaccgcttcgaccacccacctatctggtcaatcatttctgatgggcagttcactgctctcagacggtcccgcattgagtgacggaagctgtgcatgacatagccatcaccaatggtctgcttcagccacttgttcagtgcagcactagctgagttggccttgcagccgttttcattgcagtagcgagggaagaggtaaggggagtggtgtgatgcctctaaagccctcttagcagcccacagagatgccccaacaagtggcagcgttctctcactgcctttggtcttcaaacgcctccacggatgtggacggataatgagatgcggtatgtctgaatccaacacgatgtcctctctggcaagtccagcagcttcactgaggcgcatgccagtgtcactgataagagccactaaccaacgaggctcatcatcagttgtctggcaacgctgttgaatggttctcaacttatcgagaggaatgggttgccgcgtcgatgcatctcctttgtcgggcatgaatgtgccgctaaaggcattgctgccttctatcccatgctcacgcattacaaggttgattatggctctcacagaaccgaacacgcgtttcacagtgctaacggtcattccttgctcgagacaccagtcacggaactgtgcggcctcagaagaggaaaaggaggcaattggtttgttgcctataacctttgcaacatattcagcattgcggcgtgctgttcttttgaagttgtttccatcctttccattgattgaaaggtaaagttcgactgcttccataatgggtgctgaagtgtcgttggctgcaccaacctgaactagatgtatggcaggtatgtccatctgctgtagacgaaggccaagccaatagtcttccagcctttgagacacgctatgggctgttctcaatgcagcatttaacgacttggttctgagactgaatgaaatgcgcgaggacgcataatgctgtctcacatccagcggcactcgccgtacataatagtagatgtcatttcgcctggacacatactgtgctgcatccttgtacattactttgtacatcacaaatcctcgcaagcattgcaataagcctacgaatcaatgtgttagacatgctttgtcacagtaaatggcgcacccgagaggattcgaacctctgacctctgccttcggagggcagcgctctatccagctgttacacggatatgaccgtgttattcatatgttaatcaatggtttaagacatttttaagacggcttgaagccgccagcaagctccttgtcacacgatttgtcacaaggagcatcatcatgacgaacatcagaaagagaggacaatcataccaggctcaggtcagactgagtggaggaagatccgcgtctgcaacctttaaaacacaatcagaagcaaggatgtggatgagacaaaaggctgcagaattgcaaagcctgtcagcaaggcgtgacgaccgtcttagtctttgtgaagtcatcagaaggtttcgcgaagacaaggctcacacaaggcattccgggaaaatagaaagcctgcgccttaacagcatactaaggcatccaattagcagcattcccattgtcaggatcacgagtgcagacctagcagcatatagagaccaccgccttatcgacgtcgcggcaaacacactcgtgagggagtttggtctcataaggagcatcataaagacgtccatagacgaatggggatacgacattccaaaccccttcgcaaacttccgtctcaagcgaacgcctgaccagaggagcagacgcataagccaggaagagtttgacagtctgatggcaacaccatgcggctcgtcatacacaaaacacgctgctcgttttgctatcgagacagcgatgcgtcttggggaaatcctctgtctaacctgggatgacattgatctggtcgagggcttttcagacatcaagtcaagcaagaatggatattcccggcaggtgcctctcaccccaaaagctatccaaactctaagcgtcctcgatcgtcagactgatcatgttttcccggtaaagccagacagcctgaagctttcatggcgccgcctcgtcaaacgcgcccaaatcaaggatctgcgctttcatgatcttaggcatgaagccatctccagactgcttgagaagggccttactctgccagaagccgcgagtgtcagcggtcacaaaacagcttcgatgcttctaagatacgcacatccggatccaaggcttgttaggaataagatgataggaaatagggtcccatactcggtgattgagaccccctgaggggtctcttttcaaaggctttcaaaaggccgctaaagaccttgttgttgttgttttgtttgagactgttttatgtttcatcttctcggcctcaccatacctccctcgcaatcgcctgaacatcctcgacatcaaggcagcctgtgttgttgatccagtgataacggtcgaggtactgatgctcagcctcatccttccatgacgccatcagcatatacgctgcgatagtcctttcatcagccctagttcgtccagaataggcaagaaagttccaccaccaggtccatggaacatcgtgatcattgagtacattgtcccataacacccaaccccagggcttaggattgatgtagtagttggctatccggttattcatcggcgaccaagcccattcaacactgcacacaaaggtaagcttgcgcggtgttccttttgggaattgctcgtaagggatggggtctttccactcgatgagcacattcaaatcatcaggcttttctggcaagccgacgacttcattcagcttctgggatggcctgacttccgagctcataggaataaaggaagtgtattttgtaggtttcattgttgtctccgctttagtgctttcggcaacacgcccaggcgcacaagttggtgattaagtgcctgtcttgaatgcttagttagtcttggtttctggtttgggaaatggtgccttcttctacgctggctcacgcctaacctgaggaatgatgatgccataggtcgcgccttgtggccgcatcttctcagggctgtcaaccagtgtgaacttagtaactttcttcctgatttctgacatgactaaaaccccatcgaagacatatcttggaggacggcttcgattgttaggccctgtccagctgtgcctgctttctgatggtctgcaacgcatccggctgcgatgtcatatctgaagtcgccatattcttcccgcaaccgtgcttcagttaagcgagcttcacggttcaaacgcagcttaagggccattgcgtcagcgaaatcttgatcatatttggaaagtgtcatatcgacctccgctttagtgctttaggcagaatgccaaggcgcacaagttggtgattaaatacctgcaaagaaaataacagctgggctttgtaatttctagagttaagaaagcgtgggtctcgtctcaatccagacacgattagctcgtgtttttggagtagtctttccactagccttttgaaatgcaaaagggccgcccttaggaggcagcccttcgatttgtgcgggaaacccacttgttaaccataggtccctcaatcaccagagtgctattgatagctctaataccctattgctaggatttactcctgtcaattagggaggcggtgttggcaaagaggcggcttggccttgatataggcacgaattcgatcggttggtgtttgctagatctggacgataatggagaaccgaaatccatcttcagagccggggcaaggatctttaatgacggaagagacccaaagtctctcacctctctgaaggccaacaggcgagttgctaggtctgcgaggcgcaggagagaccgcttcattcagagacagtcattcctcatcaatgagctcgttcgatgtggccttatgccaaaggatgagcatgagagaagaactctcgcattaaaagacccttggcagatcaggaagaccgcactcgacagaaagatgagcgcttatgacgtcgggagggccttcttccatatcaatcagcggcgcggcttcaagagcaaccgcaagtctcaggataatgaggccggcgtcgtaaagcagtccatcgctgagctcgagatgcgcctgtcagagacaggagcaaggacgcttggcgagtttctagctgacagacacgcatcaggagagcctgtgagagcgaggaggctcggaagccagacgtctgcgctttatgacctttatcctgacagatatatgctcgagaaggagttcgacgcgatttggtcgtctcaggcttccttcaatccttccctcttcagtgagggcgcaaaggacaccgtcaagggcatcatattctaccagaggaagctcaagcctcaggaagtcggacgatgcacgctgatccctgaagagacgcgcgtctcaaagtctctgccttctttccagaggttcaggatttaccaagaactcgcgaacctctcctggctggacagggagggcagggcgcatccgataacatcctccctaccagcgagggatgccctcttcaatgagctcgaagcaaagaagaaggtcaccttcaaagggatgaggcggatcctgaagaagatgaatgtcttcgacttcgacgcatccttcaatcttgagtcagacatcaggcagcatctcgacggcaatatgacgtcatgcctcatgaggtctgaagatttgcttggtgctgcctgggacagcatgagtgaagacgaccaggacgcgttgatccttatgctgaatgatgaccagatggatgacgaagaagtcgaggcgcgtctctcttcggatcacggcctaacaaaggagcagatcgaagcatgcctcgacgtgaggctcccagacggccatggggctctctccaaggctgccatcgataagatccttccgatcctgaaggatcaggggctcggctattatgacgctgtgagagaagcaggctttggcgaggctaatctatacgatcctaatgcgccgttgtctgaccgcctagactactacggcaaggccctctctgggcatgtgatgggcgcctctggaaagccagaagaccgagacgagacaagatacggctcgatcagcaatcctagtgtccatattgctctaaatcagatcagacaagttgtgaacgagattatccgtcttcatggcaagcctgacgagattgttttggagattggtagagacttgcctatgggtgccgacggcaagcgagagctgcagaatcttcagaagcgcaaccaggataataatgaagaagcacgggcagccctttcgaagcatggcgtcatcgacagcaggcagaataggcagaagtttcagctatgggagcagcttgcgtctgatccaaccgatcgactttgtccattcacagggcgcatgatctctctttccgacttgtttagtgacaaggttgaagttgagcacctgcttccattctcttcgacgctagacgacagcatgtcgaataaggtcgtctgctacagagaagccaaccgcgcaaaggggaagaggtcaccctttgaagcttttggatcttctccagaggggtatgactgggaagaaatcattgagagatccagccggctaccaagtggaaagaggtggcgcttccttcccaatgcgatgcggatacatgaagaagaaggaggctttatggagaggcacctcaacgatatgaggtatatctccagatatacatcgcaatacctcgcaaccattattccatcaaagcaaatctgggtcgttactgggaggctgacagcaatgcttagaggcttctggggcctcaatagtgttctcaggggacataatgaggatgagggtggttccgtaaagaagatgaggaacgaccataggcatcatgctgtggatgcggtagtcatcgcgatgacgtccagagggcttatccagagaatatcaaagtcagcaagacgttctgagatcgatagcatcgaccacctcttccatgacagaatagacccctggaaaggcttcagagacgaagtgaagacgacgatagacggtatcattgtctctcaccgtccacgtaagaagcatcagggccaacttcataatgacaccgcatatggcatcgtctctcataataaaagcggtccaagccttgttgtaagaagaagggctgtagaaaccttttctagcctaaaccatgtttctgaaatcagagatcctctgatcaaatcagcattagaagaagagcttcggggtctgtcaggaaagagttttcaagacgcaatcacatcctggtgtgacaagaggggcataaagtcccttcgggttcttgagaccgtttctgtcattccaatcgaggataagaatggctctgtctataagggctacaagggcgatggcaacgcttatatggacatctatgaagagccagacacaggcaagtggaagagtgaaatcatttctcgctttgacgctcagccatcgaaacgtttcacaccgtcttggcaaagagaatacccgactgctcgactggtaatgcgtcttaggaagaatgatcttttacagcttagttccggagagcgtaagaacgtctattatgttcaagtgttatccggatctagaataacactggccccgcataatgaagctgatgtcgacgcaagaaataggtcaaaagaagacccctttttattcatttataaggcagcgagtactctacagtccagcaacgccaaacgtgtgcacattagcccgactggattgatttcggaggcatagagacctggttggcagagttgtagagataagcagtgagccaaggcatgttggcattaggcgaggcttgctgacagtatcagatggttcatccgaacttggcacagttgatctcgatggcgttctagcaattctgataacctcgagaggggcgactctaaccacgccccttatctctgaggcgtcttcaagaaacattccgattataacctgtaatgaacgctttcaacctgtgtctgtgtcgctgccgctaattcagcacaatgatcaaacaagaaggtttgaagcccagtccattgttaaaaagggtctgaaaaacaagctatggaacggattgttgcgagtaaggttcgcaatcagtctgaccttcttagccttgtcaaggcgtctggcgcggaaaggctaaagcgtttagcaggtagcgtaaggccaggtgacccggaaaacattgaggctcaagctgctctggtctattggagagcgctttttggcaagtccttcagaagagaccgcaatcaggcaggcataaatagctttctaaactatggctatgcggttcttcgtagttcgatgacgagcgccgtgcttgcgtctggattgcaccccacccttggtctttttcataagaacaaaaacaatccattgtgtctggttgacgaccttatggagccataccggcctatagtcgaccaagtcgttcttcgcattcatgaaaagggccatgaagatctaaaccaagaagtgaagcgtgctctcgctgcagtactaaccgctgatcaggtcatggttggaagcacctcaccactattcaagcatatgcataagttaagctttgcggtgtcagagctttttattggccaagtggcttcattatctttcccaaacttattgtctgagcttgaggtagaggcgttagtacgtgaatgttaagcgggtacaggattatgtggatccttgtgttatttgatttgcctgtcacgaccaaaaccgagcgtggaaaagccacacgctttcgaaatgcgctgctcgatctcggttttgaaatggtgcaattctctgtttatatgaagcattgtgctggaaaagagcaggcagcgaccattcaaaacaaggtcactgcagtggttccagaacatggaaacattaaacttttgtttattactgacaaacaatttgggaatattgttcatcttggcaagcattcgacacggcaaattaacaatagtcagctggcattattctaagcataaccagtcgcttacgatgttcctaactatagcactctggtgattgaggacctatagcaactattgcgcccgccccgaataactaaacattactatagcactctggtgattgaggacctatagcaacttcagccggttttt

SEQ ID NO: 1687 - DNA, 18200 bp, synthetic construct
  source 1..18200: mol_type = other DNA
  misc_feature 1..18200: note = Synthetic
ggcaggaagccgccgtgcacgatcacggtgttataggctggctcggtcagagtcaggggcatccgctcaagataatcccaatgggctggttgcaactgctgcagtgtcaccttgtcgtattccttcagaatcgtcggatcgccctcgcggcgataacgcagcaggcgcaactcgtggttgcccatgaccgcctctgcctggagggcgatggcctgatccaccacgcccgcgctgtcaaagcccttgttcacgaggtcgccgacgaagatgaggcggtcttccggctgtggttggagccagtcaaggagtcgcgcgaggtcgtccgcgcaaccgtgtacgtcgccaattgtaatgagtcgacctgttgccatcacagcgcaaagttgccaaaggttcgaacgtcgcgctacactgtgcctcgaattcccaaccgtaaacggtaaaatttggacgtatcgctgaaaactcccgcccggcactgcgccgtgaccggtcaatccttcgcacccggcgaccgccgggtatgcctgctggtgcgcaacgccgacggcgatctcgagcgctgggacgtgcagccggaggcggtcgagcaattcgcgccgctgggtgagatcctgtgccgctgggtccacaccgtgcgcgacccggcggaggcctccaagcagaagcgccagcagctgcagacagtcgaagacctcttcctcgccctttgcggcgagccggacatgctttcggggctggacgacgaggatctacccgtctccgatgcgggcgcagaggagcgggcgacgctcaaatacctgctggccctgcagctggagcgcaagcgcgtgctcaagccccacgacgccgaacattactggcacgtgcgccgcaaaaaagcttacgcggtggaacccatcgagctcgagcccgaacgcgtggcggccgtgcaggcccaattgacgctgctggtgtagccggcgttgggcggcgggcggctagtccagcttcaggccgggaggatcgacgggccagagctcttcgttggcgttgtcgcccgccttgttttccagctccggctcggtggcgagctccggttggggcgggcgcacgaggtcggagggggcggtgagcagcgggctcatcaggccggggatgtaatcggaaaacgtctcctcgtccggcgtggcgcgcagggagtgctgcaccatgcccatcttggcgtcgaggttgtccaccatgctgacgaagactgcttcgggcgtggcggcgcggatcgcggccccccattccggttcgccctggtggctcaagatgatgtgctcgaggcgctccatcaggtcggccgagagcttggcgcgcagggcggccttgcgcgcctggcggtagcccagcaccacgtggccgttcagcgtgccttcgcgcgtcttgcgggtggcccacgggccggtgtattcgagcgccttgccgatgtcatgcaggatgatgcccgccagcgccagatcacccggcacttcggggtagagcggcaacagggccttggcggcgcgggccatgcgcacggtgtgctccatcagaccgccgcggtaggcgtggtgcatcgagatagcgccgggcatgcccttgaagacttcgcccagttcgtcgatcgccagtcgcaccgtctcgcgcagctccgtatgctcaatgctcttgatgtagccctgcagctcgtcccacagctcgtcgaggtcctcgggcgcgctctcgaccaggctttcggcccagtggatcacctcgtcttcgggcaccagcgcgatctgctgcagggtgggggagaagcggttctgataataatcggtgttacccgttacgcggatgacctggccttcgccgatcgagttgaagagctcgaagttggccgagttttcgaaacagaccgtatggaagaggccggtgcggtcgcccagctccaccgtgaggaactggctgttgttgcgcgcctttttcatggcgagcttgcgcaccagcagcacggcttcgaaattgaccttctgctccttcggggcgctcttcagttgcgcaacggtaaacatgcggtccagcttctggaatttcggcgccaagtgacaagtaaaaggcgtcgcgcaggtgatttgacgatcctttgacgccatgggctggcttgcaaaccaagcgcaggtgtcacctcttcgaggtgctgggagaggtgacaagtatggcgaaagcgaagcctgaccaactcgccactaggcatgagcggacccgatgctttggcggtccgtcgccgcgcaaccccgacggggttgtagcatatagccggtggttgaggtgacgtgagtcaccgacaccaccggtcaccctccatccctccgatgcaccttgaagaggtgccagcaatggccaatcgccggcccgtgatacgcccttcggagtgccctccgtcgcctactcgtccgaagcggcggcgagggcgtcccagccgatgttttgttccacccagtcgcagaaggcacggctgccgccgacgtagggcaagagcggggagcgcacgtggaactgcttgagcggaaaggcctcgtggtcgagataatggatgttgccgccgaccgcgccgacgagggcggaggccgccgcgatgtcccagaccttgaccttgaagtccacgcagccgtccatcaggccgagcgcggtgtaggtgaggttgagcgcgccactgcccatgcagcgcgcgcggtaggacgtgagcagcggcttgaggggctcgaaatagcgctccgggatgggaaagtgcatgcccacgacgccgtccttgcgctcgaagggccgcttctcgggcgtaaagcgtttgccgttgcgccacaggccgtgccccgggccgccttcgacgatccagtctgcgctatagtcgtagataaagccgtagaccggcacgccatccttgagcaaagccagcgatatggcgcaaaacgggatgcctagcgcgtagttgttggtgccgtcgatcggatcgagcacccaggcgtagcgcgccccgagggagagcacttcatccagcggattgctttcctccgagcaataatcgtcctccgggaaggagtggcgcagctcggtgaagacgcgctccgagatggcgaaatccgcgaacgtgacccgggtttcgtcttctttccattcgctgggaacctgcgcatactgtttgcggaagaaggctacctgcttttcgacggccacgcggccggcgtttacgcgatgtcgtaagatcttgtccatcttgtcttagcgtcggcggctgccaatgcgccttatgcggtcgtaaccattgtcatcatcctcgtccggaggctccggcttgggcgcgggctgggcgactgccaccggctccgggtgcggacgcgttggggcgggggtagcaggtgccgtgcgcgccggcgtgtcgggtgtggtttgccgggcctcgttttgcagttcccgcaaatcgcgttggacgacgcgcggggcatccgcccgtttgcgccattcagccagttgacgctcttgtgcttccacggtttcctgcaggtcggccagggcgtcacgggcctgcttgcgctcctgttccgcccgggccagactgtcggcgagggcgatattgcggtcggcttcctgttggcgggccagtttttccatcgccacctgcgcctcgagctggaccagcttgtccagcatctcttcgggggccttggccttttgctcgcgcagctgctcgagctcggcttgcagggcggcccgctcgtcgatgaggccatcgactgtctgattgagggacgcgatgcgctgctgggcggtctgcagctgcttttcgaggtcgtgcatccgggcttcggtccgcgtcagcacgtcgcccagctgacgcaggctgtcgcgcagattggcggcctcgtcttcgggtgtcgtttcgggaaagtcggcgccggtaaaattcagatcgccctcgaccatcgcaaagcgttcggcctgatcgctccagaagaccagttgaaaggcaccctgttccacggtggggctctgctgcgggtaggcttcggaatcgaccagatcgccctgcgggtcctccagccagagataaagccaggcggcgcggaagtcctgctcaccgatcgggtcgccgttgatgggcagcagcagctcgatcacgtccgtgtcttcgcctgacgggcggtcgatgacttccagttcggcaccgacgtcgctgcgctgctgcatccagtaggtggcgacgcggaagcggtccagcgccagctcggccagttcggccacttgaccatagcgtgtgccgccgcgctggtcttcgagggtgccgctggccttcttgcgcaacagcatggagcccgacagcacgaggccttcggcggcttccggcagcagcgcgtcgtccgtcgcggtaatgacgccctcaaagaccagcgggtagcccggcgcctcgaggtcaaacgcctgcgcgctggccgtcgatacgccccacagcaccccgacggtcattccaagctgccaagttctggccaacagctgcattctgtctagtattggaggggaatgggcgctgtccaccgcaatatggagcctgccgatacggacgataaatgggtcttcgggcctggctcggccgtgtgggaggtcacgcgcgagctgtcgttgctctcgggcgggccggccgccgcgacgttacagaccgcgcacccaggagtggcgctgggtgtggcgcggcattcccgctttcgcgaaaacgcgtggcagcggctccggcataccttgctggcgacctggggcgtgggctttggcacccgggaggaggccgaggccgtgcgggcggaaatggaagccattcatcgccgcatcaccggtccaaagggcgcggcgaatcccgaaggcgaggacccgaggtccggtgatccggaatacccgctggggcagcattacgagctgcaattttgggtgctcgcgaccctgatccagggcagcgtcgacggctatgagcgcgtgcatgggccgatgagcgccgacttgcgggagcgtttctaccgggagatgcaggtcttcggcacctacttcggtttgccggagcgctatgggccgccggattgggccggcttcacgcagtattatcaagagatgatccacgccgactggatggcgtcgttgccggagtgccgggagatcgccgccgccgtggccttgccgcccaagccgtggtgggcccacgtgctgatgttgcccaaccgctttttgctggccgaatacctgccgcacccgatcaacgagaagctgggcttcccctcgacgcgctggtcacgcctgcaacgccgcgtgctcgactggctgctgccgcgcgtcgtacccctgctgccgccaatcttgcgttacccgcccaaataccgtcacgcctgccgcgctgcgaaacgacaggcggcccacccgtcctgacgggttggctagatccccgattgggcggattttgaggatttgcttgcggggtaggggggcgactagcccgcttcttgccccaggcgaggcctagctcgcgagcgggtgagcggtggcgcggatctgttcacccttttcgcgttcggcccggcgcagatcgtaatccgtctgcaggcgcagccagaactccggtgagacgccgaagcacttgcccagccgcagggcgtattccgccgacagccgccgcttgccttgcacgagttcgttgaagcgcacgtaggaaatgccgctggcttcggcgaccgccttttgcgtcaggcccgccggctcaataaactcctccagcaagatgcggcccggaggatcgaaggaaatcagtgcaggtttttggggcatggcttggtcgattcttaagccagtcggtgctcgagctggcggatgagttcttcgaggaaccaggtatcggcgtcccagtcggcgcagaggcggagggcttcgcgggtcagctcggccgcccgctcgcggctggcctcgagtccgtgcacgcgcacgtaggtgttcttctggttgttcacatcggcgccggtggtcttgcccagcacctcggggttactggtcgcgtcgaggatatcgtctacgatctggaagaccaggcccaggtgccgcccaatctggtcggccttggcgtcggcatcgacgggggcatcggtacaggcgagccccatgcgcagggccgcgcgcaagagggcggcggtcttgttgaggtggatgtagtccagctcctcgggcccgatctcctgctgttcggccaaggtgtcgagcacctgccccccgatcaggcgacggctgtccccggcttcggagagcaggcgcacgaggcgcaggcccacgctcggctcgtccacataggcgcgggagaggatgctgaaggcctccgtgagcagcgcatcaccagcgagcacggcggtggcctggtcgaacttcacgtgggccgaggggcgtccccggcgcaagtcgctgtcgtccatgcacggcaaatcgtcgtggatgagcgtgtaggtgtgcagcagctcgatggcgaccgccgcgggcagggcgtccacccgctggtggtagagttccgcgcaggcgagcaccagcacgggacgcagacgcttgccgccggcatcgacggagtagcgcatggcctcgtggattctggccgggcgggcggcagccgggggcagccacgcgtcgagcgctgcttctacttgttgacggtatgcctcgtgccggtcagtgaattccattgtcgcggaaagactcattcagtattacgctaatttacgatggtgcagttggaaagtctcagtcgaacgatcctgagtgatcgggatatcagaagcaagtggttgctgggcggcctcctgctttctttgccgttcgttaacctgttggtgttcggctactggctcgtctacgcgcggcgcctgttggaccgtcgcagcccgcagttgccgccctggatgcactgggagcagatcctggtcgacacgctgcgtatgctgggcctctacctcgcctatgccttgctgcccgtgctcgtgtgcggtgccgtctctggcctgctggcggcgttgttccacttgctgtggctcgatttgctggcctggacagtcgcgtggatcccgctgatggtcgccgtcgcgctggccccgttgacgtttctggcggcgacctttgcctttgtgtccacgggcggtgactggaaggtattgctgcagccgctcgacatcctgtcgctcattcaacgcggttgggggcagctcgtgatcccgctgctggccttttggggcgtggcggccctgggatggccggtcgccggatttcttattttccttggctttagcatcttgatcccttacgcctttagcgtattttcgcaggtttcggaataaaagcatatacacatgcctacctacgaatacgtctgccaaacgtgtgatcgtgaatacgaagtcttccaacggatgtcggaagatgctcacaccacttgtaactgcggccggaacgagccggtaaaacgcaagatcggcaccggtgccggtattatcttcaagggtgggggcttttacgagaccgacttcaaggcgaagaagggcagctccagctcgagctcggaaagtaaatcgagcgacagcaagggctccagcgacgcaaagtcgagcacgtccaaggctgaatgatccgctaactccaactctatccgatcatggcgcgccgtggtgaaaaagacattccttcccctcccacctggagggtcgctgccggcgcgttgctggtcgctttgattggtgccggcttcggcctgttccgcctcgctcacgaacccactaccgtggtccgcgatcgtgaggcgctactcgaactggagccgggcacttccagctacctcgtcgggtctatggagggcggcgagacctgggaacagaaacgcaccgtcgtcgtgcgcggcgatgccgatgcgctcgacgtgacgccgggagaactcaaccgctggagcaaccgctattttcgcgcggtcgaaaccgaagagggcacccatacggtccttggcgtgctggacttttccttcgccaacacggcggcccccaatttccgcatcctcgacaacggtcaattgcaagtggccgtgccgctcgagtttacggccctcgccccggaagaggagtttcattacatcgtgctaggccgcttttaccgcagtggcgagacgggtgaagtctacttcggggtcgaagaaagtcgcctgaacgccgcgccgctgaccttcgccggtccgctgcagcaaaaggtcttcaagtgggtcatggcccccttcgccaagtcccccgaaggcgaggatatggcacgcgcctggccgaatctcaaggcggcggaaatttccgggccggagcaggtcgtgaagttcctgatggagcgtgcgcccgaggaggcctagctctttttcccgcacgtgagttgcagcgctgcgcattcgtggtgcggggcgtggcttgcctgttcccgtaacggtacccatactggatttttcctaccccgattatgatgaagatgacgcactttgcccgtaacggcctcggtctgctcgccctggcctcgctcgtgaaccccatctgggccgcgagcgagatgaacctcgaccacgcgacccgcctcgacgccgacaaccctcacatccgctacagcgggcgctccgaaggcatcgggaccgatacggtcacctttggccatagtggtgcgcgggtgcgcctgcgcttcgagggcacttcggtcggcgcgtggatcgacgatgaatcgcagaagaattactgcatggtgtggctcgatggagagcctggaaagaagttccagctcaatcacgagaacgacttttacacgctcgcccacgatctcgagccaggcgagcacacggtggaagtcgtgcgcgtgacggagggcttcctcggcctggcgcacttcaagggctttgccctcgatcatgacgcggaggtgctggactggcagaccgcgcacgaccgcaagatcgagttcatcggcgactccatcacctgcggctacggcgtcgaggccaacgaccccaaggagcactttacgcccgccacagagaacttctgccttggctactccggcctcaccgcccgtcgtctggatgcggactatctcgtggtctcgcgctccggcatcggcatggtgcgcaactatgacggcccctacgacggcagcgacaacgcgatgcccgacatctacccgcagaccttttacaccgagaccgagccgaagtgggacttcgaccgcttcacccccgacgtcgtctgcatcaaccttggcacgaacgacttcagtaccaccggcgtcaacgtggacaactacgtgtccgcctacgtgacctttgccggcaaggtgctcgatcgctatcccgaagccgagttggtcgttctggaaggcccgatgaacaacagcaaggaactgcgcgccgccctcgaccgcgtcgtcgaccagctccaggagcaggcccccgaacgcgtgcacttcgtcgagctcagcgcgcaaggcgagctcggctacggcgccgactatcaccccaaccgcgcccaatcccgccgcaacgctgacgagctgaccgcctacctcgccgacctcatggattggcagtagtcgcggattggagagggatggcggagcccgtcacccgtttcgctgcgggctctcctctcccttggagggcgcatctccttcccggcggcggggttacaaagcgggtgacaaaagaggggaccggaccgagaattttttgcctccaaaaataaaggcgacccgtcggccgcctttaataagaaaccctttcttacgccgacgtgcttgcatggcaagcagtggtcaaggctcgggttactaactttgtcttgattccagaaagatgggtagaggaatcctcaggtctgatcaagatcaatcttgtgtatgcttagagaaaaaccttgagacaggggcgttatattattagtgagcatttatggtcactatgtcagacgccgtttctttctcatttgatattggacatgcttcgattggttgggcggcgctggccgcagacggcaaggtgctgggctgcgggagcgtgatcttccccaaggaagactgccagaactttgcccgtgcagggctgcgccgacagcgtcgccatgtcgcggcgacgcgcaaccgcatgaagcgtctgcgccagctcttcgtggagaagggcgtgctgacggtgcaggaggcttatgaacaggcgcagccgtcgagcggtgtgatgatgccgtggctgctggcggcgcaggcgctggagaagggacgtcaattgacctggcgcgagctgtggcaggtgatccgctggtacgcgcacaatcgcggttacgacggcaacgccgagtgggcgggcgacggccccacggcggaagacaccgagaaagtccagaacgcgaaacagatgatggaggatagcggcgccgatagtatggcggtcgcgatctgccgctttctcgaagtcgacctggagacaggcgtgctgcatggcgataaatacttcaagggtcaaaacgtcgcctttccgcgcgaaaccgtgcgcggcgaagtccgcaccatcctcacccaggccgagagctacctgccgggttgcgacgttacctttatacggatggtgatggatgaactgagcccggaagaggccaagcgctttggactgccggagcgatatcgcggcggtctgctctttgggcagatgatcccgcgctttgacaaccgcatcatcagcacctgccccatcagcggagaaaagacgccgctcaagcattgccccgagtattatcgctaccgctgggcggagttgatggcgaatcttgccgtagaagtagacggcgtaaagcgtccgctgctgccccgtgaacgcgaagccctccatgcgtgcatgactgaacagggctatctgaccaagggccagctcaagaaggcgctggaagagattaccggcggcagcgccaagcaggtggacgactacttcctgcatgcggagatggaaaaggcgctggtgttggatcccgtccggaaggaggtgacgggaagcaagttggggccgatctggcagacgctctcctcgaagcaccagaagattttcgcgaatcagttcttccgcgatggtaagattaagctggaggattggcgagcgcgcttgctcaaagatggggaagatgtctccgcttttgacgccgccgtggaggaggtcgtggcccagaccaaaccccgaggcaagaggaaggccgagccgctgacggtcgacgccctcatgactcaggtccatcggctgggcgctgccgcatcgggaagggccccgtattcacgccagctgatgcaacaggcggttgaggaggtaatggctggccttcatccaaaggcagtcaagagtgacgacccgagtaatccgcaacagcgcaacggctgtctggctcgaaccaatgagattctggagcgcgagcgcggccgccgcctggacgagcaaacgaacaaccacctcgtgcgccaccggatgctgatgttccgtcgactgctggaagatctttaccagcaatacgcgggcggagatattcgccgagtcggcccgaccacgatcgaagtcgcgcgcgacatggtggaatattccggtatgagcgcgcaggacaaggccaagctcttcggccagaaagtcgccccgttcaaccgggcggagaaatacctgcgggaggcctttgaagacgcggacattttcaagccgatcacttacaacatgattcgcaaggcccgcattgcgatggcgcagaattgggtgtgcccctacactgggcgtagcttcgggcctcaggagattgcctatgatcaggttgacttcgagcacatcgttccgcgctcgcagaagatcagcgattcgctggacggcctcgtcatcacgttccgcgaggtgaataaaatgaaaggaaaccgcttggcgctggacttcgtgcggcagtgtgcgggcacttccgttgctgtcgtctacgaagatgaaaacagcgagatcgtgtcggagaaacgcttccgccagattgtagatggctggtaccccaagcgcgacccgcgcagcttgccgaatgcgaccgacgaggacttcatccgctggcggcgcaaacagaacctgctgcgtgagacctatgatgaaaaggacaacgacttcacgccgcgtctgctgacattcacgtctcacctcaacaaactggcagctctcgaagcccgcaagttctggcatgcggaggcggcaaaggtagacgcattacgccaagtcgagccggagcacctggtgggacatatgcagggcagcgtcacgcatcgcttccgctcggattggaagctgttgggctgcctggctgaagtttgcccggaggtcgttgagaaggttggggatgacagtcgcttgctgccaaaagcgcagatccgcgagatcacccacctgcaccacgccgtggatgcggtagcgattggactgacgcgacagtgcttcgcccgcctcggctacccagtgctcgagcgcgagaagtgccagacgattctcaagcgcaaggcgtccaacaatgatgagcgcgattggctggcttccctgggcatctttcagttcgaccaccaaggacggcaccacctgaagcctctagatgaggacattcgagcatcgctcatcgccgctttggcgcaaaagcgcgtggtgcagcatgtcccggcttccatgagcgggttgaaagtcgagcagacgcaatggcgtgtgctgcatggacccgatggcgatggcaagcttaccctccgtcagcggggtccgcgcgagaacggacaccgtcgctttaaggaagccaaggaagccagcagccgcgtgctcggctttgctccgacccgcgaagagagcaagctgaagccgcgtcaggcaggcatcgtcatttcggagaacttcggcgctgcgatttctgacgcaggggcgaccgtcatccccttccaccgtgtttggaatcgcctacaggagttgaagggggctgatggtaagccaccgttggtcatccgccgggggcaggtgatccaggtcgcgaatgggcgctataaagggctctggcgcatccattcggttaaggacaacaagaccggcgtttcgctcgacatggcccgtccggagctagtaaaggccgagaacaagaaggcgggctgcggcatgaatgtgcgcctggccagcttggtcaaaaacggcctgcgccaatatgaaacgactttgacgggagacccgatgtaagcgcgcatgtcctaccacatcatcacgattgaggagaccggcggcatggtttcgtgccgcaaagggcaactcgtttgtgagagcgagcaggggcgtaagtcgattcctctcgaagatgtggccgccatcatcattacgagcttctcgaccagcctgcacagtcacctgctgatcgaagcggcaaagcagggggtcgcactggtcatttgcgagcactttcagccggtcagcctcctgctgccggcgaatcggtcctcggatacgctcttgaccaaggcgacgctggcgctgccggaaaagcgcaagggcagcctttggcggcgcacgatcaacgccaagtgcgtcaaccagtatctcgtggcgctcgagctcgcgccctatcatgcaaaactcgagcggctgcgggcgactgcctacggcaaaagcccacacaaggaatccgcggccgcccgctactactggcagatctacggtgaggccctcggcgaaaaaggcttcgagcgtaatgagggcggccaccgcctcaacggcctgttgaattatggttacgctgtcttgctgacgtccgtgctgcaaaagctgtttgcagttgggctggacccgactttcggcatataccacgccacgcgcgagcgtagcacccctctcgcctacgatctgatggagccgtttcgcccgtgcgtcgactggcgggtatggcagtggatgcgccagcaggaagacccggaggattttacgctgaccaaggaattcaagcgcttcgtcaccggctttgtcctggagaaggtcggctacctcgagatggaggtggatatccgctcctgcatcgaaggtgtggtgcgcagtttcaggcgggctgtgctggagcagcgcgcaacccactatcaaccatggacacccaaaaattcaaagtgggctggatgatcgtggcatttgaccttccggtgaaggaaaaagacgagagaagggcatacgctaatttccgtaagttcctgctcgccgacggctatcaaatgcttcagtttagcgtatatgcgcgaccgatggtcagccatgcccggatggagacgcacgtgcgccgtctccgcgccaatctgccacccgaaggcagtattcgcgccgtctttgtcacccaggcgcagtgggaccgctccttcgtcatctacggcaaacccccggaggaatttcctccagagggccttcctgaccagttgcagttctggtaactcgttggagtttaatcataacgggaacggttagtctgccttcgtcagaagtggaatcaaggcaaagcctgcgcttgcgtctcgtgcgcttggcgggtagtctgccttcgtcagaagtggaatcaaggcaaagctctgcctacgcaatcctcgtcgaggcaacgagtctgccttcgtcagaagtggaatcaaggcaaagcacgccgtcggtatccttgccgcgataggtcagtctgccttcgtcagaagtggaatcaaggcaaagctcccggtggtcgcgggactgcctccatgtagtctgccttcgtcagaagtggaatcaaggcaaagcgctcgtgtccgcaggggctgccgcgtgggtagtctgccttcgtcagaagtggaatcaaggcaaagcgacaatgcggagcgcttgtttttgcgctggagtctgccttcgtcagaagtggaatcaaggcaaagcctctcgcaggtaggccgagatgatcctactagtctgccttcgtcagaagtggaatcaaggcaaagctacaaaggtctacaccaatgtatctcgatagtctgccttcgtcagaagtggaatcaaggcaaagcaatgaaccgtcggaagcctcagtgcctccgagtctgccttcgtcagaagtggaatcaaggcaaagcctgcaaaaatcgtggtcgcttgcgctggcgagtctgccttcgtcagaagtggaatcaaggcaaagcgcggaagccaaactcgacgttgccccagttagtctgccttcgtcagaagtggaatcaaggcaaagctgcccggcaccgcgctcatgagggtctttcagtctgccttcgtcagaagtggaatcaaggcaaagccatagacccgtgaacctgcggccgatatttagtctgccttcgtcagaagtggaatcaaggcaaagccacctgcgcatcggcacgccaagcactgccagtctgccttcgtcagaagtggaatcaaggcaaagccgagatatacggtgcgcgctccgcccttgaagtctgccttcgtcagaagtggaatcaaggcaaagcaccaaacgggccgccgaaatggagcgcagcagtctgccttcgtcagaagtggaatcaaggcaaagcaggcgggcgcggatgtcgtcaggcgtttcgagtctgccttcgtcagaagtggaatcaaggcaaagcgatccagcgttgctccgtacagtttgtccagtctgccttcgtcagaagtggaatcaaggcaaagcagacgcggcgggcctgtagatggcggttgaagtctgccttcgtcagaagtggaatcaaggcaaagccagcacgccggagtccgcagcgccatcaagagtctgccttcgtcagaagtggaatcaaggcaaagccgcgccggtgactggatagctcattgactcagtctgccttcgtcagaagtggaatcaaggcaaagcgtggatgcatcggtgctgacggcagcttgaagtctgccttcgtcagaagtggaatcaaggcaaagcaccaaaatcagcgcatcgcttgaccagttcagtctgccttcgtcagaagtggaatcaaggcaaagccgaggaaatctccactccatcataggcatagtctgccttcgtcagaagtggaatcaaggcaaagcggaaccacaagccaagatttgcaccgtaaaagtctgccttcgtcagaagtggaatcaaggcaaagcacatcggcgggcctccactggaacggtaggagtctgccttcgtcagaagtggaatcaaggcaaagcaagattgaaccagtcgaaaacaccatcaatagtctgccttcgtcagaagtggaatcaaggcaaagcggcaaaggcgtcctggatcgggtcagcaaaagtctgccttcgtcagaagtggaatcaaggcaaagcagtagggggaagcgcatgacttccccggggagtctgccttcgtcagaagtggaatcaaggcaaagcaggggccgaaggcgtcgcattcagcggcgtagtctgccttcgtcagaagtggaatcaaggcaaagctcagtttgccatccatggtaaacgcgggtgagtctgccttcgtcagaagtggaatcaaggcaaagcgcgctggtggacgggcacgcagccggtgacagtctgccttcgtcagaagtggaatcaaggcaaagctatgtcataccgtttggcgtccgaatcgaagtctgccttcgtcagaagtggaatcaaggcaaagccattccaatcatcaagcgttacactgttgagtctgccttcgtcagaagtggaatcaaggcaaagcccgattgacgatttcgtagacgcgatcccagtctgccttcgtcagaagtggaatcaaggcaaagcacaagtgcgatacagccagcaagcccagcgagtctgccttcgtcagaagtggaatcaaggcaaagcccctactaccccacgaagcgcgccgccgagagtctgccttcgtcagaagtggaatcaaggcaaagctgcgatcaatagcgcgatccaaagcatgagagtctgccttcgtcagaagtggaatcaaggcaaagctgctctctcgagtgcgagacgagataatggagtctgccttcgtcagaagtggaatcaaggcaaagcgtgttttacggtgatccggatttgcctgagagtctgccttcgtcagaagtggaatcaaggcaaagctcgcctgatggtcaggagttctccgcgatgagtctgccttcgtcagaagtggaatcaaggcaaagcaatattggcaattactacatcgtgaccgtagtctgccttcgtcagaagtggaatcaaggcaaagcaaggaggtgcggtgctgcacgccaacgcatagtctgccttcgtcagaagtggaatcaaggcaaagcggaacttatgcgcaggtcagctcgcgcttagtctgccttcgtcagaagtggaatcaaggcaaagctaatcggaatcggaatgtttgctggaggtaagtctgccttcgtcagaagtggaatcaaggcaaagcgcaaaccctgctgggcgacaatggctctcagtctgccttcgtcagaagtggaatcaaggcaaagcatccaatcatacggcatcatcagagaagatagtctgccttcgtcagaagtggaatcaaggcaaagcttttagaagtaatagccctgcggttagataagtctgccttcgtcagaagtggaatcaaggcaaagcgcagcaattgcgttggtgcgcgtgcggatgagtctgccttcgtcagaagtggaatcaaggcaaagcagcaggcgcttatgaaagtgcttctcacgcagtctgccttcgtcagaagtggaatcaaggcaaagcctcaagcaggcaatcgaacgcatcagccatagtctgccttcgtcagaagtggaatcaaggcaaagccgttcgggctcgcgatccacaccagctggcagtctgccttcgtcagaagtggaatcaaggcaaagcaatcgacgatataggctgatccaggctcgcagtctgccttcgtcagaagtggaatcaaggcaaagctgataccgatgccaccgcactagaagcggtttcaaaacgtcatcctgcgcatggttagcataatgcaggcgatcatgaagaaggcatggtataggtgcaggtggtgctcgtggcgcac

SEQ ID NO: 1688 - DNA, 16325 bp, synthetic construct
  source 1..16325: mol_type = other DNA
  misc_feature 1..16325: note = Synthetic
gggattcatgcccatgttggatacgaggctcccgcagagcgcggcgccggagtgccaaaggcccgtcgtgcgctggttcttgaaggaaagtccgggtttttgtgaggtggtctggatcatcggctggtgcggttttcagcgatcatcccgctgcccgagggcttcggaggctccatggccatgtactggatgatctgggttgcgatttccttgaaagcgggtgccgcgaccgtgccgccgtagcagatgcccccgtcggggcgcttgccgtcgttcaccacgacggtgacggcgatcttggggtcgctggcggggaagaagccggtgaaggtggccacgtgcttggtgtgcgagtaatggccgttctccaccttctgcgaggtgccggtcttgcccgcgacctcgaagcccgggatctccgccttcggggccgtgccgcccttggaggccacgccttccagcatgatgcggagcttttcggcggcttcgctgctgacggcgcggtcgcgcgccttggcggggaaggagaacacggtgttgcccgcagcatcatacacgcgccggacgatcctcggggaaagcagaacgccgccactggccaccgtgctcatcgcatagtgcatctgcaccgccgtgacgcacacggcttgccccatcggcatacggctgatcgtcagaccgtcccacttgtcgagaggatggacgatgccgaggacctcgccggggccgaaggcgtccgtgcgcttgccgaagccgaacttgtacacgtaatcgagaaaattttcctcgccgatcttcatgccgagctgagccgcgcccttgttgctcgaaagcgagacgacgctgcttaccggaatcgtgccgagcgggccgtgggattcacccggaaggttcaccatgcggccccggtacgaggcggcggaggcggagcagtccacgagggtgttcggtgtcaccaggtgctcgtcgagggctccggccacggccacgatcttgaaggtggaaccgggctcgtacacgtcggtgatagcgcggttacgcaggttttcgaccggaacggacccgtagttgttcgggtcgaagctcggccagttggaaagggcgaggatgtcgccggtttttggatcggaaacgatgatgaccaccgactcggggtggtaggtgtccgcgagcttggccgcctggcggtccgccatgtcctgaatcgcgaggtcgatcgtcagctccacattcatgccgtctcgtggggcgatctcgcgcttttcaaactgcaccatctccttgcgacgcgcgtcgatctccgtctcgcgccatccgtcctgaccgcgcagataataatcaaactgaccctccacgcccatcaccgcggcctcctccttgttcatgaagccgatcaggtgcgaggcggccatgccggatgggtagttgcgcacatacttgcggttgccataaatggcggggacgccggcggcgcggatcttgtcgtaattggaatcgctcaccgcgtcggcgatcttccgccagcggatcttgcggacctcgcccgtctctttggatgtgatcgtgcccggctggcagaggcgggacagttcgtccgcgtccatgccgaggatcttcgccacggcaggcaacttcgcctcgtcctcgggacgcatcttctccggatccacgccgagttcgatcacggggctcgtggccgccatgaggttgccgctgcggtcggtgatgttgcccctgcgggcgcgcagaacgtcaatccgctcgcgggaatgctccgccatcgcggcgatttccggtccgcgaacgacctgaaggaggtagagcctcgccatgattccgcagtagccaagggtgatcgccgagaacacgagggcgaagcgccagcgcgagatgaaggcggggctcatcataggttagcgggaggtcacaccccccttgaggagggcaagttcaaaggtcacgaagatcggttccgccgtggcggaggcgatcgcggatactttgccgggaagttgcggcaggccggccagatgcaccacctgcgtgttcgcgggcacgttcaggttcagggccagttccgccgcgcggcgcttgagggcgtcgggcgaggtggcctcggcgatctggacgttcacgtattgcagacggcggtcggtgtcggcgatggccagttgcgtcgcgcgcaccctttcggcggtggcggagatttgctgcctcatatagagaaggcccagtcctcctgcggtcgcggtgagaaggttgagcgccaggagcgtggcgatccggtaaatgtagatcgtgtcctgggggttgcgggtggtctttttcatggcgggtcggtcggtcggtggttcagagccgggtgagcgcgcgcagttttgcggaacgcgcccggggattgcgctcctcctcctccggagaagcggtgacgggcttggtttggtgcagttcggcacgcttgacgcggctctgctgcggggaattgtcgaaacggtcttccggcatgcccgcaaggcggcgcatgaagcgcttgacgatgcggtcctccagcgagtggaagctgatgacggcaagaacgccgccgggcgcgagaaggtcgaaagccgcgggcaacgccgcctcaaggacctccatctcgcggttcaccgcgattcgcacgccctggaagatgcgcgtggccgggtggatgcgccggggaccgtgcgtcccaacagcctccgccacgagctccgcgaaggaaagggtgcgggaaagcctgccggtgccgcgcgccgcgaggatcgcgcggtgcgccgccttccagcggggctcctccgcgtagtcgcgcagggccttcacgagatcctcgtcggaggccttctccagaaactcggcggcgctcatcccctcgcgcgggttcatccgcatgtcgagcggggcgtcgctgcggaaggaaaagcccctctcgcccttatcgaagtggaaggaggagacgccgaggtcgaagaggatcgcgccgaagcccgtgccgagaggcagcttcgcaagggagccgaagttcgcgtcgataaaggtcactcttccggggaattccgccgcgagggcctccgcgcggggcgccgcgtccggatcggtatcgatcgcggtgagggcgcaggcggggaagcgctccagaatggcgcgggaatgtccgccgccgccgaaggtgcagtcgagagccttcgccggaccgccgagcggcgcgccctcggcaagcgccgcgagagtttcctccaaaagaaccggaacgtgcccgcccgcggcgcccaagtcatccggcgcgccgaccccttccgcgggatcgtccctgcggaaaagagtcaccccgcccgtgaggaagggcagggcaaatgcgaaggcgggaggcatggatgagattcgctttagcgggcacgaagaacgtcgatgaggattgccacgtacccgcgcttgcgggattcgaagttgggacggaaggattggcgtgaaaacgagggctcggagcggttcaggcgcggcatcgtggggtattcccagttgttgcagtgccgctcttgcccgctgctgagcattccgctgtcgtacaggcggtccatcatggcgttcggaagggtgaaagggttgggttggaaaagggattggccgaatgcgcaaaccgggggtctagatgcccagcctgcgcattgcgtcgagaatgttgatcttcgggggagaccagcgctctgcggaccaaatctggaaattgcgccctagcccgacgaggaccacgtccttctcgatgccggcatggcggcagagatcctcgggcaggagaatgcggccctgacggtcgcagcccatgaagtgagcgttgccgaagacctcgcgcaaaagcgcctgggtctcgacgtccgactgctgggcgcccttgatcttctcgaagatctcgcgctgcatttccggcgtgaaaaacgcgatgcagccctccgggtgcggccaggccagatagtagttctgctcgtcgccctccaccctccaggacgagggcacggtcacgcggctccggccatccagcgaatggcggaaattgctcacgtaactgatcgggctcttctccacagcacttctccacaaagcgggtcgggagcctatgactagggctccactcgccccactttcccccactttgacccacttcgcccccaaggtcaagtggcaacgagaagaatttgtgcattttggagcgaaattccgaagggccggaatcccgttgattcatgcggcttccggggttttactgactcttccatggaaggctccggaaacaggaaagtgaaaaaactgcgtctcgacgaaatcctcgccgcgcggggactggccccctcaagagctcaggcgaggctcatgattcttgagggcaaggtgaggagcggcacgcaagtccttgacaaagcaggtcatatgtttctagagaacatcgacatcaccgtggaggccccgccgcgctttgtgagtcgcggcggcgaaaagctggaggggttcctcacctgcttcccgatcgaccttgcgggaaagctggttctcgacgtcggcgcctcgacgggcggcttcaccgactgctgcctgcaacgcggcgcggcgcatgtcacctgcatcgacgtgggccgcgcgcagctccacgaaaagatccgcagggacgcccgcgtggaaaaccgcgagggggtcaacgcacgctttctcgacatttccacactaccccacccttcctacgacgctattgtgatggatctttccttcatatcgctaacctcggtactccccgccgtgtggcccgcgctgaaggtgggcggcagcctcgtatgcctcatcaaaccgcagttcgaggtgggcaagcacgacgccgaccgcttccacggcgtgatccgcgacgaggccctgcgcgcggcggtggtggaaaaaatccgatccttcgccagggaaaacctcgccggatcggaggaaatcggcctttgcacatcacccattcagggcgcggaggggaacgtggaattcctccttggcctgcgcaaagcgcaggcgtcgcaatccgctccggcaaagtaacttacaccgacatcatctgcttgatcatcggcctgaggcactcgcgcggcaggtccttgcggatgtagtggcgcgcgcccagcttgagcgcacggaagacgtcggccttggtggcgttggaggagacgatcaccacgcaggcattgcggttggcctcgcggatgcgcttgagtgcctcgaaaccgtccatgttcggcatgttgatgtcgagaaacacgatgtcgggacgggcgtcgatgtaatgctccagcgcttccagtccgtctcgggcctgaatcaattctccgacggtgaattcgcttacgagcgaggagatcgcacggcggcacaattcatcgtcatcggcgatgaggactgtttttccttggggcatgactcacacacagcatcaatgcttgggggtattttcggtcgtttcccgggaagcgcaagactccggcgagtctttgacgtttctataacacgtcggaaggatcgtgaggaaatgaaacaaaagtgtcatgagttctttttttgtgaaaaagatttgactattttagcgggaaacgctgttctgaaggccagccttcaagcaaggcttttagccaactcctgcgttaccccaaaatagggacccgtccattcgtggacgggttcttgttgtacctacaccgcatgcgaccaccctcccgcgacgaagtggcgaatttcgtcattgaggatcggcgaaccgaagagcggcacgctgattgtaaattctgttcgtagtgcagattgacagcgctgggaggcaacggttccgccccgacgggagaaacacacgctctgctccctatcgcatcgccacgagcttctcgcacaccgcgtcgatgaggaattcgggcgtggaggcgcccgcggtgacacccgcgatttgcaccccggcgaagtccgcctcggaaagctcggccgccgtctccacatgtagggttttgatgccgctacggcgggaaaggtccgccagcttgcaggtgttggcggaatgatgcccaccgatgacgacgatcacctcggcccccgacgcaacgaggcgcgcgacatcctcctgccgcgccttggtggccccgcagatcgtgtcgaggacgacaacctccgtgtatttccgccggaggcattccgcgatcacctgaaaatcgtccgtgaacatcgtcgtctgcgagaccaggcacaccttgtcgcccagaggcggcagggcctccacatcggcgcatttctgcacgggaaaacccctgccctccgcatagccgagaaggccgattacctcgggatgatcgcggtcgccgaagatgacggtagcgtaaccggcgcgggcatacttgcggatcttgcccgccacaatgcccacgtcgggacaggtggcgtcgcggaattccgctccaaggcccttcaggtactcgcgccgctgcggggaaacgccgtgcgcgcggacgacgagaacggcgtccccggcctcggccagactctcctccaacggcttgcgactctggtaatcgccgatgtcgcggatcccctcggcctccagattctggatcatctggcggttgtggatgagcgggccgtcggaaaacacggagcgcttcccgccgtcggcaaacgaacgcgcgatcttgatcgcccgttccacgccccagcagaagcccgcgctctttgccctgatgaccttcatcacaatgatgagggaggaactaacagggccctgttattcctcgcaaaacatttcgtaaaaagcgtcggagggcccgcttccgcgcggttcgactgcggcgtcgtcttccaaagtcttgagatcgggcgacatgaaggtatatatcgcccctactcctcttgtgaaaattctcatcgtaacaccggaagtggccccctttgcgaaggtgggcggtctcgcagacgtcacgggagccctgcccaaggcgctcgccgccctgggccacgacgtgaaggtcgtgtgccccctctacggctccatccgccgcgacagccagtggcaccctcagggcaagccgctctcggtgcagatgggcacgggcgtccgctacgcacgtgtgtgggagcgcgttctgccgggtagcgaggtaagcggttacttcatcgaatacgacgagtttttctcccgcccggagatctacgagggcccctggggctggcattccgacaacgaccggcgcttcggcttcttcagccgcgcggcgctcgatttgtgcttctggatggactggatgcccgacgtggtacacgtccacgactggccgacggggctcgtcccggtgatgctgaacaccgtgtacgcgggcactccgctcggcagggccgccagcatcctcacgatccacaacatccagcatcagggctactgcgaccattccatcatcggcttcctcggccttccggagtggctcttccgcgcggaccacatcgaggcgatgggcgccgtttccatgcttaagggcggcatcttccactccacgaagatcaccaccgtcagtcccacctacgcgcaggaaatacagggtccgatcggcggacagggcctgaacagcattctctccttccgcgcggcagatctagtgggagtgctgaacggcatcgacacgagcgtctggaatccccggactgacaaggccctccccgcccccttctggcatggcgatctcgcccccaaggagctttcaaagaaggcgctctgcgagaaattcggcctcaattaccgcccggagacgccggtgtacggcgtggtctcgcggctcttcgggcagaagggtctcgatatcctgcgcgggatcgtcccgcgcctcatgcaggagaccgacgcccagttcgtcgtcctcggcatgggcgagagcgatctggagtacgccttcagcgacttccacgggcgctacggcgggcgattcgccacatggatcggctttgacgacgcccgcgcgcggcttatttacggaggtgcggactttttccttatgccgagccgcttcgagccctgcggcctcggccagatgtatgcaatggcctacgggacaatcccggtcgtccgcaggaccggcggcctagcggatacagtgcgtccgtacaacgaggcggacgcctccggcacgggtttcctcttcgacgaagccagcggcgaggcgctcttcggcgcgatcctgcagtcgctcaaggtctatcacgagaagcccgaccacatccgactcttgcgcgagcacggcatgcggcaggacttcacgtgggacaccagcgccgccgcctacacgaacgtctatcgctgggcgatcgaaacgcggcagggaatcgtgagcaacactcccctgcccgcaaagtagtagggtctgtcggctcctatttgtccgtttttccggcctcgtccgccttgcgcaggttgttgggatcatagaccaccgcggcggcgccgaaggtggacacgcgcccgtcgccgggacccgcgtgatagggctcgctcgtcgcggaaccgtccagaatggtctccacacagcggatctggtcgaggacgcgggagccgtcggaagggccgccgtgcccgggcaggagcatcgagaattccgggaggcgcttttccagcttccgcagcgactcaaggaaggtcgtcagcgggggacttccggccagttgcagccagacaagcccgttgttgttgtcgccggcaaagaggatgcggttggccccgtccaagagaacgatctcccccggcgtatgcccgggggtggcgatcacctcgatccggcgcccgccaaggtcgatgaagtcgccatccttcacctcgcgcgtcgcaaactcgcggaccgctcccttgtaacgatcttcctccggcacggcgggaaggcccatcccggcgaggaatttcgcgtcgaagggcggcttcatgttctggagcagcatcgcatccgccgcggtgatgagaatctcgtcaaactggtaatccgcgccgacgtgatcggggtgccagtgcgtgttgaggacgacgagaggcagggaggtgatcgactccagatacccgcgcaggtccgccgcgccgcttccggtgtcgatcacaagcgccttctcggcgccgatcgccagatacacattggaagtgccgtgatcgtcgatacaccaggtgccgggcgcaacaagtgtcgccttgaaccacgaggaggcgcgaggcgcgcgggccgtcgccttcgcggcaggttcgtccgccgttgccgtagcgtgaagaccaagcgataaaattaggagagccaccgcaaaacgagagattgccttcattttcgatgtccggatcccacgaaaaaccgcagagttctccggaacggatcaaatgcaaaagccatccaattcgcacggcaacacgaaaaccctccgcggcgaaaaaccgggatatgtggcggacaagcaggaaaagacggcaaaactccgcgtcgttcgatttgcttgccccctcattttccggagcatattagttgccggagcgatggagggcgcacccgaaaaacggagcatgtgccgtcctttcgccaccgacaatgtggcagtagctcagtcggatagagcagcggtcttctaagacgaataacggcttttagctggtgtaatcacaagtcgtctttcgtgcgcaatcaactgcatcgcaaagactagcgcagcttcgtccgcaatcctgaatcatcccgaatccgcacattttcccgcgtcgggttacaaatcgggttacaaaaaaagcggctctgaagccgctttttgcaaccctttcttgcgccggcgtggctgcaaaacagaccagaggccgtaggctcgggctactaactttgtcttgattccgaattagacattaccctcgatccaagaacagtcaagcttattgattgaaaaagcgtttgattgacttgtggattggcttcagtatccacccatggacacacccgttactacccccgacgtttcgttctcgttcgacatcggcgacgcctccattggctgggcggcgctttccactcctccccgcgcggtttatccgaaaattctcggctgcggcgtcctcctcttccccaaggacgactgccagaaccacctgcgcgcccagtaccgccgccagcgccgccacatcgccgcgacgcgcaaccgcatctcacgcatccgcaagctcctggtcgaaatgggggccctgacggaggaacaggctgcggagcagaaggaaggcgcctcgggcgtcatgatgccgtggctcctcgcggcgagggcgctgcacggcgcgaagctcacgtggaccgagctctggcaggtcctgcgctggtacgcgcacaaccgcggctacgacggcaacgcccgctgggcccgtgggggggaggaggagaaggacaccgagaaggtgcagaaagccagcgccctcatggagcaatacggcacgagcacgatggcggagacgatttgtgcgttcctcggagtgaatcccgatgacgacaaagcgcacatcagcgagaaggctccttacttcaagggcgagagcgtggccttccggcgcgagatcgtgcgggacgaggtgacccggatcgtccgctcgcagttcggggttctccccggctgcgacgagggcttcctctcgctcctcacgggccgcgacctgacagcggaggaaaagaagcgcttcaagctgccagcgcgatatgcggggggcctcctcttcggccagatgatcccgcgcttcgacaaccgaatcatcacgaaatgcccggtgacaggcgaaaagacgcctctcaagcactgcaccgactactaccgttaccgctgggcgaggctcctcgcgaacctccgcgtgaaggaggaaggcgcggacgacaagcgcgccctcaccgctccggaacgagcggaactgacccgccggatggagaaaacgggcggtctgacgaagactcagctcaaaaaggcgcttgaagagatcacccatgccgacgcaaagagcttggacgaccaattcttctcgcccgaaacggaaaaagccctcgtcctcgaccccgtgcgcgacgccttgtccggtgcaccttttgaaaacgtctggccccttgtgccggaggcgctgcaaagaagaatcgccggggagttcttcaagagtggtcggctttcgctggcagaccttctcgccgccgtgcggaaagcgggtgcggatacaacgcagatggaaaacgccatccgtctcgactttctgaaggccgccaagcgcaaacgcaaggaacccctgacctacgaggcctatctcgctgacgtgaaacacgtggcggaggcaagcggcagagccccctactcccgccccgtgctgcgcaaggtgtatgaggaggtgctcagcggcatggatcccgccgccattgcggacagtcagccgccctccgcgccggaaaagcgcaatggctgcatcgcgattacgaatgaattcctcgaccgcgaggctgaaaagcggctggacgacatgacgaacaaccacctcgtccggcagcgcatgggcatgttccggcggctcttcggcgaactcttcaaaacctatgccgggagtcagccttcgcgcgtggcggaggtgacgatcgaagtcgcgcgcgaccttcaggaatatgcgggcaagaacgcaaatgagagggccgcgctctttagcgagaaggccaagcccttccagaaggccgaggccgtcctgcgcaagggcttcgaggaggcgggtattgcgcggcacccgacttattccatgatccgcaaggcgcgaatcgccatggcgcagaactggacctgcccctacacgggacggcacttctccgcagccgacatcgcgaacgaccgcgtggatttcgagcatatcatcccgcacgcctcgcgacgcagcgacgcactggaaggccttgcaatcacgttcaaggaaatcaacaaagccaagggcaagcgcacggcgctggagttcatccggagtggtgaggagggtctgatgaccgagtcccgcttccgcgattacttggatggactctatcccaagtatcccccaagccgcgacgcgagtgacgaagacaagatcaactggcgacgcaaacagtggtttttgcgcgaagattacgacgagcgcgacgcggagttcacgaaggccgccctcacggtgacaagtcacctgaacaagctggcggcactggaggcgcggaagatcctgcggggtagcgcaaaggcggcgggcatggacgcgggatcgccggagcaccgcgtcgcccacatggtgggcgcgatcacgggggaattccgcaaggacagaaactgggatcttctcggctgcatcgtgccggtctgcccggagatcgtcgatcccctcagccccgagaaacggcacctgcccaagggcgaaatccgcaacatcacgcacctgcaccacgccgtggacgcgatcacgatcggcatcgcgcgcaacatcttccccgggcacgtcgtgaagcgcgaagtgtgcgaggcgatcctctcgcggcgtccgaatccggcacagcgttcaacactggaatcaatgggggtcttctttttcgacaaggacggcagcgcccacctcaaggacatgccggaggaattgcgacagaacatcatcgataagctcgccgaatgccgtgtcgtccagcatgtgcctagatccaagcacggcctgcgcgcggaactcacgcagtggggcgtgaaacattacgacgctgaggccgaccgcgtgaaggtcgtccaatacactcgcgactccgccaacggtaatgcccgcaagcgcaaggagaagtggaaaaacccgcgcaagctcttgggttacaatccggttggggaaagcaagctcaagccgcgcaaggccgttgtcttcatcgacgtcaacttcggcatcgcgctcctgccggagcccgtcgtcctgcccttccacaaggtgtggaaacgactgggagaccttgccgcacagaacggcggaaaaatcccgaccgtgctccgtcagggagacgtgatcgaggtcccgaacggtcgctacaagggacgctggcagatccggtccacgaaggacaatgcggcgggcgtggcggtctccatcgcaaaaccgcatctggtggagaccttcaagaaaaacgtccttgtcagttcgctcatcaaatccggcatgaccatcgtccgccagcccctcatcggttcgtaggaggcatgtcccaccacatcgtcaacatcgactcccccgggtgcgtggtgagctgcaagaacggccagctcacctgcaccggggaggacggtgtgcgccagcttccgctggaggatgtggcggcgatcctcatcacgagcttctcgtcggtcgtgcacggggcgcttctcatcgaggctgccaagcacggagtggcgcttgtcatctgcgagcagttcaagcccgtgagcctcatgctgcccgcgaaccgttcgagcgacacgctgctgaccaaggctgcgctggaactggacaaaaagaaaatcgacgccctctggcggcacacagtggacgccaagtgcatgaaccagtatctgttggcggtgaacctcgccccgcatcacgagaaactgggcgcgctcgaaaagacggctgcgggaaaaatgcagagcaaggaggggacctgcgcccgcttcttctggagcatctactccgaagcactcggacaggagaattttcaccgccatgaggacggcttcggcctcaatgcgctcctcaactacggctacgcggtgctcctttccacgatgcttcaaaaactcttcgcgctggggctcgaccccaccctcggcatctcccacgccgtccgggagcgaagcacgccgctcgcctacgacctcatggaacccttccgcccctgcgtggactggcgcgtggcgcaatgggtgaagatgcaggaagacccggcggaccttgcgatcacaaagccattccgccgcttcgtgactggcttcgtgctggagaaggtggaatactttgagatcgaactgagcatccagaactgcatcgagggcgtcgtgcggagcttccgcaacgcggtgctggaaaaaaacacccggctctacaagccatggataccacaaggttcaaagtgggttggatgatcgtggcatttgacctcccggtcgtggagaaggagcagcggaaggccgcgacggacttccgtcaattcctgattgatgacggctacttgatgatccaatatagcgtgtatggcaggccgatggtgagccatgcgcggctggaaacgcacgtgcggcggctcaagtcgaacctgcctcccgagggaagcgtccgcgccatctttgtgacgcagtcccagtgggaccattcgtttgttctgtatggcaaaccgcttcagtctggatcgcccgaagggcagcccgaccagatgcaattctggtaaccggctgatctccagccggttccagaatgcgagtctgctctacccaagagtggaatcaaggcaaagcgcgccgaccaatcagaaggcgggttccgggagtctgctctacccaagagtggaatcaaggcaaagcctgatgctcgtgctcgaacttgcgttcgtaagtctgctctacccaagagtggaatcaaggcaaagccacctgcacgtcaaaaccgagtatttcgaagtctgctctacccaagagtggaatcaaggcaaagcaatcgcgtcggtgaagttcggctccttgaaagtctgctctacccaagagtggaatcaaggcaaagctcgatgtccatctcccactcgccggatttagtctgctctacccaagagtggaatcaaggcaaagcgaggcgtcgatggtggagctggtgcagcacagtctgctctacccaagagtggaatcaaggcaaagcccgcaatcgtagcgcagaggttccccagttagtctgctctacccaagagtggaatcaaggcaaagccgccgcgtcgtgctttgcgacccgtggatcagtctgctctacccaagagtggaatcaaggcaaagcgcaaactcccatccccctcaaaactccatagtctgctctacccaagagtggaatcaaggcaaagctggaattcgcgaatgggtgaagtttatcgcagtctgctctacccaagagtggaatcaaggcaaagcggtcgtcttcgcctggggtgtgaggtgttcagtctgctctacccaagagtggaatcaaggcaaagcgcggagagtaatactgccctgcagccacatagtctgctctacccaagagtggaatcaaggcaaagcgtagtatactcgacaaccacgagcccgcaaagtctgctctacccaagagtggaatcaaggcaaagcattttcggggcctacaacggacaaggcttgagtctgctctacccaagagtggaatcaaggcaaagccaaggtcgctgccggggcaatcaccggcgcagtctgctctacccaagagtggaatcaaggcaaagcccagtaatcggctacaatcacagactccagagtctgctctacccaagagtggaatcaaggcaaagccgccagatcgttcaattcttcaccaaagctagtctgctctacccaagagtggaatcaaggcaaagccgatggaacaggggcgtttcttgctggatagtctgctctacccaagagtggaatcaaggcaaagctcagcccggtcgaacacgtcgaagatgcccagtctgctctacccaagagtggaatcaaggcaaagcgatcgtgcaggcgtcctctgaaagaacggagtctgctctacccaagagtggaatcaaggcaaagcggcggcaagatgaaggaagcaatcgagacaagtctgctctacccaagagtggaatcaaggcaaagcagcgcctcctacgcccactacaatcgcttgagtctgctctacccaagagtggaatcaaggcaaagcttcaggaatgtatttccacatcgcttcatagtctgctctacccaagagtggaatcaaggcaaagctaccaaggtgtatgcactcctgaagccaatagtctgctctacccaagagtggaatcaaggcaaagccgttacgtatcgttcgcaacagaatggaaagtctgctctacccaagagtggaatcaaggcaaagcgctctgcggtatgccatgcaaggaggaactagtctgctctacccaagagtggaatcaaggcaaagcgaacaacggtcgttccagaaattgacaagaagtctgctctacccaagagtggaatcaaggcaaagc

SEQ ID NO: 1689 - DNA, 23540 bp, synthetic construct
  misc_feature 1..23540: note = Synthetic
  source 1..23540: mol_type = other DNA
ggcaaaggctttggcattattaatgtcataaagcggggcgaggcgcagggtgccgttgcgccacagcaggctgtaatttttggcatgggcatcgggattgccgataagatactggaaaatggcgcggcgcagaagttcgcgccggtcatgcgccgggtcgtggctgtagcgcagcatggcaaacaggctctgccagcccggcccgccgtcgcgttcgtatttttgatccgggaaatgcccggtcgcctggcagaaatcctcctgatgcaggcgggtgagatagcgcgtgccggctttttcatgcagggcacggtcataccgggccagcaacataaaggtttgctcttcggcctggaggatgtgcgagcgcggtgtggcaaggccaagggcgcgggcaacctcaaggcagaaatgctctacccggatggagccgggcaggccacgaatgtcgggcttgaggatgtgcgaactgggggtgcggcccagcggcagggcgatgtcgccgcccacccggatcaccacggccttgtcatgcacgccggccagcgaaatgcggatttcgccttcatcatcggcaaaaagcgggcgggttggcagctcgcgaatgtgttgggccagttcggcctcgctcaggatccggtatttcgggtgataggggtcgtaatcatcggggtcggcgtcggatgcgatcagggaaaccgcaccggggcaatccctgcccagggcaaacagcattgcaaattcgtcattggcattaatggcatggcgattgcccagaatttgcgccaggcggcgacgggtttgtttgttgtccggcagcaatccggcaaaaaacggcccgcattgctggtcatcaaaccagaaagtgtcgttgtaatgatcggggacgggcagcgacagggacaggggatggcaatgaatatcccctgcatgatggcgggcaataaaatcggcattataacgaaattgaagccgtccgtcgtttccggcggcaagttcgcccatcactttatcatataaacagacaaaggccacccgtgccatgttacagcccctcgtcaatatccagcagatcggaggttgttttatcgttctgttcagggcgatcgatttcgccgggcatatcaagatggatcggcgcacccagtaaaaccagcagattgatcaccatatccaccggcggctgggtggccccggtttcaagcgaggacagccatttgcggctatggccgataagttgtgccgcctcggtctgggtgagtccgcgttgcttgcgcagggtgcgaaccgcattttgcaggtcggccggttttcggatgatcatgatgacaccgatcggttctatggttttgaattcaactatatgtaaccaatcggtgtcattcaagggttttgatgattatgacaccaaacggtatcatttttaggctttattgtgctgtccagccgccatcaaccgacagggtggtgccggtcatctggtcggcacccggcgaacagaggaagacggcggtttggccgatttgctcgggcgtgacataggttttcgacgggtgtttttccgataccaactctgttgccgcttcctcgaccgagacatcgtttttctcggccagggccttgatctgtttttctaccagttcggtacgcacccagccagggcagatcgcattggcggtaatgccggtttcggcggtttcaagggcgacaaccttggtcaggccgacaatgccgtgtttggcggccacataggcggccttttgcggcgatgccaccaggccatgcgccgaggcggtattgatgatgcggccccagttttgctttttcatatgcggcacggccaggcgggtggtgtgataggccgaggacaggttgatcgcgataatcgcattccatttttcaaccgggaaatcctccaccagggcggtgtactggatgccggcattgttgaccagaatatccacaccgccaaaatcacgggcggccatcttcatcatgtcttcgatttcatcgggcttggacaggtccgcgccgctatacagcgctttgacgccaaaatcgctttcgatgccctggcggattttttcgatttcatccgcatcgccaaaaccattgagcatgatattggccccctgcccggcaagggccttggccatcgcaaggccaatcccgctggttgagccggtcacaagtgcatgtttgccttttagcatggtcagtctccattatccgatgagggggcgttgggtgggcttatgggtatgaggtaatccgatcatgccgcagcgcaatcacccaggcaaggaatcacgttggggttttgcaggaaggggtgatatttcacctgcttgcgtgctgtgcgctgcaaaatggcggtgggcgggcctgcccggtgcaggggtcgcgcgccggttatccgccaatgccatatttgcgcaatttgttggcaatggcggtatgggacaggcccaggcgcgcggccagtttacgcgaactgggataatcgggataaagctgttccagcagggttttttccagcatatccatcgcatcgccgtgattttcacacagcaatgcctgtgcgaccacatcatgatgaggcatgtcggatgccgggtaggcggcggaggatgcgctgatgggcgggtcttccggggttggcgtgctgtcgccggaaagggccgggctggtcgccgattgcaggtcggatgcggccagaatgtcgccatcaagcagggcaacggcccgaaacagggtgttttccagttcgcgcacattgcctttccagtcccgggtgcgcagccattgcagggcatcacgcgcgatatgcggggtggtgcgttcggtctggcgggcggtgcgggtgacaaaataatgcgccagcgcgtctatatcctcgcgccggtcgcgcaggggcggcagggtgatgctgagcacattcaggcggaaataaagatcctcgcggaagctgccattttgcgacatgtcctcaagattgcgattggtcgcactgataatgcgcacatcggccgctatttcatcggtcccgccgacccggcgaaagcggccatcctgtaaaacccgcagcaatttggcctgcagatagggcgataattcgccaatttcatccaaaaacaggctgccgccatcggccagttccaaaagccccggcttgccgccgcgccgtgcagaggtaaaggccccggcggcatagccaaacagttcgctttcggccagtccctcgggcagggcagcgcaattgagggccaaaaagggttgatcatggcgtttactggcgcggtggcaggcgcgggcaaacagttccttccccgtcccggtttcgccaagaataagcagcggcgcatcgacaattgccaaacgctgtgcctgattttttacccgcagcattgcccggctggtgccgataatatcgtcaaagccgctatggctgagttcattcagcgcggtcaaaacacgtcccaggcgggcggcacgatggaaaatcaaaaccccaccccagggggcgtcatcctcgccggggtcagcatcatgcaccgggctgccatcatcgacccggccaatcggttcgacctgcaacaggtaggtttgcccgcccagggtgacttcgcgttcgccttgcgaaaaaccggcctggcgcaatgtttcaatatccgggtccgataaaatgctggcaagcggctggtcgcgcagcgactggtttggtgtgccggcaatggattgcgcagcagggttgacctgggcaatcaggccattggcatgcacggcaatcaccgggtcgcccagggcggccagggtggcgtgaagctgggcgcggcggcgttcggttggcagatggtcaatcggtttggcattgtaaaagcccggcacgtgccttaaccccgtgaccagttcgtcaaaccgggccggggacagggcgggaatatcggcatagatatgatgcggtgtgacttcaaaggcgcgaatatccagcccccgcgatgtcaggttatccaccacatcgcgggtaatgcccaggcggttttcggcggtgatttcaaaacgcatcgtatcaaaatctttacagtggaaagtattatatacacttataaagcactgattccctgatattcaaggggttctgtcggttttcaggattggagtgtaaactttactttacgatcataaaatgatcaaaatatctaatgacttgaatttaaagcaaaaagcataactggcatggcgattgcgacgggccgggtagaacagttttaaaaacgggagtgcccacatgtctgcgtcgaacaatcacagtcatcgcaatgccaaggccggttttgccacccgcgccattcatcatggttataacccggccagccataatggcgcattgaaccagccggtttacatgagctccaccttcgcctttgacagtgcagagcagggcggccgccggtttgccggggatgaaggcggttatatttattcgcgcattggcaacccgacgctcagtctgcttgaagaccgcctggcaaccctggaaggcggcgaggccgcgattgccaccgcctcgggcatgggggcgattacctcggttttctggacgctgatttccccgggcgacgaagtaattgtcgatcgcaccctttatggctgcacattcgcctatttccgccacgggctggaacggtttggcgtcaaacatacccatgttgatttgtcggacccgaaaaatctggaagccgcaatttcggacaaaaccaaggtggtttattttgaaaccccggccaacccgaatatgcgcctggtcgatattgccgcgatttccgacattgcccataaatacggggccagggtggtggtcgataacacctattgcacgccctatttgcagcgcccgctggaaatgggggcggatattgtcgtgcattcggcgaccaaatatctggggggtcatggcgatttgaccgccggggcgattgtcgggtcggcagaggatttaaccgatattcgcctggtggggttaaaggacatgacgggggcggtgctgtcgccgcaggatgccaatttgatcttgcgcgggttgaaaaccctggaattgcgcatggagcgccattgcgacaatgccgaaaaaattgccgattttctggaggcccacccgcaggtggacagggtttattatcccggccttgaaagttttgcccagcatgaccttgccaaaaaacagatggcgcggtttggcggcatgatcgcctttgaactgaaaggcgggatcgaggccgggcgtaaaatgatgaacagcctgcaaatgattgcccgtgccgtcagcctgggcgatgccgaaaccctgatccagcatccggcctccatgacgcattcgacctatagtgccgaagaacgcgccgactatcagatcaccgatgggttgatccgcatttcggcggggctggaaagcattgatgacattttggccgatctggaaaatgcgctcgatggtggcacgatgaaaatggcagccgaataaacgggttatatcaccccttccccgcgcaaggcttgtgtcgcgcggggaagggcgttgccgcgtgatggcggcgacctgacgttacggacttgtgggccgaatcgcccattttgccgtcagggggacaaaaacgggtttttcgtcatgcgaggattttaaaaaatcttgcgcgaaatgatcgaagatttttcaaaactgtcgctggttctgcgaattttggcaaaatcgcttgcctgaaggggccggtttttaaaaatgcgcattcaggtaccaaaataacagcggaccacgatcatcagggcaggtccgccttcaagaaacgggagactgacattggcagcacatggcgataacacaatgaccggcgaaattattgaagccacggcaggcagcagggtttcggccaaagagcttgaaatgctgggggcggtggagaaaaaggtgcgctggctgtcaagctggaccattcaccatgccaaccatatccggcccaagcgcgatggcatcaaggtgggtgggcatcaggccagttgtgcctcgctttccacgctgatgacagcactttatttcaatgtgttgcgcccgcaggaccgggtggcggtaaagccccatgcgtcgccggtatttcatgccattaactatatgtttggtcgccagtcgcgtgaaaagctggaaaatttccgggcctttggcggggcgcaatcctatccgtcgcgtaccaaggacggcgatgctgttgatttttcaaccggctctgttggtcttggtgcggctgttaccaatttcgccgccctgacccaggattatttgcgctataaaaacatgctgcccaagggcgaaaagccgggccgcatggttgccttggtcggcgatgccgaacttgacgaaggcaatatttacgaagccctgctcgatacctggaaacatgacattcgcaatgtctggtgggtgatcgactataaccgccaaagcctggatggcatgattgatgcgcatttgtttcgcgtcatcggccgtttcttccgtgcggttggctggaatgtgatcaccatcaaatatggccgcaaactgcacgaagcctttgcccgccccggcggaaaatcgcttaaaaaatggctcaatgaatcacccaatgatgtctattccgcgctgacctttcagggcggggcggcctggcgcaagcagattttggccgacatgccgggcgacaatgcccttgccagcctgctggccgattatgacgatgatgaattgcatgacctgatgaccaatctgggcgggcattgcatggaggcgattttgaacgcctttgaaaatgtccccaatgacaaaccgaccgtgtttattgcctataccgtcaagggctatggcctgccgcttcagggccacaaggacaaccatgccgggctgatgaatgtggcgcagatggaaggcttccgcaaagccaacaatattgccgaaggcgatgaatgggacattaccgccgggctggactgtgatgcacaggatgtgcggacctttattgatgccgccccctttaacaaccgccagccgcgccagaaatttgccgaaatcatcaccgtgccggaaatgccctatcagcgggccgataccagcagcacccaggaagtgtttggcaaaatcctcaatgaactggcgaaatccaaaaacagcgatttttccgaccgcattgtcaccacatcgcccgatgtgacggtatcgaccaatctgggcggttttgtgaaccagcgtggcctgtttgcccgggaaaatctggccgatgaattccgcgatcgcaaggtgccctcggcacaaaaatggatcagaacccccaagggccagcatgtggaactgggcattgccgaaaacaacctgttccttaatctggcagcccttggcctgtcgcacagcctgtttggccagcgcctgtttccgattggcacgctgtatgatccgttcattgcccggggccttgatgcgctcaattatgcctgttatcaggatgcgcgttttatggtggttgcaacacccagcggcattaccctggcacccgaaggcggggcgcatcaatccatcggcacaccgatgatcggcatgggccagccggggctgaccagctttgaacccagctttggcgatgaactggctgtcgtgatgggatggtcgtttaaccatatgcaggaccaggatggtggctcggtttatttgcgcctgtcgaccaagccgatggagcagccggaacgggagcttgatgaagccacccggtcggccattgtgcgcggggggtactggctgcgcgaaccgggcgaaaattgcaaaatggtgctggcctattgtggggcgatggcaccggaagccattgccgcctgggaacagcttaaaaacgatcaccccggcatgggccttctggccgtgacctcgacggaccgtctttataatgaatggcaggatctggaacgtgcccggctggaaggcagggccgggggcgaaacggcccatatcgaagacctgctcaagccgctggcaccggatgcccgcatggtgacggtgattgacggccacccggcagcccttgcgtggctgggcgcggtgcgcggccatgcggtggcccctttgggaataaatgcgtttggtcaatgcggcgacagcattgatctgtataaacactaccagatcgacaccgcagccatcctgcgcgcggccaagcggtgggactgatcccccggtcaaccgggacgacgaaagggagggcttcggtcctccctttttcgtagctgtcgggttgagggatacgaatttggtaaagcgtgtgccctcaaattgacgagtcggctgaaattgaagctaccctctaaaatcgaacctgctacaatcaaatgggcatcgctcacaacgcgaaacatgttgtagctaccctctaaaatcgaacctgctacaatccgtctcaccaatgcaccatcaaagaagcggttgtagctaccctctaaaatcgaacctgctacaatcaccatgcagacaaccaaccagatgatggcgttgtagctaccctctaaaatcgaacctgctacaatcggttggtgctactacgtggctcaagaatcgttgtagctaccctctaaaatcgaacctgctacaatcggttggtgctactacgtggctcaagaatcgttgtagctaccctctaaaatcgaacctgctacaatcaccatgcagacaaccaaccagatgatggcgttgtagctaccctctaaaatcgaacctgctacaatcaaatgggcatcgctcacaacgcgaaacatgttgtagctaccctctaaaatcgaacctgctacaatcaaatgggcatcgctcacaacgcgaaacatgttgtagctaccctctaaaatcgaacctgctacaatcaaatgggcatcgctcacaacgcgaaacatgttgtagctaccctctaaaatcgaacctgctacaatcaaatgggcatcgctcacaacgcgaaacatgttgtagctaccctctaaaatcgaacctgctacaatcaaatgggcatcgctcacaacgcgaaacatgttgtagctaccctctaaaatcgaacctgctacaatcaaatgggcatcgctcacaacgcgaaacatgttgtagctaccctctaaaatcgaacctgctacaatccgtctcaccaatgcaccatcaaagaagcggttgtagctaccctctaaaatcgaacctgctacaatcggaaccctgaatcccgcagcataatcaatgtgttgcgggattttttctgttcagaaaatgaaattttcacgctgattttgcctgaatttttgcaaaaaagtgagatttttgagggcggattcggcggtttggacaggctatttgaccgcgattgcaaacgaaaaaagggaggccggagcctcccttatctttcagcagatagctttgttgcagctaccttctaaaatcgaaccttctacaatataagatacgaactgtagtttgtctatcttttgttacatagggttagagatgattctatgggtttgaggatatttgaaccacaggaaatttttaccgggctatagaacttgaattttttgtttgactgattggcttgagaggggtaggtatggagtatagaactaaacgtccgatgtaacttttcactacttggaccataaacgttctatgttgtagctatcttcctaagtcgaaccaggatgaagctaatatctcagttggagatgctagtgaaagttgaagtcaagttttcccttgatgtcgagggttttagtgatcaaagcaagcgtgtttgtttggttatcctctcttctgaaaagggaaagcgcacgatcgttttgctactcatgttgctgagtcagttattgtgatctttaccgtccggcaatgtttgccggacgggcttttggttgcctgaaaccccttgttgtgtcttaatagttgcagatactattgggggaaataatgaataaaaatgtcatccttggcattgatgtcggcgtggcatctttgggggcctgtgtcgtcgaggtggatgatgccgagcggcctgtcggctttttggatggcgtcagtttcatttacccgacaccggatggcgcggcagagcggcgcgggcatcgcgccatgcggcgcggctatcgccgcaagcgattgcggttgcaggctttgcggcgctatcttgccgagcttttgaatattcctgccgattttgatggcaagccggatggggtgaaggacccggcccataccgatttggtggccggggaggatgccctgcgtgatgcacgtggcaaccgcctgatttcgcccaatagtcgcacgcggctccgcgcggtggggctgtccgaggccttgagtgcggcggatctggcgcgggcgattttgcatattgccaaaaatcgcggcatgcgcctgacccgggtgacgggaaccagcgaggaagacgaaaaggcgcgcaaggaagcctcggtcatggtggagcaggcccgtgccacccgccgcgaaatggcggaacacaatgctgaaaccccaggtatgctgttatggctgcgcgaacaggaagctccggcggcgcatcagcgtaaaccgctgcgtcggcgggtcggcacatctttgtcgctgcaattcgttcgggcgcaggtcgaggaagaatttgaccgcctgttggcgtttcagcggcagtttcacccggccttgacggcggaagtctgtgaaattctgcacgagaaggtgtttttcgagaagaaacccccaaaacccgaaatcggacggtgcctttataacccggaaaccgatgaacggctgccgctggcctgtgacctgtttcagcaaaagcggatttacgaggaagtcaataatctgcgcattgaatatgccgatgcctcgcgcgagaaactgacatttgatcagcgtgatttgctggttgcccgcctgatggcgggggaggatttgggtgtggcgcaaatcaagaagctgattggcgcaacggaacgggggttgcggctgtcgctggaggggcaggccgggcgcaacaccggcccggcgcgcaagttgctggggcatgccgttcgccgcaccctgaaagaggcggatgcgcgctttgccaagcgggatgaaaacgcaaatgcgggccggatggtggccctttatgatgcgctggatgacgaacaccgccaggcatttgaaaaattgctgcgtgaggaagatgaccgcgagcggatggttacggccctgatgcgcgattatggtatcgcgcaggatgaggcggaaaatgccgccgatggcattgccctgccgcgcggttatggcgctgccgggctgagtgcgacgctggatattcttgaaaagctgaaagctgacattattgacagcaatactgccgctgagcgggccaaactgatacccgccacggcacgggaaattgcctgcaagaggctgccttattatggcgagattttcccgcatctggtgcgcgggcggatggcgcccgatgcaaagggctatccggctgcgacaatcgaggaaaaatttggccgtattcccaacccggtggtgcatgtggcgttaaacagcctgcgcaaggtggtgaatgcgctggtgaaaaaaggggaaaaacagggctgggtttttaagggcgtgcagatcgaaatggcccgcgaaatgaaaaagacccaggaggaccgcgacaaggatgcccggcgtattgcccgtgaacaggcgaaaaatgccgaatatgatgccattaccctggcccataacatgcctgccagccgcaagaaccgccgcaaattgaaactgtgggaggcacaaaacaaaatgtgcccctataccggcctgtcgattgatgtgagtgaccttttttccggcaagttcgatattgaccataccttgccccgttccaaaaccctggatgacagcctgtataacctgctggtaattcatgaaagtgtgaacaagaaaaaggccaatagaagcccttacgacgccttttccggcgggctggatgtggagggtgtgccgcagcgcagttacgaacagattgtcgagaacgtgcgccgtattcccggtatccggcataaggaaaaactgtttcgcccggatgcgatggagaaatacgaggaccaggacgcctttgcccagcgctataaaaccgataccagctatattgccaaaaccgccaaacaatatttgcaatgtgtgtttccgcatttgcgctccaaaaacggggtggaggcgattaacggttttatcaccgatgaattgcgcaaacgctggggtgtgatggatctcgtgcagatggtggcccatcagcaggacccggaccttgtggaagcgccgccgaccaaggaagaacgggccgagggcatcaagaaaggcaaaaaccgggatgatcatcgccatcatttgctcgatgccgcgataaccgcctgcaccccgcatgatgtggtgcgaaaactgcaaaccatttcgggcagtcgtaacaaacatgatctggcagagcgctataaggtgccgttgccctggggcgattttcgtgatgatttatatgatctgattgatcaggcccgcactacccatcgtgccaacagggaactgaatggcaagctgcatatggcgaccaatctgggcgttgtggcgcgctttgccgacgggcggtatctggtgcgccaacgcaagcggtttgatgccagtgagttttccagcattgaggatgtgaaaaagaagctggtggttgatcctgccctgatggcgcggttggcaaaggacatgacaagtggcgaagcggtgctgttttgggcgtcgcgtgagccattggccgatttgcagcgccatgatgaaagattgcgcgagatcgccgggcggattgaagatttgtttatgcttcagcccacggaaaccacctatgaggatgtggacaaaaaaaccggtgcgatagaaatccgtacccgcaagttcaaggaagacgagcggctgaccgaagcattcagggcgtatcggcaggaatgcctggcggcggggcgaacgccacgtcgtaccgtgcggctttatgggctggatgaagcagtgatgattgcgggtgccaaaggtggtgccctgccagcccggacattcaagcccggaagtaatgcctggctggatattttccgcaacgcacacggaaaacccgaatttgaggtggtccgcaccattgatgcgatgcgcccgggacatgtgccgcaatggcagtgccatgcgggcaatgatttgctgttgcgcctgtttaaaggcgatacggtgcgtttgcgcagcaaggatggcaaaacgcggttatgtgtgctggcaaccaattcgccgggggactgggaatttcagccgttgaacctgtcgccgcatatcagccgccatccggcgcgcaaaaatttccgtttcggcttcaaggcattgtgcgatgccgatccgcaactggtggtgcgcgatgttctgggccgtattgtttatgaaagcccacgcctgaactggtaataccgtgtaaccgtgtaaaggagagcgcagatgtggcgggtggtggatatttcgggcgaaaaccggcacctgcgactggcgcgaaatgcgctggaggtgatggagggcgaggagaagctaggccgtttgccgctgggtgacatcaatgccgtgattgtccatgcctatcgcgccacactcagcaccgatctggccgcagcacttgcgcgggaaaatattccgctggtgctgtgtgataacaagcatatgccctcctcgattgtctggccctttaccgggcattttgaacaggccgaccgcattgccacccaggccacggcaacaaaggggctgatccggcggctctggcggcatatcatccgggccaaaatccgcgagcaggcccatactttgcaaggctttgatccggcgggggcggaggcgcttttcaaactcatgtcgctggtcaagcccggtgatcccgataatatcgaggctcgggccgcaaggttttactggtcccgcctgctgggcgaggattttattcgccacccggatggcggcggggccaatggcgttttgaattatggctatatcgttttgcgctcggcgatggcgcgtgcggtggcggccgccgggctggccccggctttggggattttccatacttccaaacgcaatccgtttcgcctggtcgatgatctgatggaacccttccgtccgctggtggaccgggtggtgtatgccagccggaaagactggggcgacgaggtgacgcccgaagccaaaaaggcgctggcggcgattgtgaatggcgcgattccaacagcggaggggctgttgccggtttatcgggtgatggggcaaatggcggcatcgctggcggcggtttatgccgggcagcgcaagcagcttgaaattcccgcgcgcatcagaattgaaaaacagatggagatggaggggctgtaacccggtcaggccgggtgccacgggccatgtcattatcggggtatcggatcatgtgggcgtttgtgatgtttgacctgccggttgtcaccaaggcggaaaagcgccgggcgcgcaaatttcatgactacctgcttgatgaagggttcgagatgaaacagttttccgtctattaccgtttttatgaaagccgggccaaggccgatgccgcaagcaaacggattgccgcgaaaattcccgaacgcggcatggtctcgatcctgtccgtcaccgacaaacagttcggccagatggtcaatttcatgggaaaagtgccctcaaaaaatgaccaaaaaccggaccaactggcgcttttttaggtggaaaatgacggtttctgactcaaaaaaatcccgcaacatattgaatatgctgcgggattctgggttcctattgtagcaggttcgattttagagggtagctacaactcacaagacccaaaacttgacaaaacagcacattgtagcaggttcgattttagagggtagctacaacgcatccgatgttcttaggtcagtgtcgtaaattgtagcaggttcgattttagagggtagctacaacacgttctcggtcgaaaggccgaaagcgttcattgtagcaggttcgattttagagggtagctacaacacgttctcggtcgaaaggccgaaagcgttcattgtagcaggttcgattttagagggtagctacaacggagttccctccctgcgtcacccggtctttattgtagcaggttcgattttagagggtagctacaacggagttccctccctgcgtcacccggtctttattgtagcaggttcgattttagagggtagctacaacgtgagggttggtcgacccccgacagcacctattgtagcaggttcgattttagagggtagctacaacgggcggggttaatttcctgtccgatgcccattgtagcaggttcgattttagagggtagctacaacgcccaaggggcgcaatgctacgccttgaagattgtagcaggttcgattttagagggtagctacaacgcccaaggggcgcaatgctacgccttgaagattgtagcaggttcgattttagagggtagctacaacgcaggatcgatccaaacacaaactgcgctgattgtagcaggttcgattttagagggtagctacaacgttaatgaagggctttctcccctcgcccaattgtagcaggttcgattttagagggtagctacaacgttaatgaagggctttctcccctcgcccaattgtagcaggttcgattttagagggtagctacaaccaaggtggtgaagtcgaagaatgggacccgattgtagcaggttcgattttagagggtagctacaacggattgagccaaacgagggaagaaccgatgattgtagcaggttcgattttagagggtagctacaacatgatgcatttcgccaacctatcatttccgattgtagcaggttcgattttagagggtagctacaacatgatgcatttcgccaacctatcatttccgattgtagcaggttcgattttagagggtagctacaacatgatgcatttcgccaacctatcatttccgattgtagcaggttcgattttagagggtagctacaactcaaagccttaccggaatgactggaggtgtattgtagcaggttcgattttagagggtagctacaactgtgaggctgcaatggaggatcgtgccggtgattgtagcaggttcgattttagagggtagctacaacaccacgcatgaaaggcatcaaccgacatcaattgtagcaggttcgattttagagggtagctacaacaccacgcatgaaaggcatcaaccgacatcaattgtagcaggttcgattttagagggtagctacaacagttttcaccagagattgcgcgtgttttcgattgtagcaggttcgattttagagggtagctacaacagttttcaccagagattgcgcgtgttttcgattgtagcaggttcgattttagagggtagctacaactgctaaacgcggtgctgcaaagttcgcgatattgtagcaggttcgattttagagggtagctacaacatcatgcgcccgacaggttgattgacaccgattgtagcaggttcgattttagagggtagctacaacggtcaaagcagaggggggcgcagtgcggaaattgtagcaggttcgattttagagggtagctacaacatcatgcgcccgacaggttgattgacaccgattgtagcaggttcgattttagagggtagctacaacgaaaaacgcccgcttttataccttatggaaatcgtagcaggttcgattttcggagcatatatatcgtggaaatctatgatacgatcgtgccgtgagtgtcagattaccttgcgcgtgtatgtaaggcacgcaggagaatgtgctatggcagttatgagtgtttctttgtcggattctttgaaagaatgggtggaggagcaaacggtagaaggtgactatatggactcgagcgattatgtctgtgacctgatcagaaaggataaggcgcgacaaaaagcagagaggcttctgcaggctgctatcaccgaaggcgttgaaagtggtgagccacaagaatttgatgtgactgctttcaagttgaaaatgcgcgagcggtatgccggaaattagggctgtttcctgccatttgacgccaaaggccctggcagatatgacggaaatctggagctatggtgctataaactggtcaattgaacaggcggatcgatatattgacggcttgaatcgcgtttttcagttgattgccgtttttccggatatggggcgggaacattgcgtgttcagtccacccgtgcgcatctgtccttatcagcgacatatcatcatttatgttcttcgtgatgaaatcgttattgttctgcgtgttttaggcggcagccaggattggcagactgttattcgcatgttggacatttaaatgacgcaagaaatatgcgtccacataattttcatccggatatatccctgaaaagcggttcttcgggattttgtccagactgccatgttcagaaaaagttcagaaaaacgcctgcttgatgccatcgataatgaactggatggcaagggcggccaaaatcatgccgagcaggcgggaaatgacggtggcaaccgtcgggctcaggcgtttggcgaccaggcccgaaagcaggaacatcatcagcgcgcagaccatcaccagggcaacaaccgtgatcacgccggtttgcatgacgatattgtcctgatatttgcccatcaggagcatcaccgtggcaatcgagcccgggcctgccaaaaacgggatcgacatcgggaagatggaaacgtcatcgggttcgtcttcgtccggtcgggcggcaagggtttcgttttgggggctggccgggctggcggtggcggcggtgctggcggtcggggtggtgccgttttcggcgtcgtcctcgtgctccagttcctgatggacctgttcggcgcgttcattgcgttttttgccgcgccgttcaaacagcatttcaagggcgatcaaaaacagcaaagttccgccggaaatgcgaaaggcgggcatgtggatgccaaaaatacccaacaggctttcgcccagcagggcaaaggcggtgaggatcagaaacgaggtgatgcaggcccggatcgccatgcggcggcgatgtgccgtgctggtatcctgtgtgaggaccagaaaaaccggcaccagccccaccgggtcaacaatgacaaacagggtgacaaaggcagcgatcagttcgcttaacatgctaagatcgggcatgacataatccttgtgggcgatgatcggtgaaaggggccgggggcccgcctgtcacgctgtcgggttaagctggcagatggcatagggcggatgcgccggaaatgtccggtctgatttacgcgtttgagcgccaaaggtaaatggccggttccgttttttccggttttgaccgggcgggagctgcccttaccggttgggacggcgaaagaaatcgccattaaaattcggcggtagagcttttaaggcgtcaagccgcgcgctgattttgggatgggtgtccagcaaagccgggggttcggtgctgcgatagggcagcaggcgcagggtgcggcggttgatctgttcgatatgggtcagcgcgtcgatcacatcttccggcccgcccaaaaggtcactcgccccgtgatcggcggcaaattcgcggtcgcggatcacggcacgctgcaaaatgaagctgagcgttggcgcggtggccagcacaatgatcagccagcctggcgggttatgcgcaccaaaaaagaacgtgaccagggcaaagacggccagagtccatgtggcgcgatagagaatatcggtcatcatcaggatgcgggtgtcattatgccaggcatgggcaatttcatgggccagaacggcgcgcaattgccggggcgacagaccatgcagggcgtcgtgcgacagggcgatggtggtggtgtcgtccttgccggtggtgatggcattgacccccttgcccggcaacagatacaggcgcggcacataggaaaggcccgcgcgctgtgccagcagggccgccatttcataaagggcgcggtagggctgttggggcagttcgcgggcgcgcagcagtttcatgatcatttccgatgacaccatcgggccgagcaataacagcaaaagaacggcaaacagggccgacatcatcatgaccgggccgcccagaagccaggcgcagatcgacagaaccgccgccatacaggccaaaagcccgctggtatgggtggtgctgcccgcccgaagggccagaaaccgcaggagagaagggggtaattgtgccatgcgccacatcctttgcatcatgcaggccggtttatcgcgcggccgggcaggctgccccggaccagatcaaaccttaccctgaaaatatgcgagaaacggcatgtttaaaggaggggacattcaggcggggaataaatgcccgcatcgcatggcacatagaggcattttgcgaacagtggtgcgcgatgaaaccttaaaccaccatttcgctgaaccaataggcaagatagccgatggcagcgacggccataatggcgagaagggcttttttaaaaaggctggaattctgttgggaagacatggagactcgcgatcatttttaacattggaataacgaaaattgtcgagtttgatcgcggattcaagctttttaaggctgcttttttgcatggcacgtccttgacagcacaagaacggccataaattgaggcaattgatgaagcatggcggcaaaagcaatgatttcgttaacgcatctttatcaagtttcgctagaatggggcagtgtgtttcatgcaatggtataatatgtcccgccgtctttgatgccgggatacctgccttgggggatcggccgcaggattgcggccctgtaaaacgggatcaggatggcccagccgaataaagcccgctccggcattgttgccggacgcaaccgcgaaggtgatcgtaccccgcttgaacggatgttctggcggtcgatcggtattgtcggtggctttagcatggtgatcaatctgctcaatatggtcatcccgatttattcgatgcaggtttttgaccgtgttttgtcctcgcgcagtttcgataccctgtttttgttaacccttggcattgccatcgtgctggttttcatcgccgcgatggagcaattgcgatcccgtgtgttaatccgggtggggaccgggcttgatctgggcctcggcggcgatctgtttgcccatgtggtggagcaggcgtcgcgcgggatgcccaatcggcagcgccccttgcgcgatttgtatggtttgcgcgggtttttaaccgggtccggcccctttgccctgatcgatttcatgtgggcaccggtttatattggcgtggtgttcatttttgacattcgcctgggcatggtggcctttggcggtgcggtgattttgattttgatcgccgttgccaacgaggcggcggggcgtatttcggtcgatcggtccgaacagtcgcaaaaccggggcattgcccaggaagaaacctatatccgcaatgccgaggcgatggaggccatgggcatgacgcccgccgcccgtgcccgctggcaggcggatcagtccgatgcgctgtactgggaagggcagaccagccgccgggtgggaacctccaccactttgtcgcattttgtgcggctgtcgatgcaggtgtgttttatcggcaccggggcctatctggtgcttagcgaaagcatcacgattggcattatggtggcctcgatgattttgggcatgcgcggcctggccccgtttgacggggcggtggcggcgtggcggtcgtggtcggcaacgcgcaaatcgtttgagcgcctgaaccggattttgctggagcgtaaaccccgtttgcctgccccggcccccagggccaagggaatgtcggtgacggtggaccggctggtttttgccccgccgggcagccgcaatgtgttgttcaagggcttttcgttcaaggttggcgcgggccaggttgtcagcatcgccgggtttaacggggtggggaaaacggccctgttgaaattgctgatgggcatctgggccccggcatcgggctcggtcaagctcgacgaggtcgaggcctcccggctggatcgtgggcagatcggcccgcaaatcggctatctggcgcaaaatccgtttctgtttcccggcaccattgccgaaaatattgcccggctcggctcggccgacccgcgcgaaattgtccaggcggccgaactggccggggcgcataaattcatcctggatctgcctgacgggtacgatacgcatttggaccggggaggcacgaacctgtcgggcgggcagcgccagttgatcgcccttgctgcggccctgtatggcaagccgcgccttttgatgcttgatgaaccgacaaccgcgctggatgaagggcggatggaatatgtcaccaatctgattgatattgtccgccgggcgggcattaccacctttattgtcagccatgaacgcgaggtgctgaagcgcgctgatgcgattattgccctgtcgggcgggcagataaaggtggtgccggtcaatatcgggcggatgcaatcggcgatgcccgccacccccggtgcgccaaaaccacgcggggatgaggccctgccaagccccacggccccgcccatgcccgctgccatgcgcgaagggcgcgatgatctggtcgggggtggacaaatgcgcattacgccgcaaaaaattgcgatgcccaacccggatgccccccgtcgccagcacccggatgcgggcatgagtgacgatggcacccgccgcaaggctgctggcgatgcaaatgccagggcaaggacccggcccgatgccggggcggcaccggcaaatgtgccatcagagcaaaaaaaggccgtgcgcagtacggcaagcggtaccatgaaggtcacgcggccccttgcgccgcccaaccgtaaggatgccgggttggatcgtggggaaagccccagggatgtggcgcggcgtaaacaggctgatgctgaagcccggcagggtgacgcgcaaaaacggaaaaatgcccgcctgagccgagagaaaaccgcccgtcaggtggccgcccggcaagatggctctgccacccggacaaacgaggcccctgcggttcaaaaccgccagccgcgtgttaaaaccggggccgatggccgcccgcaattgcgtgtggttgaaggctctgccgggcgccgtcagcaagggggcgggcgatgaatggcgttcaattgcctacggtgcgcacgcttgaaaccgatgtgaagccactggtgcggctggggcttttgattttgattttggggtttggttcggtctttttatgggcggcaacggcgcggattaattcggcggccattgccagtggtgtggttgcgcccttttccgggcggcaaaccgtgcagcatctggaaggtgggattatccgcaaaattctggtgcgcaatggcgcgcgggtggtggccgggcaaaccctgatcgagctggatgatacgcgggcgcgggccagttatgatctgcttttcaaacggcatttgaatgccctggcaacccaggcgcggctgaatgcggaacgcacgggatcgacgcatgtgacgtggcctgccgcgttaaatcctttgcagcatccggacctggtctcggcccagcaagatctgtttgacagtcgcaccaatgcctttcgcggtgaattacagttatatgatgagcgcatcaaagagctgcgcaacgaaatttcggccaccaacgagcaaaaaatagccgcgcaacagcaggttggcatcgtcaaggaagagctggcgatggtgaagccaatggtggaaaagggctatgcgcggcgcacccggcttttgcagcttgaaagtcgtttagtggataatctgggcgatattggccgctattcggcggatatgtcgcgcattgaacagcaaatccagcaggtgcgcgccagtcaggcccagcttaagcgcgatcatcttgaaacggtgaataccgaattgcgcgacgtgcaggcggatttgtcggatctgacggaacggctgcgctcggccgaagatgtgttgtcgcgctccaatattgttgcgccgtccgaaggtacggtgacggacttgaaatttacaaccgtgggcggtgttatcccgccgggggcaccgattatggaaattgtgccccacgatgaccagttggtgattgaagggcgtatttcacccaatgatattgatgtggtctcgcccggtttaatggtgaatatccgggtcacggcctttagccaacgctggttcgcaccggtcaagggcaaggttgttgatgtttcgccggatcgcctgagtgatggcgatggccgtccctatttccgggcaatggtggaaattgatgccgaaagcctggcggaac

SEQ ID NO: 1690 - DNA, 22895 bp, synthetic construct
  source 1..22895: mol_type = other DNA
  misc_feature 1..22895: note = Synthetic
atcatcgccgggatgccgccatcaagcatgatctggatcggggttttgttgttaaagcctgcacccttgttgggggttttgggccagccataggtaagcgggccgttaaacagcaaccgcaagcccttaaacaggccgattaacaggctggcacgtgtcaccttgtcctgatcgagtttaccttgaaaagaccctgctttcatgcggctccaggtggctgtcgggacatcaaaaagtgcggcggcttcggcattggtcaggccccatgcgttggcggtgcgcacaatcgccttgaccagaacggctattttatcgcgttccgtcacgggccgcacaatgcctgcttcgccatcacggataacggggtgaagcatgttttcctccatatgatgtgattaaagttatcatatgataagaattgtgcaagaggttttggatgtctggttgctgttgccggggcggtggttgtgataaaccgcaatgtatgatgccgacccgctgcatcccatgaaaatatgacatgtaacggatcggttttattcacggggatagatatattatgccaccgaaggtgacatagacatgagttttactgcgccgtccagccgccatcgaccgacaggctggtgccggtcatttggtctgctgcgggcgagcacaggaaaaccgccgtctggccgatttgttcgggggtgacaaaggttttggacgggtgtttgtctgacaccagctctgttgccgcttcctcgaccgagacattgtttttctcggccagggccttgatctgtttttccaccagttcggtgcggacccagcccgggcagatcgaattcgccgtaatgccggtttcggcggtttcaagggcgacaaccttggtaaagccgacaataccgtgcttggcggcaacataagccgccttttgcggcgatgcgacaaggccatgtgccgatgcggtgttgatcacccggccccagttttgctttttcatatgcggcagggccagccgggtggtgtgataggccgatgacaggttgattgcgatgatcgcatcccatttttcaatcgggaaatcttcgacaagggcggtatattgaatgccggcattgttaaccagaatgtccacgccaccaaaatcgctggcggccattttcatcatgtcttcgatctggtcgggtttggaaaggtcggcgccgctataaagtgctttgacgtcaaattcactttcgatgccgaggcgaatttgttcaatttcgccagcgtcgccaaaaccgttaagcatgacattggcaccttgcccggcaagtgcctttgccatcgcaaggccgataccgctggtcgagccggttacaagcgcgtgtttgcctttaagcatggtggttctccattgtccgatgagggggcgttcggcgggtttgcccttatgaggtaatccgatcatgccgcagcgcaatcgttgaggcaaggaatcacgcgggggttgcgtgcgcctgattgatgtttcaccttttcccgggatgcggcagtgcaatacgcgtaagcgcgatcaggtaccaatgccgtatttgcgcagtttattggcaaccgctgtgtgtgatagccccaatcgggcggcaagtttgcgcgaactgggataatcggggtaaagccgttccagcaggtttttttccagaaaatccattgctgcaccatgattttcacaaaacagtgcctgatcaatcagagaggtttcgagggtgttttgcgaggtcgtggcggttgatcgtgcattttcgggcaaaaggggcgcattttgcggtggcgacgctgttttatcgtcgtattgcgatgccgaatgcgggccgtaagccgattgcaggtcggcggcggccaaaatatcgccatcaagcagggcaacggcgcgaaacagggtgttttcaagctcgcggacattgcctttccagtcgcgggtgacaagccattgcaaggcatcgcgcgcgattttggggcaggggcgttcggtttggcgggccgcacgggcgacaaaattttgcgccagcgcgtcaatatcctcgcgccgctcgcgcaggggcggcaaggtgatgccaagaacattgaggcggaaataaagatcctcacgaaacgttccatcatgcgacatggcttcaaggtcgcggttggtcgcgctgatgatgcgcacatcggccgaaatttcctcggttccgcccacacggcgaaagcggccatcttgcaaaacacgcagtaacttggcctgcaaatagggcgatagctcgccaatttcatctaaaaacaggctgccgccatcggccagttccaaaagtcccggtttgccgccgcgccgtgcgctggtaaaggccccggcggtatagccaaacagttcgctttcggccaagccttcgggcagggcggcacagttcagggccaaaaacggttggccgttgcgtttgctggcccggtggcaggcgcgggcaaacagttccttgccggtgcccgtttcacctaaaataagcagcggcgcatcaacaatcgccagccgttgggcctgggttttaacccgtgccagcgcacggctgtcaccaataatgtcggcaaattcggtgtgattgcgatcctgaagggcggtgatgactcggcccaaccgcgctgcacggtgaaaaatcaacaccccgccccatggggcgttatcttcgcgggggcctgtatcatgcaccgggctgccatcctcgacctggccaatcggttccacctgcaacaggtaggtttgcccgcccagcgtcacctcgcgttcgctttgcgaaaagccgtcccggcgcaggcttgcgatatcaggttcggccaaaatgctggcaagaggctggtcgcgcagggttgttttggatgtaccggcaattttttgtgccgccgggttaacctgcgcaatcaggccgttggcatgaaccgcaataaccgggtcgccaagggcggccagggtggcgtgaagctgggcgcggcggcgttcagtcggtaaatggtcaatcggctgcgcattgtgaatgccaggtacccgcatcaggtggcgcgccagttcggcaaaatcatcgggggcaagggcgggaatgtcggcatagatatggtgcggggtgacttcaaacgcccgaatatccagcccgcgcgccgttaaggtgtttacaacgtcgcgggtaatgccaaggcggttttcgccggtgatttcaaagcgcatccgtacaccttaatttacagcgtaaactattatatacatatataaggcgctgtttttgcgaaagacaagcatttctgtggcgtgtggcgtcgggtgtgtaaattttacggtacaggtgtaatttgcggaatatttgtaagatgttgaattcaaacaaaaagctgaaactggcacggcggttgcgttgatgagggcagaacagtttaaaaaacgggagtgcctttatgtcttcgtcaaaccatgcccatcggaacgccaaagccggttttgccacccgcgccattcaccatggctataatcctgccagccataacggtgcgttgaaccagccggtttatatgagctcgacctttgcctttgacagtgccgagcaaggcggacgccgttttgcaggcgatgaaggcggctatatttattcgcgtattggcaacccgacattaagtttgctggaagaccgcctggcaacactggaaggcggcgaagccgcaattgccacggcatcgggcatgggggcgattacctcggtattctggacgttgatttcgccgggcgacgaagtgattgtggaccggacattatatggctgcacctttgcctttttccgccacgggctggaacggttcggggttaaacacacccatgttgatttgtcggacccgaaaaatctcgaagccgcaatttcggataacaccaaggtggtttattttgaaaccccggccaaccccaatatgcgtttggtcgatgtgcaggccattgccgatattgcccataaacatggggccaaggtggtggtggataacacctattgcaccccgtatttgcagcgtccgctggaaatgggggccgatattgtggtgcattcggcaaccaaatatctgggcggccatggtgatttaatggccggtgccattattggcacagccgaggatttgaccgatatccgcctggtcgggctaaaggatatgacgggggcggttttgtcgcctcaggatgccaatctggttttgcgcgggttgaaaacgctggaattgcgcatggaacgccattgcgacaatgccgaaaaaattgccacgtttctggaagcacacccgcaggtcgaaacggtttattaccccggccttgaaagctttgcccagcatgaccttgccaaaaaacagatgacccgttttggcggcatgatcgcgtttgagctgaaaggcggaattgaagcaggccgtaaaatgatgaacagcctgcaaatgattgcccgtgccgtgagccttggtgatgccgaaaccctgattcagcatccggcctcgatgacccattcaacctatagccccgaagaacgggcgaaatatcagatcaccgatggcttgattcgcatttccgccgggcttgaatgcgtggatgatattctggccgatctggaaaacgcactggatggtggtgcggtgaaaatggcggcggaataaacacgcaagacatatcaatattgttgccattccggttttaaacgggccggatggtgactttattgaccgggggcgacaggggctggctggctggtgaagtctgaaccatcaaccagtccgtatttttgcatcgcgctatcggtttcaacggtttgtttgattttgggtaaatagatcagatgcagccgggtggggtcgattgtgcgaaacgacgggccggtttcgcggttcttgcgcaaaagcgccaatactgcgccatcctgccaggcgcgttgaagtccggtcaaaatggcatcgtgcaggagctgctctgtcgggctgacaaaaaagtaaatcggttgcgggtaataaagggcaatgtccggattgatcacaagtgagggttcggttgcacgcatccagtcatattcgttgcgaatttgccaatatgcacggggataaaggtcaaaccggccccgcaccaacatggaatgcaacgtaagataacggccctctatcaccgacaggctgttgtgttgcaagattgcgccgtcaggccagcccagcccttgaccaaaggtgaactggcgtaaatcttcaagtgttttaacttttttcagccggcttgatgtttcaggtaaggtcatgaacatgcgcaaaccggttgtgcccagaaaaatgggaaaatgtaccgctttaagctgacgttcgcgttcaggcgtggtgccaaaaaacacgacgttaatttcatcacccgattgcagcatggcgatacgtcgtttttcagtcgggtaatccatacagacgggcttgatggtgatgtcgctatggctataggccaatgccagacggagcagttcaacatgatattcggaaaactcggcccaggtttgttgtccctggcaaaaagctgaattgatgtcgaccggcaggcgtgccgtgggaggattgccttgcaatggttgttgcgccacggggtgtgcctttgtccgcgcatggccgccggccccgggcagaaccatggctatcacgcacaacagggtggaaaacacaaacagggcaggacttttcatttttatcattcttgccagcaatcgggtccctatccactggcatagatgaacggttaaatcaatgacctgggcatttactttggttcagtcccgcaaccgtatttattttggatgcgggtaaaacagggtgaaaggcaaggctgtggggccatcgttacaggccggataccgccgcgccggcaggcatggcgacccggcgaggggacggtgttgcgatgagcaatgctttgcccggtgacgctacggatacaaggcgcgaatcgttcggcgcagcgttgatgtaggttttttcgcaaaattaccgttcgataaaattgccaaatcttgcgctggatgaccgaagaattttcaaaactgtcgctggttctgcgaattttgtcaaaattgcttgcctgcatgggccgggttttggaaatacgtattcaagtaccaaaatataggcggcatccgaaccgggatgatctgcagcgatgcaagcgggagaaagaaattggcagcaaacagcgataccgacatgacaggcgaaattattgaagccacggctggcaccagcgtttcggcaacggatttgaaaatgttggccgaggtggaaaaaaaggtgcgctggctgtcaagctggaccattcaccacgccaaccatatccggcccaaacgcgatggtatcaaggttggcgggcatcaggccagttgtgcatcgctaagcacccttatgacggccctttattttaatgtgttgcgcccgcaagacagggtggcggtaaaaccccacgcctcgccggtttttcatgccattaactatatgtatggtcggcaatcgcgtgaaaagctggaaaatttccgggcttttggcggggcgcagtcttatccgtcgcgcaccaaggatggcgatgtcgtggatttttcaaccgggtcggtcgggctcggtgccgcggtcaccaactttgccgccttaacccaggattatctgcgctataaaaacatgctgcccaagggtgaaaaaccgggccggatggtggcgctggtgggtgatgcggagcttgatgaaggcaatatttacgaagccctgcttgatacctggaaacacgacattcgcaatgtctggtgggtgatcgattataaccgccaaagcctggatggcatgattgatgcccatctgtttcgcgtgattggccggtttttccgcgctgtgggctggaacgtcatcaccattaaatatggtcgcaaactgcacgaggcctttggtcgtccgggcggcaaatcgcttaaaaaatggctcaatgaatcgcccaatgatgtgtattccgcattaacctttcagggtggagccgcctggcgcaaacagattttggccgatatgccgggcgataatgcacttgccagcctgctggccgattatgacgatgatgccctgcatgacctgatgaccaatttgggcgggcattgcatggaggcgattttaaacgcctttgaaaatgtgcccaacgacaaaccgacagtgtttatcgcctataccgtcaagggttttggcctgccgcttcagggtcataaggataaccatgccgggttgatgaatgtggcgcagatggatggctttcgcaaagccaacaatgttgccgagggtgaagaatgggatatgaccgccgggttggattgcgccgccgatgatctgcgcgcctttgttgacgcggccccgtttaacaatcgccagccgcgccagaaatttgccgaaatcatcaccgttccggaaatgccctatcagcgggcagatagcagcagcacccaggaagtttttggcaagatcctcaatgaattggcaaagtcgaaaaacagcgatttttccgaccgtattgtcaccacatcgcccgatgtgacggtgtcgaccaatctgggcggcttcgtaaaccagcgcggcctgtttgcccgggaaaatctggccgatgaatttcgcgaccgcaaggtgccctcggcccaaaaatggatcagaacgcccaagggccagcatgtggagctgggcattgccgaaaacaacctgtttttgaaccttgccgcccttggcctgtcgcacagcctgtttggtcagcggttgtttcccatcggcacgctctatgatccgttcattgcccgcgggctcgatgcgctaaattacgcctgttatcaggatgcgcgctttatggtggtggcaacacctagcggtatttcactggcccccgaaggcggggcacatcaatcgattggaacacccatgattggcatgggccagccgggcctgaccagctttgaacccagctttggcgatgaagtggccgctgtgatgggctggtcgtttaatcatatgcaggataaagacggcggatcggtttatctgcgcctgtcaaccaaaccgatggcgcagccggaacgtgaactggatgacgtgaccaaatccaacattgtgcgcgggggctattggctgcgcgaaccgggtgaaaattgcaaaatggtgctggcctattgcggggcaatggcacccgaagcaattgccgcgtgggaacagcttaaagatgaccatccgggccttggcctgttggccgttacctcgacggaccgtttatataatgaatggcaagacctggaacgcgcccggctggaaggcaaggcaggtgacgacatggcccacattgaaaacctgctgaagccacttgcatcagatgcccgcatggtcacggtgattgacggccacccggcggcgctggcgtggcttggcgcggtgcgcggccatgctgtggccccgctgggaataaatgcgtttggtcaatgcggcgacagcatcgatctgtataagcattaccagatcgacaccgcagccatcctgcgcgcggccaagcggtgggactgatcacccggtaaaacgggacggcgaaagggagggctttggctctccctttttgtttgggattgctgtggcttggtaagtaaaatcgaaccggctaaaatagaattgacttggcatgtccaccaaactgagttgtagctaccatccaaaatcgaacctgctacaatatataagacgaccttatatcgtactccccggttgtagctaccatccaaaatcgaacctgctacaatagtggtcttctcgcagcttggtggcggtaagttgtagctaccatccaaaatcgaacctgctacaatggcgcggtccacccgaaccaatacatagaagttgtagctaccatccaaaatcgaacctgctacaataggaataccgaatcccgcagcactatcaatatgttgcgggatttttttggttcaaaaaatggaattccggtgctgattttggtcggattttttaaaaatgagtcattttttaaaatgaattttgacggggaaaaggttttggaggcatggcctgaaacgaaaaaagggaggccggagccccccttatctttcgcatgatagcttgttgcagctaccatccaaaatcgaaccgttttcagtatgcgtatttctccggtgtctgtcaattgtttggctacggccattcctgacccagattttttgatttttggcccgtccggtgaggttttatcgggcgggccttttggttgctcgtgccgttgggttatgtcttaatagttgcggatcagcggagaggcggcatgaacagaaacgtcatattgggggttgatgtcggggtggcatcattgggggcctgtattgtcgaggttgatgatgcagggcgcccggtcgggtttctggacggggtcagttttatttacccgaccccggacggggccgcagagcggcgcgggcatcgggccatgcgccgcgggtatcgtcgcaagcgtaaccggttgcgtgatttgcgggcttatctggttgaaaccctgaaaattgcgactgattttgacggcaagcccgatggcataaaggacccggcctttaccgatattgccatgggtgacgacacgctgcgagatgataaggggcatcgtctgatttcgcccaacagccgcacacgcctgcgggcgctgggattgtctgaagccctgagtgggaccgatctggcacgggcgattttacatattgccaaaaatcgcggtatgcgcctgacccgtgtcatcggcaccagcgaggaagacgaaaaagcccgcaaggaagcctcggtgatggtcgaacaggcgcgggccacacgccgcgaaatggccgcacaaaatgcacaaacgcccggcatgatgttgtagctgcgcgaacaggccgccccggccccgcatcaacgctaccccctgcaccgccgggtgggcacatcgctggcgttgcaatttgtgcgcagccagcttgaagatgaacttgatgcgctgttggcctttcaacacccgtttcatcccgctcttgatgccgatacatgccgcaccctgcatgaaaaggtgtttttcgaacaagaaccgcccaaacccgaaattggccgctgcctttataatcccgaaaccgaggaacgcctgccgctggcctgtgatctgtttcagcaaaagcggatttacgaggaggtcaacaaccttcggatcgaatatgccgatgcctcgcgcgcgaagctgacccgtgatcagcgtgatcttctggttgcccgtttgatggcgggcgaagatttgggggtggcaaagattaaaaaactgatcggtgcgacggaacggggggtgcgcctgtcgcttgaggggcaggccgggcgcaatgcggggccggccaaaaagcttgaaggtcatgccatcagaagaaccctgagcgatgccgatggccggtttgctgccctggggcagggcggggcgcatatggttgcgctttatgatggtctggatgaagaacgtcgcaccggctttgaaaaattgctgcgcgacgaggatgaccgcgacaggatggtcttggccctgatgcgcgattatgctgtggccggggccgaggccgaaaatgcggcagacggcattgccctgcggcgcggctatgccgccaccggcctaaccgcaaccttcgagattttggaaaagctgaaagccgatattatcgacagcaataccgccgccgagcaggccgggctggttgcggcaagcgcacgcgaaatggtctgcaagcgtttgccttattatggtgaggttttcccccatctggtgcgcgggcgtatgagcccggaaacacgcggctatcctgccgcgacgattgaggaaaaatttggccgcattcccaacccggtggtgcatgtggcgctaaacagcctgcgcaaggtggtgaatgcgctggtgaaaaaaggcgagaaacagggctgggtttttaagcgggtgcaaattgaaatggcccgcgaaatgaaaaaaacgcaggaagatcgtgataaggattcccggcggattgcccgcgaacaggccaaaaatgccgaatatgatgccattacgctggcccatcaaaggcccgccagccgcaaaaaccgtcgcaaactgaaattatgggaagcccagaacaggatgtgtccctataccgggctgtcgattgatgtggcggatctgttttcgggaaaattcgatattgaccacaccctgcctcggtccaaaacactggatgacagcctgtataacctgttggttattcatgagaatgtgaacaaagccaagggcaataaaagcccgtttgaagcctttgccggcgggttgaatgtggcgggcgttccggcgcgcagttacgaacagatcgtggaaacggtgcgccgtattcccggtattcggcataaggaaaaactgtttcgccccgatgcgatggaccggttcgaggatcaggatgcctttgcccggcgctataaaaccgataccagttatatcgccaaagcggccaagcaatatttgcaatgtgtgtttcctcatttgcgcccgaccggcggggtggaggcgattaatggtttcatcaccgatgatttgcgcaaacgctggggcgtgatggatctggtgcagcaggttgcccaccagcaagacccggatctggttgaagccccgccaaccaaagaagaacgtgccgatggcaccaaacgcggcaaaaaccgcgatgatcatcgccatcatttgcttgatgcggctgtaacggcctgcaccccgcgcgatgtggtgcaaaaactgcaaaccatttcggccagccgggcaaaacacgatatggccgaacgctatcgggtgccgttgccctgggccgattttcgcgatgatttatacgagttgattgatcaggcccgcaccacgcaccgtccgaaccgggaactgaatggcaaattgcatatggcgaccaatcttggcgttgtggcgcgctttgcggacgggcgctatctggtgcggcaacgcaaacggtttgatccgggcgaattttccagcctcgatgatttgaaaaagaaactggttgtcgaccctgccctgatcgcgcggctggaaaaggatatgactgcggggcaggcggtgctgttttgggccgcgcgcgaaccgttggccgatttgcagcgccaccatgaaatgctgggcgatattgcgggcaatatcgaaaggctgtttgcccttcagccaagcgaagcaacatatgaagatgttgaccgtaaaaccggtgctgttgaaatacgcacccgcaaggttaaggaagatgaacgattggcggcggcctttgccgcctatcgcgatgaatgcctgacacgcgggctttcgccccggcgtaccgttcggctttatggactggacgaagcggtgatgatcggcgggggcgatggtggcaaattgccatcccggacgttcaagcccggaagcaacgcctggctggatattttccgggacgggtcgggaaagccgggatttgaggttgttcgcaccattgatgcaatgcgccccggatatgtgccgcaatggcagcaacatgacagcaatgacttgctgttacggctgtttaagggcgatacagtgcggttgcgcagcaaggatggcaaaacgcggttatgtgttctggccaccaattcgccgggcgattgggaatttcaaccgcttaatctgtcgtcgcatatcagccgtcatccggcgcgcaaaaattttcgtttcgggtttaaggccttgtgtgatgccgacccgcaactggtggtgcgcgatgtgttggggcggattgtgtatgaaacatcgcgcttgaactggtagcaacccttgtaacggagcgggcatatgtggcgggtggtggatatttcgggtgaaaaccggcatctgcgactggcacgaaatgcgctggaagttatggacggcgatgcaaagctgggccgtttaccactgggtgacattaatgcggtgattgttcatgcctatcgcgccaccctgtcaaccgatcttgctgcggcgctggcgcgcgaaaatattccgctggttttgtgcgatgacaaacatatgccatcctccatcgtctggccctttaccggccattttgaacaggcggaccgcattgcaacccaggcgatggcaaaaccggccctgatccggcggttatggcgccagattattcgcgccaaaatccgtgagcaagccaacaccctgcgcgggccggacccgatcggagccgatgccctgatcaaactgattgcgatggtcaaacccggcgaccccgataatatcgaggcccgtgccgcccggttttactggtcgcgccttctgggcgatgattttgtccgtaaccccgatggcggcggacctaacggggtgctgaattatggctacatcgttgtgcgatctgccatggcgcgcgcggtggcggccgccggattggccccggctttgggcatttttcatacctccaaacgtaatccgtttcgtctggtcgatgatttgatggaaccatttcgcccgttggtggaccgggtggtctatgccaaccgcgatatatggggtgatgtggtaacacccgatgccaaaaaggcactggcggctattgtgaccggggccattcccacgaatgaaggattattgccggtttaccgggtgatggggcaattggccttttcgctggcttctgtttatgcgggccagcgtaaagagctggatcttcccccccaaatcagaattgaaaagcagatggagatggaggggctgtaacccggatcagaccgatcagacagatcaaccggggagccagggcaaaatggcattatcggggtatcggatcatgtgggcttttgtgatgtttgacctgccagtggtaaccaaggcggaaaagcgccgggcgcgcaaatttcatgattatttgctcgatgaaggtttcgatatgaaacagttttcggtctattaccgcttttacgaaagccgggccaaggccgatgccgccagcaagcgcatctcggccaaaattcccgaacgcggcatggtctcgatcctgtcggtgaccgacaaacagtttggccagatggtcaattttatgggcaaggtgccgacaaaaaacgatcaaaaaccggaccaactggctcttttttgaggtgaaaatgacggtttttgactcaaaaaaatcccgcaacactttgaatatgctgcgggattcgatgttcctattgtagcaggttcgattttggatggtagctacaacatcagcaagtttggtcgcgccgccttttacattgtagcaggttcgattttggatggtagctacaacgctggacccgcaacccatgggtatgggccgtattgtagcaggttcgattttggatggtagctacaacccaaacagcttttgcagcaagatatgatgcattgtagcaggttcgattttggatggtagctacaacgagttttatgaaagtttcgttattctcggtattgtagcaggttcgattttggatggtagctacaacaactcttgggtggaattgatatctgccgcaattgtagcaggttcgattttggatggtagctacaacaatggcgcgacctttgacgtcgtaatcatgattgtagcaggttcgattttggatggtagctacaacttaatccaatcgacaaggttatcgggttttattgtagcaggttcgattttggatggtagctacaaccttcggtttgtgcgtagcgtgtcatgccgcattgtagcaggttcgattttggatggtagctacaacgagaatatctataatggcgttaatcacacaattgtagcaggttcgattttggatggtagctacaaccatacttgcttggtctgcctacggggttttattgtagcaggttcgattttggatggtagctacaacgaaaccgcgacaagtggcggggtgctgcattattgtagcaggttcgattttggatggtagctacaacattgttgatatcgatgatgcagctatcgccattgtagcaggttcgattttggatgctagaaaaacgcctgcttaatcccgtcaataatgaactggatggcgagggcggcgaggatcatgccgagcaggcgcgagatgacggtggcgacggtggggctgaggcgtttggcgaccaggcctgacaacagaaacatcaccagtgcgcagaccatcaccagcccgacaacgccaatcacgccggtttgcatgacgatattgtcctgatatttgcccatcaggagcataaccgtggcaatagaaccaggaccggccagaaacgggatcgacatggggaagatcgacacgtcttcgtggtcgtcttcatcatggggggcggtttgtgccggtttggatgccggggtttgcccgggcgggacggtggtactggtactggcaacggtgcctgtatgcgggctggttgcggcttgtggcggtttggcatcagacgggattttgctgccagcaacgatttcgtcatcttcgtgttcaagttcctgatgaacctgttcggcgcgttcattccgttttttgccgcgccgttcaaacagcatttcaagggcgatcaaaaacagtaaggttccgcccgaaatgcgaaaggcgggcatatgaatgccaaaaatgcccagcagtttttcgcccagcagggcaaaggccgttaaaatcagaaaggatgtaatgcaggcccggatcgccatgcggcggcggtgagccgtgctggtatcctgggtcagcaccagaaaaaccggaaccagccccaccgggtcgataatcacaaacagcgtaacaaaggcggcgatcagttcgcttaacatgctgatatcgggcatgggatttccttttttgcttgatcatccgtcgatgtaagggtgcattttttgcacatcacgccgtaattgtcgccataaacaggcggttttcagctcgtccgaagtcaccggaaaagccagcgttgatttacgcgtttgaacgagaaaggtaaatgcccggttcccgattttgccggtaattgtcggggcaaccatgccctgtcggcgcggttccgttttgacatgtcgatatatcgccggtttgtggtttttgtcttgtactgattattacgaggtcattttcaatgagcggtatcttgggcggtacctgtcgtgccaggtgggttaacgtcgggggcgggtaaaaaagcccccggcaaaaggtggcggcaggtcgcgcagggcggcaatgcgggtggtcacagaaggatgggtatcgagcagggccgggggttcggtgctgcgataggggatcagacgcagggtgcggcgattgatttgttcgatatggcccagtgcatcgatcagatcgtcggggccacccaaaaggtcgcttgcaccgtgatcggcggcaaattcgcggtctcggataacggcgcgttgcaacaaaaaacttatgcttggcgctgtggccagcacgatgaccagccatatcggcggggttgggtgtgctgtgctgaatatgaatacaaacatcgcaaaaaccgccacggtccaggtcgcgcgataaagaatgtcggtcatcatcaggatctgggtgtcgttatgccaggcatgggcgatttcgtgggccagaaccgcccgcaattgccggggggacaggccggtaatggcgtcttgcgacaaggcaatgatggtgctgtcatccttgccggtggtaatggcattaacccctttaccgggtaatagatacagacgcggaataaaggccagacctgcccgatgcgcaagaaggaccgccatttcatgcagggccggatggctttggggggacaagggtgtcgcgcgcagcagcttcattatcgtgtctgacgataccattggcccgaacatcatcatcagggtaatggcaaaaaacgccgaaaccatcatcattggcccgcccagaagccacgcacaaacaaccagaacccctgccatgcaggctaaaagcccgctggtatgggtaaccccgcctgcgcgtaaggccaaaaaccgttgaacggagttgggaagttccagcatttgacaaaccccttatcgtaccaggccaccgctaaatcttgccatgggcaatgatccctgatgatacgcttctgcgttgtccggtgcatggggcttgatcaattcggcaaaataaccgccgacgggcaaaatggcattaatgatgcaagccgggtttgggcgggtaacaggggaggcgcgaaacaggaattgggggttgtggtgcctggtcctgttgttttcgggctggccagtgttgcctgttttaccaggcaacgacaggcagggaaggatagtggttaaaacaccatctggctgaaccagtatccgacataaaacagtgccatgacggcaagaatggttaacagggcttttttgaacgggttggatttggcctgttgcaggtggttcggggttgaggaatttttggggttagccattggggactcgcaactgtttttagaattaaaaaaacgaaaattggatagatcgaggcccgttgcaagggttttgactgtggtgtgatcaggaatggtgcgccagatcacaaaagaagggctgtaaattcaggtaattgatgaagcattggcccaaaaccaatgatttcgttaacgcatctttattaagtttgactagaatagtcgtagaggactaatgcaaccagataggttgtcctgccgtgtgatgcgacgggatgattgctggtggggacaggccgcaggcacgcggcgacgatatttacgggatcaggatggcccagccgaacaaagcccgctccggcatattggccggacgtaaccgcgaaggtgaccgcaccccgcttgaacggatgttctggcggtcgatcggtattgtgggcggattcagcatggtcatcaatttgctgaatatggtgatcccgatttattcgatgcaggtctttgaccgggttttgtcctcgcgcagttttgataccctgtttttgttgacccttggcattgccattgtgctggtgtttatcgccgcgatggagcaattgcgatcccgggttttgatccgggtgggcacggggcttgaccttggtttgggcggcgatttgtttgcccatgtggtggaacaggcatcgcgcggcgcgcccaaccggcagcgccccttacgtgacctttatggcttgcgcgggtttttaaccgggtctggcccgtttgccctgatcgatttcatgtgggcaccggtttatattggcgtggttttcatttttgatatccgtctgggcatggttgcgcttggcggtgcggtgatcctgattttgattgcggtggccaacgaggctgcggcgcgaatttcggtagatcgatccgaacaatcgcaaaatcgcggcattgcccaggaagaaacctatgttcgcaatgccgaggcaatggaagccatgggcatgacgcctgcggcccgcgcgcgctggcaggcggaccagtccgatgcgctgtattgggaaggccaaaccagccgccgggttggcacatcgacgaccttgtcgcattttgtgcgcctgtcgatgcaggtgatgtttatcggcaccggggcttatctggtgctaagcgaaagcatcacaatcggcattatggtggcatcgatgattttgggcatgcgcggcctggcgccgtttgacggggcggtggcggcgtggcggtcctggacatcggcacgtaattcgtttgagcggctaaaccgcattttgctggaccgcaaaccccgccttgccgcgccggcattaaaggccaaaggcatggccgtttcggtagatcggctggtttttgccccgcccggcagccgaaatgtgttgtttaaagggttttcgttcaaggttggcgcggggcaggttgtaagcattgccgggtttaacggagtgggtaaaaccgccctgttaaagctgctgatggggatttggtcgcccgcttcgggatcgatcaaacttgatgaggtcgaagcatcaaaactggatcgtgcccagatcggcccgcaaattggctatctggcacaaaacccgtttttgtttcccggtacaatcgctgaaaatattgcccggctgggctcggccgacccgcgcgagattgtgcaggcggcggaattggccggggcgcataaatttattcttgatttacctgatggttatgacaccaaactggaccggggcggtaccaatctttcgggcgggcaacgccagcttgttgccctggcggcggccctgtatggcaagccaagattattgttgcttgatgaaccgacaaccgcccttgatgaagggcggatggaatatgtgaccaatctggtcgatatcgtccgccgtgcggggattaccgccttcattgttagtcatgaacgcgaagttttaaaacgcgcagatgcgattattgcgctttctggcgggcaaattcgtgtggtgccggtaaatgtaaatcgtatgcaaactccgcctcctcctgcaccggcgtcggttgcggccttgccgtcctcggcacaagtgccgccgcggccggatgcgctgtcttctgcgaaaacggccacgggggcaggcaggcagggcaatgtgggggacgataaccagatgcgcattaccccgcaaaaacgcgccgttcctaaccccgatgccgcccgccgccgcaaccctgatgcgggaatgacggatgatggcacggcccgcagcaccgtgcgggccgtggcagctgctgggcaggggggcgaacaacgggccctgcgcagcacggcaaatggcacaatgaaggtaacgcggccccttgcgccgcccacgcgcaaggacgaagggctggaccgtggcgaggggccaaaggacgtggcacgccgcaaacaggccgcggcccgcaaggcacaaaaagatgctgcagatgcccgtctgagccgcgaaaaaaccgcccgccaggttgcccgccagcaagcggatcagggtggggcggatgatggaaacacacgtgtttccgcagcagcgcctggtgaaccgcgtgaacaacgcacgccacgggtaaaaaccgggctggatgggcgcccgcaattgcgcgtggttgaaggatcggccgggcgcaggcaagggggcggtcgatgaacggtgtcgagcttccgtcggttcggacccttgataccgatgtaaaaccgctggtccgccttggtttgatgattttgattctggggtttgggtcggtttttttatgggcggcaactgcgcgtattaattctgcggccattgccagcggggtggtttcgcccttttccgggcgacaaaccgtgcagcatctggaaggcggaataattcgcaatattctggtgcgaaatggtgcgcgggtcgcaccggggcaaacgctgatcgaactggatgataccagggcgcgggccagttatgatttgctgtataaacggcatttaaatgcgctggcgacccaggcccgtctgaatgcggaacggcaggggatggaccatgtggtttggccgtctgatttaaatcccgccgcccacaaagaccttgtgatggcgcaaaaagacctgtttgacagccgaaccagtgcctttcgcggtgaggtgcagctttatgatgaacgcataaaagagctgcgccgtgaaatttcggcaacgaatgaacaaaagattgcgtcgcaacagcaggttggcatcgttaaggaagagttggcgatggtaaagccgatggtggaaaagggctatgcccggcgcacccggttattgcagcttgaaagccgactggtggataatctgggcaatattggtcgatattcagctgatatcgcccggatcgaacaacagatacaacaggtgcgtgccagccaggcgcagctaagccgtgatcatttggaaacggtaaacaccgaactgcgtgatgtgcaggcggatttatcggacctgacggaacggttgcgctcggccgaggatattttggcgcggtccaaaatcgtcgccccgaccgaagggacagtaaccagcctgaaatttaccacggtgggcggcgtgataccgccaggtgcgccaattctggagattgtgccccataatgaccggctggtaattgaagggcgaatttcacccaatgacatcgatgtggtgtcgccgggcttgctggtgaatatccgtgtgacagcttttagtcagcgctggtttgcacccgttaaaggcgaggtggttgatgtatcgccggaccggttgagcgacggggatggacgcccttatttccgggcgatggtggaaattgatgccgatagtctggctgaacatgaaggtatgatcctgtctcccggtatggcagcacaacttgagattgtgacaggtgcgcgaaccattctggcctatttgtttgaaccgatcacggatagtttccagcgtgccttccgcgaggaataggccggtttatctggccgagtcgcgtattttcggcctgaaaaaccgaagcaacagcgctatattctgacacaatctgacatttcttttgctttgctgccccgttaccgggacgtagggtgaaaaaggccgaaacatatggttttcgggcgtttctgctgttgccgctggcgggtcgctgaaatatactgtcgtatatgggaagttgtgacttttttccggcaggggtgccgggtggtcccatgtagggagttacgaaattgacagcggcagccaatcaggatgatggcacgggttttaccgaccccagcttggaagatgtgcttgatacacgcacggaaaatggttccgcagcgggtgatggcgccacagtggattccagaaatgccggggcgtctcctgcacaggtgccgcaatcaattgcgacccaggtttttaccaacattcaaaatgttattggcagcgcctataacgatgtgctgattgccgatggctcaacgcttagccttgatggcggggcgggcaacgatacgctggtggccggtgaaggcaacgaccatttgaccggcgggcatggccgcgacctttttgttttgcagcagggttttgggcaaaccacgattagcgattttgacccgtcgcaagattccctgtcgctggggggggcgggcgttaaaacagttcaggatctgatcagccttgcccatgaagacgccggaaatgtcattattacgttcgataatggcgatgtgctggtgttgcaaaacctgacacttgccgacctgcaagccgtgtcgattgttgatgctggtgacaccgtcggtctggccgatggcagcacgattaccctgcctgatctttcatccctcaattacatcgaaggcagtgccgatgatgacgtgatcgccggaacatcgggcgatgatgcgatcagcggcgggggcggcaatgatgttatcgacggtggcgatggcaatgacagcctgtcctattggggccagcttgacggtgttgatgttgatctgggggcaagtactgccagcagttccaatggccgcgatacggtttctttttccaatatcgacaatgttgccggatcaaatggcaacgatacgctgcgcggcgacgccagcgacaacatcctgtatggcgcaggcggggacgatacattttccccaggcggtggcaacgatcagatcatcggcggcgacggcaacaataccattgattacagcgatgccgagggcggcgttgtggtggatgtgcgttccggtcagggcgaaattactaataataccgatgtaaccccggcggatgaaccggctgatacgtcgggcaacagcgaaaccgatagcggatctgccaacgaaagcaccaatggtgcaacggatggtgaaccggtcgggg

SEQ ID NO: 1691 - DNA, 17381 bp, synthetic construct
  variation 9072..9271: note = n is a, c, g, or t
  misc_feature 1..17381: note = Synthetic
  source 1..17381: mol_type = other DNA
atttagaccagcattgatgtcccgcagggaagcgaagaaccgggctttacgcattttggagtactcgacatcaaccttgaggactttgaatgtgatgctattgaaatcctcagcccccttgcgaatgtaaacgcgctcgacgcgcagcacggtttccgcaagtatcgttacactaaggcggccgcgggcacgataaccctctctccacgcagtgaatggtccggtcggaaaggcgcatttagcttcagccttcttgaacttttccacttgagagtcataggtggcttccttccacttcttagggtccagatggtcctctgcgctatattccgcttccgggtcaacctgcatgcatccaattatgcccaatgatttcagaaacgcttgatttcgggtttcaaagagaattgaagctgtccagtcctggcttacgcgcaagtgagttccaacttccggaacaaatatctttatggtttttctccttggaaaagtgaaagatgcatttgaagaacgatgaaatcatcccctgtgatgatttttccttacatcgaaagaatctcaaactagaatattaaatttttcctttcttccgggtgatagtggacgtagaatgtaattctggaaattccagatatcttcaatatgtaacagcgagtaaggcgatgaaacgtaccgtcgaaatctgcgctgctgaaggtggcagcgatagtcagatgtttgttggtgacttggccaacgcatacaagaaatacttcgaccgcaaaggttgaaggcaccgcgtcaaggatatcagtccgagtgacgcgggacattacagtttagccttcgaggtcgagggcgaagatctcacaaaatttgagcaagaagctggcggacaccgaattcaacgggtgcctccgactgaaaagcgcggccgcgtccattcatcgaccgttaccgtttccatcacgtcggaaggcagcgtatcgccagagttgctgctgcgggacgaatgtcatttccgcgtggagtggttttcggggactggcaatggcggacaacacagaaacaagcatcagaacagttgcagggtcttccacgtccctacaggcctctgtgaagcgcgccaaggccgaaagagggagaacaacctccgtgaggctaaggcagccctgatcgcttctctagaggctctggtggaccagaacaagcactccgacatcaatcaggagcgccggaagcaaattggttccggaatgcgcggggacaaagtgattactatccggttccaagacgacaagacagtgcatcacgagaccggcaggacaatgtctaccaaacgctatttgaagggcttcatgaacgaaatctggatgtaaagcaggttccccgtaatcacggggaacgtcctttttaactatacactgaatgatcgctttttggtcttcctcgtgtctgcggggaagactggtcttattgcacagtctgaacctactcttcgcagtgtcagggtgccgggctggctatggcgctttcaaggattgaaacgtcgacccggccgtgaaccacccacgtgaaagcaaactcctcgacgagttgctcttcagtgtcgccagacaagtcatcacagcattgtgcttcaagccacgcgtgcgccaattcgtgtgcgagtgtagcttttatttggacggagaagtcatttcccgtgtcctcacaggcgtcgtgcaactgttccatgctgaggccgataaacgggaactgcgatgtgccgtcagcataaacgccatgtgtattcgcctggagagaactcgcctcagctaaaaaaacgaccgccccaggaaagttgagcacatcaaggaggtctgtctcgacctcctcaatcgctttcttcaagtcatcgagctgttcggagcgggggagctcggtcagctcgtaatcccacgccgggtggtagtcgtggtagccgtgctgagggagctcttcatgtccgtgatgcagtatataaacgcgctgggccattatcgtcatttgttcatatcaacgtggggccggagttgcgtcgtcttcgctataggatggtgtgggtgcacttgacgcgtcactcacaccatcttcgttgaagaggtatgaaggagccaaacgctggttgggctgaacatgaatgccatcgttctggaccgtaacaatggcatcaaattcctcgcgatcccgaaagacaaccatctttagattgccttggtcgatttcgacggccacagagcgagaggtgccatctggagctgtaaactccagcatgagaccgccatagccaccctcggtaatcttcatcggccaaggcttcttttgagtgtctgtgaggccatccgtttctccctccgccatgcgccagtccgagatttcactctcgaataatactttcggggttgtcataattatgctcctgatagcgaatgaagggtttcaagcggtcggtcgggacatcacctaccgggttgggtgagggtccactgccatggcatcatcacatggccattgcaggcccgggttcatgggtcagacgcggctctggaaatttgatagcaacgatttcgacagatgggctggtccctctccacatgtttcgagcaaaggaagtgtcgatgctgacgcaggacatctggaagcctgtctcagaaaggaatttgttatgtttcggcgtcgtttcttctttgaagctctggcgaccactgaaacggaacggggcgctttcctgcggaatgatgaagaagccgtcgtctgcgatctgagacgcgatatcaatgacatggtattcgaactggggaccatcataatttggacccgagttcccatttctgtcgatacggccgaatggtgggttcccgatagctacgtcgaagtgccccaagtccatgttagggatatcgaaaatgtcggcaactatccaggttgcttccgggaggacctttcgtccaacttccgcataatccgggttgatttcaacacagacaaattctgtttctcctgagtttctcagggaatattgatggaggtggaagcttaaagccccaatcccggcgcacaggtcgatatatcgtcctggctcatccatcgaacaagcatatgcaaagctgtttgcaagctcgaaaggcgtcatgaaggcacccgccggactgttcacgtggtttgcatcttccctccagtgctctagcacgaattccctctcgggtagggaaagaacatcctgttggagaatctcacatgcttgagcatggagcttggcttgctgtttggtcagtttggccatcttggaatctgctccgcaaaaatagtagtgccaaattagacttggcgtctgtgctttcgaaccattggagcagaactcttggcaagagaccggtggcatttgtccggagagggtatccgtgaattcggggtctatattggtagtcagtggcgaaggttgacaaactgcaacgttcgaagaatattagttgccttgctaagagcactatcaaaacctgacctcggtctacggtttcgtcaaacgtccctttttttggggcgttttgtcgtttgacaactgacgcatggaagtttagtgattattggtgtgaaacgtaactatcaaaccacagcctttggcttacggttttcataaagcgttcccattgggagcgctttattgtttgattgacgcagtcagctaacgtaattgcactcgttgataagtctggccggatattaccctgcgcacccgggttaagttgtcacagccgatacgagaggcgatttcggaaaggggtaggccggttgccgcaagctctctgattgcgcacacatcctcaatcgaaaatcggttcgctggcgcacaaacaacggcagcggcccaatcagggtcaagccaccgctcattcaatgccttcgcgatagggcggttttgcatccagttttcgagggttcgttcacgatcttctggagcaaggggagtttcatcaccgactatattcctttgccgcaagtagcggagcccctcatgacctccaggaatcatgtttagcagccgagtatcatgccaatgtccggctacaatagattgctcagcttgacagagagtgtcgaggtcatccaaaacagccaagacgtagtgatgaatatgggatagacggccaccgtctcggcgttccctgaatgcttgatgaaacttcaagcgggaacctctctctattgcggcccggtgctcagaccaccgcttcttccagcttctccgtgtgattccaacataaaataggccattaaacggatactcatgttcattgccaaacatgtgttcatacagaaaatattgaggcaatcgtgcgcctttgccgtggacccgttcggttgtgaccagatactcaagctttgtcgaaaaaatctgacttggggtgcggatcgctccgggttcgaacggtggtgcatcctgacatgtgcgtgcagcttgaatgttcttcggactcaatgcctgctctgcaatataggggtcggttacgacttcaaagcgcagcagtgggtgaacgaatacgtagccgctatccgcaatattaacgttctgccccatcgttgatacgcgggcatcatcaggaacggccgataaacgacttggagggatatagaagcgggtccactttcctgagttttttatggccaccaaatgaattgtgggttcgggatctccaaccttcaccttaatcggagcgcctgccataccatgtatgtcgagcttgagaccgaagtccttatgcctgccaagaaatacgcggaaaagatggtcgaagtgtcgaaaatgagcatgaaactctcttggagagagatgctcaaaccaacgctgattcaagatgaacttctgccccttcgccgacatcagatatctgatcgcggtgaactgttaggtttgaccgtctgacgccattcctgttctgaaatggtctcgccattgcggaaataccgctcaccttcaggcgagatgagggcaggcccaaatgggttgtctattttcttggtttccaggttcttaaccatcacagaatctcctgtccggctatagacgaggaaatgtgtttcttctgaatatggtggtatgtctaccttcggtcgaaaggcattttcccattcgttcatcaggccggtaaccaatttgaggcaatctttctccacaccgcgaaaggctggaaaagcttcgaccttttggttcagttcatcttgcagtgtaggctgaatctccaacagtcgcttctggacggtagtgacttgattgtaagagagccacggcccgatagcggccacctcttcgggctcagcgacaagcacggccgccaggtcaaaaacgtctcgaggctgaaagttgctacctcgataggcaatctttttggctaggatttcccgcgggcgctcaatgacgacatcatgccccattaagttcacgttctcaaaggcgtccttctgcacgacggctgtgctcgtgatgaagtcgatttcctgcatccccacgatgagctttaccgccgtcgcctcttcactgtagtcgggacagagctcttctgctgtgtcattgaaacgaggggaacactgccgaaccaacccgatgtcctcggaaaagagatccaaatcccgtgatttgcgatgtccgtatctgcggagcagcatcgagccaccaccgatcgtgaaatcaaacgacctgccggtcttttcctcgaccgccttgattaccgcaatagcggttgggagcagggacttccagtcgtcgttatggggtccgtcgtgaatgggaaactgtgtcatggtgcggacctccaatctcattggtagctcgactatctggtctcagcaatttttccacgtgcgaaatctgttgctgcgtgatgtcatgcttccagtagaactctttcttgatcctgtctggcaattcttccagaaatcgttgcaaatgaccatgccaatgcttttcaacgatgcccgactgaaatgttccgactatggttggaatgctaatgatttgaggaaacggtacattgacactggcaagcacaatccggtctacattggatgagcttttgacattcaaacgggtcggcgcgtattgctcggacgcgtcacgaaagcgcgataaggctctctccaccgatttattgccagcacgataaaacacggacccaattccctcccattcaagccaaagcgcccgaacaaccgatagtcgttaagccagtatcgtctgttcgctcgcttgcgacaagaggtccttttggacgctgttccccagcaagacatttcagtcggatggtttcttaacaccactccagtaagaaagtcccatcggtgcttctctgccttccgcactcaccgaccggcgcaatccctcccatttgaacaggagatttttgcgcaccttgcgctggttctcactgagacgttggcgaccatcaagcaacaacatgatgctggtatctagcataaaaaacggctgcccaggctcattccccctttcgcctgcctgcaccaatggacagctatcccggtaccggctcaagtacttttcatgcctgccaaatgcggggaactccttgagatagtcttcaaaactgacaaggaaatcctcgaatttttcagcccatgattgaaactgagaagacatgggctctttatcccaccgtctgcttgcaattcatcgggcaaggccgggtttgtgaggtgggggcagaccggaggatgtcctcaaccgatgcaacttgccttgctggcttatggttcagtccacgcaccgtctgcttggccaagcggacctcctgacggacaagagctttaataagcgctgtttcaattggcggtgtgttcaccatagtcatttcctgctgaaggatataacactcaaaggaaccacgaaagcggtgccggtatctccactctttgccgggcagcatgcacccgttggatgagagaggtgaattctgatagcgacaccggcgcaacttttttgagctggtagagacatctcgttagagcttccagattatcgtccctggtttgaaagagacctctcgacttcgggtttgccagacaatccataacgatctctttggccttcaggttccgtgctttgtgttccgcgtgccaagcggtgacttcctgcacagagacatcacgtatgttctgggtgacggccctggcttgtacagcaatcactgcaacaccgatggttatggccacaagccccacgagcaaagccttattgtatgtcttcacggacagttttcctgttaaaaaatgtcatttaaatagcatagttcatactttagtgaacgccagccgtaatatggtccagcaacgggaaccgtggcatcaaccaattatctaccaagacttgtcggcctgagaacagggctagagagttcgggtatttagcgacatgtcgtgggcagcgcacagttattcaactcctcccgccgcgcggcgacaacgggacgaatgagacctggcagttcgtccagatctaacttctttgtaatgccgatgactgccgagatgttcggtcggtctgttatagcgtatgccgcagaacggtggctgccatcccaaatactgaagctgtcatgaccattttcgtgacggccataaaatccgacaacgattggctcgaagaccggctcgtcaagtaaggcatcccacatgccaggcataccattttctgcggcttctagagactgctccttccagtactcttcggcatcttccttagaccacagtgcggcgaccggcagtttggcgatgtagagccagtcgagttcttcaggctgtgtgctggtcaccatatcttcccagcgcccggcaaactccgacagctcctccggggaacagcgagaccagacgtcatcgaggttgctcatgtcgtattccttgtgttcctgtcgtaaatccttcgtggtaaacctgtcacgtcgaaaactcaccacggtttggagtgtagatggcaagattatagttaaaccggagccatcgaattgaacaccggcagttcttccagctctaaacgcttctcttctgggtagttgctttcggtgggatagacaaaacagttatctacaatcacagcccagtttcgcggattcccgaaatattgggttattttgtcgcggtcggccggatcttgcaggtcgaatacgacttgactctctagtcccgtatacaggctaatccacaagtccacgacatagcggcgatccaccacacaaaagtcgtgaccacctacacactgaatttcgtcatccgtgcactctgggttctgttcgcaaaggaaaccatagatatctgcacgaccagggtaatcgctggcaacaacgcgtgcgcaattggtacacgtccccattggctcaccgctgggcaaataagctatgatgtctgccttcgcgcgctcttcaggcgtcatgagctcctggcgtttatcagttgacatacacgcgtaatagacgccgatttcctcttcggtagcatagcgccgctcaagctcggtttttacattcatgattagcccttatgcgatgtagctccggctgaaacccggcaagtcggtgttgcactcatgccccataaacaaagcatgaaactgacttagggtctgtttatggggcaaaagtttgtgcaaaatgtctcaaggagagcatacccgcaaatcaggaaagtatcccaaagttaaagctactcacactgcgaactgaaggtcggttgctttagcttcaatttaatcccgtccgggcccaacagaacactgatatgcggcgcatgcgcatcaatggagaccactggcctgaaaacccggtgaggagcctggataataagagcacaattgggcttcaataattgatgagtttcacctcagaatatcaaagttcacgacctctgtagtccaattcccgaacggaaattaccgggcaagctattaaaatcacaagagaaatcgcagttcctgtcacgtttggtatggttttggacagtagctacaacatgttgcactggttcaagcctatatcgatagtcacgtttggtatggttttggacagtagnnnnnnnnnnnnnnnnnnnnnnnnnnnnnnnnnnnnnnnnnnnnnnnnnnnnnnnnnnnnnnnnnnnnnnnnnnnnnnnnnnnnnnnnnnnnnnnnnnnnnnnnnnnnnnnnnnnnnnnnnnnnnnnnnnnnnnnnnnnnnnnnnnnnnnnnnnnnnnnnnnnnnnnnnnnnnnnnnnnnnnnnnnnnnnnnnnnnnnnnagtcacgtttggtatggttttggacagtagctacaaccaatggagatgaaaagtcgccgccagacaggtcacgtttggtatggttttgggcagtagctacaacgtcacgtcgccaatgaagagaataatgaatgtcacggttggtatagttttgggcagtagctacaactttgccggtcgcacgaaacgaacgaaattggtcctcggaatggttttggacagtagctacaactacaccaatctgggtgatacaattggcactgtcacggttgatatgacttgtgccatacccgacattaataagaaaacctaacaaaagtctgcttattaatgccgaaatgaagtctgccttcagatagaaataacaagtctcactgtgacccgcaaaagccttgacgattgggaagtgaagggaggccggagcctcccttatttgtcagatcgaaatctttgttgcagctactgtgcaaaaccataccgaggaccaatttaaggaaaacgccggagcagtcaaggataattttaaggaaaattcaaattttattgcaaattaaacgtcgcgcgttgtttttagagaagaggtggcatcgctgcatccggctggaaccctgaagaaaatcgtcccagggtaagaaaattgaagaacccgggcgctgtaaacattttgcttgaatagtttgatttcgtcgttatgttttcctttagattgtttacacaaaggaaagcttcatgtcagcgaagaaaagcaccaatgtagcattgggtgttgatgtaggcgtcgcctctttagccctttgcgtagttgaacttgatgcgaaaaagaacccgattgggattcttgacggtgtttcctttgtatatccagccgccgacagtgccgctgagcggagacaacaccgctcggcgaggaatggctaccagcacaagtcttccaggttgaaggaaatcaggaacctgctgatttcaaaattcggattaatgccggattttgacggaaaatcatctggcatttcagattgcacccccaccgatttggctctggaagatgaagggccactcgacaaaaatggcaagcgattggtctctcccaatagtcgcagtcgtttacgttcggcaggcttaactcaaaagctgacacaggccgatttggcgcgcgctattatgcacattgccaagaaccggggaatgaggttgacgcgcgtcttggggacgtccgacgaagatcagaaggcgagaaaagaagcttcagtgatggctcttcaggccagagagacatcacgtctaatgcaaagtgaaaatgcggaaacacctggacaacttctgtggaaaagagaactggctgccaccgcctcacatttgcgtttgcccttgcgccgccgcgttggaacgagtttgcggttacagtttgtcagggggcaacttgaacatgaactaagcgcccttcttgcggcgcaaaaaagctggcatacggaactcacgaccgacttttgcgcacagctaacggaacttgtttttttcgaaaaccctgctccaccccctgaaattggtagatgcacctataatccagagacggaagctcgtatcccggtctcaagcgatatctttcagcagaagcggatctacgaagaagtcaataatctgcggattgaagacaaagatggcgggcgtacgaaactgactcttgagcaacgtgatattattgcaggtcggttgatgatgggggacgatctgtcagcatcacagattcgcaatttgcttgagattacgtcaaagaaccgaaaagtctcaattgaggggcgaaaggttaacacaccaagcaagaagctcatggggcacgccattatgtcggcattggttgctgccgatgagcggtacgaatacgagagcggtaaccatggccgcctgtgcgaactgtacatgagcctggaagattaccagcgagaggatttcgaaaaagccctacgtgaggaaaaagacagacaaactctggttaccatcctgtgcagtggctacggtgtcgagtatgttgaagctgaaaacgcagcagatacaattgcactgcccagaggttacgcttcgacagggatcactgcgacgattgaattactggaaaacctcaagaagcaagttgtcgacaacactacggctgctgactatgcgcgacttgtccctgtggttgggagaaatctcacgttcgataggctcccatactacggcatcatcttcccccacctggttcgaggacggatgtctcctgaagacagaggctatccggccgcaacaaacgagcagcgttatggtcgtattccaaacagtgtcgtccacaattctctgaatgccattcgaaaggtagtgaatgcattcctgaagaaagcgaaacggaatggctgggtggtctccagtgtccgtgtcgaactggcgcgagaactgaagaaaagtcaggaacagcgggacaaagacgctttgcgaatgcatcgggaacaagttcagaatgcggcctatgatgcggcactcgtaaagctgggcgtcaccgcaagcagaaaaaatcgtcggaagttgcgcctgtgggaggctcaggagagggtgtgtccatacacgggtgtcgccattgcagaaaaagatctcttcaatggaaaatttgacctagaccacattcttccccgggccaagacacttgatgatggtttagggaacctgttgctcgttcatgaagcggcaaacaaggtgaaaggggacaaaactccgtttgaagctttccatgccggtttacgcattgacggccttcctgcgcgaacttacggagaaattctcaatgctattgagaaaaccaaggggcttgcatcaaagaaatggcgcttcctgccagatgcaatggacaagttcgatgatgaaaacgacttccaacaaaggtacaaatcagacacgagttatattgctaaaacggctctccactacattctgactgtattcccggatttgcgtggcacgtccggtgggcaggctgtaaacggacaaattaccagtgagttgcgtaatcgttggggattgggcgacctggtgcaggaggtggcacatcaccaagaccctctcttgatggaagccccgccgacccgtgaagagcgtgaacttgcgaagaagaaggccaagaaccgcgatgaccaccgccaccatctactcgatgctgcgattgctgcctgcgctccgcggaatgtagttcagcagctccaatcaatcgcagcccgtccatggtcaaagcatcagattggcgtggcgatgccttggcctgagttccgcaatgacctttatgacatgatttggaactgccagactacccatcagcccaatcgttcattgaacaagcaacttcaccaggcaacgggactgggtgttgtggctcggctcgatgattggcaattcgttgtccgaactcgcaaaagactggatatccaagactttggcacatctgacaaactgttcaaagacctgcgggtggatgcaaagttgattcgaagccttgtgaaagggattgaggcaggaacggttgaagttctcggtcgagcaacggacttgatcggagaactcacacgccatggagaggatctggagaatctggctttagagtttcgctccctgctcgacgaacagccatctaggcaggaatatgaatacgtcgacaaaaagacgggagaaaccatgaccggatcacggcaaatcccggctgatgttcgtttaggactggcattctcagcgtaccgccaacgatgcctcgacagtggaatccaacctcgtagaactgtcagtctgtactgtgttaaaaccgctattgtggttgcgacgaacgagaaagaccatccagcgcgtgtgtataggccagggagtaatgcgtggctcgatgtatatcgaaacatggaaggcgaactcgacttcgagatcgttcgcaccattgatgccatgcggccgggatggaagccgcaatggcaaagctgctcggagaattctcgcgtgcttcggctatttaatggggacacggtcaggctccaagggaaagacggcaagcggcgcctatgtactctgcttacgacttctacaggtggaggcacgagtacccgaggtgactttgctttccaacctatcaacctctcttctcacattgggaaacaccctgcgcgcaatacgttccggttctcgttcaaatccctgatggaagctcagcccgaacttgtcgtcagggattgttggggaagggtaacctatgagagcggaaggctgaattgacagttccaatgtcgctacaaggaaagctaaacacctttcacaggaaagcacgatgcaggctgtaaccgaaatcaaagactatctggaagtccggcgccgcaacagcagccaagatgttatccatcacattccactggccacgatgaggggcgggttcctgaaagcagcagatattcaggcggtgctagacagccgtgaagctatgcgccagcttctgtctgaaatagcagctaatgctgcacaaggcgaagtcgcgtcagatgacccggctctcatacagcgcgcgcaggcgcttttacatgaggaatagaagatttccacagcaagttgactttacttatcggcaccattatccttcgaccgtgatccataaagagcattttgagccttggcctcacctgttcattggcccgctcacttcgatggtaggtttgacagggaacctatggcagaacaccgaaaggtggattccgaaccctttgcgctaaggaagagcttctactgcctcacactatcgggaacgcaagccggactgtgcttaggaaaacgttcccgataggtctcctttgccgataaatatttgggtctgttctccatagcgggtaaatctcgcaagctgaaaacgagacccagtgctacttgaaaggcacacggtgtttctcgttacgaagcaaaactttctatgttatcctttcggcatatcttttctttagggacgcagtatgaaagagaatggcaaccaaccggcagcagccgtgactgcatggctggagaatattggcaattatcgttttgttacgtcaaacagacacaaaatcgatgagctgaaaacgatcaagtggccgttgggaatcgagcagggtctcgaccttcctgagattgacggcccacctgtggatattgctatctacaaggcaattgccgccggtgctgggcggattgtggaagacagtatccttctgattgatggcaaggaagtcgtcgacatcaaatggagctaccgaaaggtcctgggagccattctatccgacggacaaccgcacgaaatcgtgtggcagtcgaccatgggcttgaacgacggagaacgcatcttcatcttcgagacgcaaacggaatgtgatttggtttccaatccggatacgagccttccaaacgccatcgccttcgacccatatctccggccgagcggggtagagctgtcattccacgaattgcgtgggacaggggagcgggaaatcttcaatccgcggtcccggaatgcaaggaagcttctaatcggcgagcatacattggttcggccgattaatgaggtgcctgaatggaatggggcctaccagtcggcttcgcccgaaggtaagccggttggctctgaaaaggctttctaatgctggtgtctttccatccgtgagagttgaattctttaaaacctagcccccttttgtgggctacccgctacttcggatgggacattcgcatgaaattcctcaaaacatcgtttctcgcgcttggaattatcgccgccaccgcatgttcagtgcaggctcaggaatacggcgtccactacaccatgggctctgtttactctgcctccgaaggtgtctcgtccggcatcaagttatcggtaagtgttgacacttctcgacttaacatcacggacggagtgtccccgggagcgtgtgttgatgcgaaggttacagcggcgggcgacggtacagtcaccaacttggtctcctttatcgaaggtggggattctgacaagttcggtatttgttcacctacggaacaaccgtgcggatttgtcttggcggccggagaaagctgtaatgttggcattcagctaatcggttctggaaatgcagacttttcttcatcgtttgtcgtcacgggaacaggtgctcgcgaagtaagagccgggctgcaagcaagcggtttcggcttcgctacagatctcacctattaggacgacatcacggtctttgagcgcgtcgaggccacctctacggatttgcggtcatcaaatgctaacgacccgaattatcgcacgaaaattatctataaaggtcgaacaacaatgataaagcccctcacggtctttcacggatctgtttccataggatttgagcctggagaaagtttggaagggctgtttaatgatgagcttattggaaagggtggggatgcgaactcggccttgggcttgcacacatcattttcccgatgggtggcgattgaatatgctcaaaaccttggtcgaattacacaaaggcttccggtcgtctacgaaatcagtgttcccgtcaatcgcattacctgtttgctcggcacatctgagtatctagggatggtcgatggtgaaagcgttttaacccacgcggatttctcagccattcgctcttcaatgattgaagctggcattgatgcagtcgtcgttgaaggctgcgaggatattgatccgtgtgtgcttcttcagccgtcccggtgctccgtgatttcccgctataccgccgatatgatgacttcacgcctggaatcaggtgaaatcgcggaggaatcaattctgcccaatggcattgaatgggtgacaggtggcgacttccttacacctgaagaattgatgtcaaaccgccttgtcgccgcaccggcaccgaattaggccgtcgctggccggtgcctcttttattttgagagttcgataccagtgtgtttctcgagctgcgttttagcgaatcctttggcaacgtcgaccagaaaatcgaacgtaaacactccggctttccgtactcccgctctggttttattccagacctcttcgtttcgcacgctatcgagaaagtcatggccatcccaaaggatgcgctcgacatgccagtgtgtgccggtacgaacaaacataacaaggttccgttcggacagaagctgaatgtgatgtgatagttgtcgcgcgcgatcttgcgaaagccctgtatcctcgatgccgaggatttcgcattcttcactgctaaggcaaacgaaatcggctcgtccgccctctatctcaagcatcaagctccgtatcaggtccacgtctcgttgcacgtcctctatcctcctctggcggcgaacttaggtacagaaggtagcggataagtcagatgcttcacaaggcagttttgactgatttcgggggcgtccgaaacatggtggcttgcgactttttctagatgttttcctttcctctgtatattctttccttaaccaccatggaaaggaaatggtatgccttcgcataatgcctccgacacagaagaaaagattgtccaaccgggtagctggtttgaacgaattcgccggatacgtatgaatgacctgcaaaacaaaatcgctgagaaaatgactcagatgtcgagcatgatgcttgaaggccagctgcccgactacgccgggtacgatattcaaagagacgctttggatatcgcatcccttgctcaggaaatggcgaatctggtgaccaatcctttctgggtgctgcctccgattgggacaatcgtcactgtcaatatcggggatgcatcccgacctaacgatgtgcttggtgttccagccctattcggcgacacacgcccggttgatggtacacgttgtgtaattgttggtcataatccgtccgccccagagcctttggtgcttaccccgctgcatgactatcagaaccgcaatggacgccatgttgtcgtcaaggatgaacctcacttttccgatttcagctacgatgatctggttccggtcgggaagtcgacaatggaaggtggggaagtcttcgatgggtaccattatgtcaaaacacatacccgcccag

SEQ ID NO: 1692 - DNA, 23078 bp, synthetic construct
  source 1..23078: mol_type = other DNA
  misc_feature 1..23078: note = Synthetic
aataatatgaaaaaataagcggattgtcgctgatttaaaaatttaaaggctcgcagcgttgcgagccttttttgtgctttaccccgccttggtcgggacggtgaaaatcaaataggcgccgccgaggatcaaggcgaagcccgcgccgtgttgcaaggtgagtttttcgcccatatacagcaccgaaaatccggcgaagacgaggagggtcaaaacctcttgaatggttttaagctccgccagcgaataatatttatggccgaggcggttggcgggcacggcaaggaaatattccaccaaggcaatcccccaagacgcaaaaataacgatcaaaatcggcgccgtcgggaacttcaaatgcccgtaccatgcgaacgtcataaatacattcgatacggctaataacacaatcggcagaagggggagcaagaacggaagcgcggtggtggtcatggaactcctctggttttaagatggaaattggtttcgggcgtttttggaaatgcaatgctttggcggacgcgtgcgcgggcttgcgtgggtgcacaaagcggctgctgcggctccttcactcgccgtaatcgacccgcaccatgtacagcccttccgccggtgcggtggggccgcctttggtgcggtctttggcttcgagggcggttttcacgtcatcgggcgcccatttgccgaggccgacaaggctgagcgttccgaccatgttgcgcacttggtggtgcaaaaaagattttccctcaaactcaaaaacatattccgtgccgccgtaattattgctggtcgttgcatgaatttcggcgcggtttatgctgcgcatcggggatttggcttggcagcggctgtcgcggaaggttgtgaagtcgtgatagccgatgaaatgcacaatggcgcggcgcatcgcctcaaggtcgagtggttttctcaaatgccacgcatagccgcgctccaaagcggggcgggaggaacgctggatgatacggtaatgatagagtttattcttcgccgtaaaccgcgcgtgaaagccttcttcggcgggggcggcgtgtaaaacggcgatgcgctggtctttcaaatgggcgttgatggctttggcaaaatcatgccccgtcaaggcgcgtccgccgtaatcaaggtcgacatgggcgatctggccaaaggcatggacgccggaatcggtgcgtcctgccccgtgaacggtaaggtcttgcccgcaaaacagcttgatggcggcttcaaggctcgcttgtatggtcggctcgccgtcctgtttttgccatccggcatagtcgctcccgtcatattcgacgaggagtttccaacggattgttgtgtctgatgcagacataatcttgccaaacctctttagggtgtgcttaacataaccatatacgctcgtcaaaaaagcgctggtgcattataagcggtataaacccgcccgcaactggcaaaatgattggtaaaataacgggcaaaataaacagcactataagctggggcaaaacgaacagggacaacggccatcatgaagaaatcgtcactctccatcattcgcgaggtctatgacccgcataatgatttttacatcttgctgggcaagagccgcagcggcaaaaaaacaatcgccccctttgttgtcgggttttgtcaccgttcgcaagatgaggtaacggatattcaacgctttatggactatccgtccgcgaccgacaggctggacgagattgtcgtgggtcaggaattgccggatgacaacgtcatgttgttcgaagactggctgcaaaacgatgtttacgagtgggaagaaaaatttatcgaggatttcagttcccgcatgacgcgccaagccatgaatgaccttgttcgcgaagtgtgcgccgaccttgggatgcgcgcgccgcgtcttgtgtggacgcggccaaagccgtattcctattacgacagtgacgaccattgtatttatatggggcatcgcgaccgttgcacgttgttgcatgaactggctcatgcgtatatgagcgagaagctcgacggccccgaagaccacacaaaccattgtcccgcctttgtgtggaaggtgatagaattgtataaccgctatgcggggttgtcgctggactatcttgtgacatcggccaatggtgcagggattctcgggccgctcgacaaagaaacgctggtcgcgccgctacgtcagtttaatcggcgttaaacgcagcaaaaatcaaacaacgttcccaaccgcgacatagccgccattgacggcggaggcgacatccatcggttttttgccctccggctggatgctgtgaaggcgcagcgtcgatccgttgccgcagatcaccgtgccttttttgtcggataatacgccggttgttgcggtggaatcgcccgttgcggcaaggcttgcggcaaggattttaaggcgtgtgccgtcgccacgcagggtataggttcccggccatggattcagggcgcgaatctggcggtcaatcacggcggcgtcctgcgtccaatcaatgcgtccgtcttccttggtgaggagcggggcatagcatgtgtgggcatcgtcttgcgcggtgccgctcaaagactcgcctttggcgagggttgccgcggccttgacgattaagtcgccgccaatggcacacagcgcgtcatgcaggctctgcgccgttgtttgcggcgtgatcgggcaagcgcctttcaacaacatcgcaccggtgtccagcccctcatccatttgcatgatggtgacgcccgattccgtatcgcccgcccaaatcgcccgctgaatcggcgatgcgccgcgccagcgggggagcaacgaggcatgaatattcaaacacccgaagcgtggcgcatccagcaccgccttgggcaggatcaagccataggccgcaaccaccgcaaggtcggctttgagggcggcgaactccgcttgttcaggctcttttttgagagatttcggggtgcgtacgggaatgtcatacgccgccgcccaccgatgaacgggcgtttcctgcactttatgcccccgccccgcggggcggggtggctgggaatagacgcagagtatccggtgtccggcttcatagagcgccgcgagtgcgggaacggcaaaatccggtgtgcccatgaaaatgatgttgagcggcatggtattggaagggggcgttgccataatatgcgggtttcctgctgttctgtgcataatttgtgcaagatgtagcgcaaaaccacccgtcaacgcaaccggtcttggcgggtagcggcatttttgctgcgtttatcttttgagtcctaaaggctcactttgcgcggtcgctgtggaaaggcggtggacagtgccgataaatcaacactcgataaaaccgtgtcgctgaaccgcttaaaaaagcggtcaatgtcgggttggtcgatccgcatggccggcgggcggttgtgcaagtaccggtcgaaggtgatgtcgcacagcaaataatgcatcgcgccattgatgcgaatttcctcgaacaaggcggcgcaataccgcccgctattgtctttgacctgtagcaacacttggtcggagctgtgcgggtctgactccatcgggcgcggatggacgcgcgatgtatcaatcgggaaatgcacaataatatgcgggtcgccttggcggcgcggtggcgatggaaaatgatggccttggcgtttttttaataaatccggcaaatgcggtaagtcgcaccgaagggcgagttcctccggcgtatatataaaacgctgcgcgtccgcgaaaaggcgtcgcaatgaagtattcatgatggtttatgtccctgttcgacattctttttatatttatgccgcctattgagcctgaaacccctcttattgtcaaatttgtttgatggtgccgtgcggcatgattgctattaacataattttaaatcaactcgtggtaaaaatattccataatataaaaaacaatataacaatgagccaaattgtgtaaggggtgcgaagaatgagcgcaaagatgaatgagcgtgtaaagagagtgtcattgaatgtggcatcgttgatgttggggttgccgatggtgcttgggttgtccttgttggcgcgcgaagacgtggcgatgcgcatggtggacggtatccgcgctgaacctcaacaaatcgcgagtgttacgccggtaaagacggttaaaacaattgaaattgctgccgctgctgctaaatagccggaataagagaaaaattcgctgcgatgattggggctgctaaggctggattgttccgcgctttacttcccatgaaataataaaaaagacccgcttttgacgggtcttttgcgtttggggcgttgttggcctttataaaaccaagcggtcgtcgacaatttcgttttcttttttgtatttcacgagtttacgcagcaatgtgtcgcgcttcaggcgagaaatatggtcggtgaacataatgccgttcagatggtcgatttcatgctggatacaggtcgcgagcaagccttcggcgagtatttcctgtgcctgcccgttgtaatccacatatttgacgcgcacgctagcggggcgttcgacttcggcatattgttcggggatggacaggcagccttcgcggtacaggcggcgctcttcggatgaccatgtaatttcggggttggccatggcgagcggtttgccgggaaccatgatggtgtggacatggccgcatccatgatggccgcaatcatcgtcttctacccgacgttgttcaacatccatcacgatgacgcggttcaaaacgccgacttggttggcggcaaggccgattccgtgtgcttcgtacatggtcgcgagcatgcgatccatttgggtgcggatggtgtcgtcgacggctgatacggcgctggcctttgttttcaacacagggtcggggagcaacacaatatcgtaaaaatcatgggtatgggcgatataggggatggtggcatatgtcatggtgatctgtcctgaattctataaatcataacccgtaataataggggcaatttggcttatccggcgcggccttgcgggctaaaacgcgcgacagtatagccaaacgcctcaggatcgcaagcgttttacgctgggggtgttgtcttcgtcatcatttatgctctgggcgttggtgtcagtttgcacggtggtctgcacggcctctgcgtcctctgcggtgtcttggtcgagcggcggcattgctccttcccccattcccgtgatcattccttccgcaccccgtgcggcggtgtcgatgacggtgaggtcgggtaaggctttgtttgcggccgcttggaggctctcaaagcggcgcgcctgcggcaagacggagtgatcgaacgagccgatggcgctgttataatggttgaccgcgctttggacgctcttgcccaaactggacaaatgattggtgaaggtgagaaggcgtttatgcatttcggcgccggcggtcgcgatttctcgcgcattgtcggcgagttcgctttgttgccagctcatccgcacgacgcgcaggacggacataatcaagattggtgaggccagcacgatgttcttttccgccgcgtaatcaatcaaggacgggtcggcaccgaccgccatgctgaataaatgttcggcggggaggaacagcacgacaaaatcggggctgttcatcgaggcttggtactctttctttgataaatctgtcacatgtttgcgtacttgcgtggcgaggcgctgtgccagttccttttccttggtggcttcggataaatcgtccaaaacgtcttgaatcggcgctttggagtcgatgatgatgcgcatcccgtcttgcagatgaatgacaacatcggggcgctggattttgccttcgccttgcaccgaggcctgaacctcaaaatgtacgtctttgacgaggccgctgcgctccagcaagcgttcaaggatatattcgccccatttgccgcggctggcggggttgtgcattgcgccggcgattttcgatgtttcggattgcaggtttttcagcgcgtcgcttaaggcggtatccgtgcctttgatttgttcgagtgaggcagcgagggtttcaagctgtttttgcatcggtttgaccatttcatcgatcgaggcgcggcgtttttcaaggtcgcccttgttttcaccgtcccattgcttgaaccgttcctgcgccagttttaaaaaatgttcggcgctggcggacagggcgtcttgcgacaaggccttgaattgattggtcatgtggtcgcgcgcctcttccagcgcctttttctgttccttgagggcgccatgcgcctccaaaagcgacaaatagtcgtcttccttatccttaagcgcagccttagcggcggcgaggtctttgtccaacccttccgccagcgccgatttgcgggcggcgcgcagcaaaggccaaaccagcgccgcgaaggtcaccaacgccccgagcgccaagccgaaaatcaaggacagcccgtcaaaaccggtctgaaaatcctgtggcatattggcctcctttgcccgcttaaattcttaatattttcatggtatactcaagaatagagaattttcgacgattatccaaggacaaagcacgatgaacaaaacggcagaaaagggcaatgcgctgttctatgttttgctcggcgtggtgctgttcgcggcgctatccttcatcatcactcgccaaacgggcaatgacggcttgaccgaacaactcgcggacgacaaagccgacattatcgccagccagatgatcaaccacacgacatcggtgaaatacgccatcgaacaaatgctggcgaatgggtcgacggttgaacagattgatttcgtgcgtccgggggaggccggctatgacacgcccccgcaccagcacaaggtgtttcatccgtcgggtggcggggtaaatacaatggcagtgaaacaagaatacggggtcgttggtagtgtgccgataggttggcggtaccaaaaagggcaaaatgtcgactggacgccgacaacgcaaacggatcttttgtactcttttgttgatttgaataaacagatatgtgaatcgattaataaaaaaatcaccggctctgaagccattcccagtcatactgttgatgtttctaatacgtttatatacggctcgactgatgatggatttacggcggcggaatgttcctcctgcaacggcaagtacagttattgcttttataatggcgcgcgccatattttttatcaggttttatttgggcgttaattatggattttgaccatctcagcggaagtcgccatcggtgtgtacggcaacgtagaaaaccctttgacgcgggcggatgtgcgggcaatgcgctgttctatgttttgctcggcgtcgtgctgttcgcggcgctgtcgttcatcatcacacggcaaacgggcaatgacggtttgaccgaacaactcgcggccgacaaggccgacattatcgccagtcaaatgatcaaccacgccacatcggtgaaatacgccgtcgaacaaatgctggcgaacgggtcaacgattgatcaaattgatttcgtccgtccgggggcggccggctatgatacgcccccgcaccagcataaaatttttcacccgtccggcggcggaatgaatacgatggtgatgaaacccgagcattaccactatgctggcggcacaacgggttggtatcatatgcagggtcgcaatgtcgaatggacgccgacgacccagactgacctgatgtatgttttcaccaacatcaaccacgtggtttgtgcggcgatcaataagaagatcactggttctgatgccattcccgcgatgacgacgaatgccaacagcatctttgtctacggcggtggtctgtccggcttgcgttggaaagccgtcctactgcgtgcttaacacgggggacaatccgacattctataccgttgtggcggcaaggtaagcaaagcgatggcaaggaatataaccaatgatcgttgattgcgtgccgagcggtaatgctgtgcgaagagaggccggaaatgccctgttctatgtgttgctcggcgttgtgctgttcgcggcgttgtctttcatcattacacggcaaacgggtaatgacggtttgaccgaacaactggcggacgacaaagccaatatcatcgccagccaaatgatcaaccacgccacatcggtgaaatacgccgtcgaacaaatgctggcgaacgggtcgacggtggaacagcttgatttcatccgtccgggggaggccggctatgacacgccgccgcaccagcataaggtttttcatccatccggcggcggggttaatgttatggcggtcaagcccgagcatatgtcatcgccgacaacgcattgggggtatcaaaaaggccgcaatgtcgaatggacgccgaccacccaaaccgacttgatgtacagtgtcatagatattaccgagccgatttgccgcagtatcaatacaaagctgtacggaaacatcgccatgccggcacagcttacaagctcctatggcgctgtgtttgaatatggcagtacggatgtcgattttacggcggcgatttgtgctgactgcgtgggcaagcatacggcttgcctcaagcacccttcgcttgaccgatatttgttttatacggttcttgtcgggcgttaactcacgctgagcaagagaatatcttgtaattcctcaatcccgtatttcttttcagaactggtgaggtgcacggtggggaagcccgccggatgttttttcagcacttcattggccgatttcatcactttttcaaggtcggcttttttgcatttatcggctttggtcatgatgacgcggtatggcacggcggactcatccagcattttcatcatctcgatatcgctggccttgaggccgtgccgcgcatccacgagcaaacaacataggcgcagcggcacccgcccgcgcaaataggccttgagcatcgccgtccacgcattaacctgcgaccgcgatactttcgcatagccgtaaccgggcatgtccacaaggataaacccaccagggccgatgttgaagaagttcaattcctgcgttcgcccgggggtgttggaggtgcgcgccagcgtacgccgccccgtgagggcgttaatcaggcttgattttccgacattcgatcgccccgcaaaggcaatctcggcaaggcttggcggcggtaattgttcaatcttggcgacgccgagcataaattcatgctggccttgataaactttacgctccgccgcatagcggtcggcatcataagtggagtgcaggaaggagccgccatcgcctccgccctcgcgctcattttcatcatccgtgtcgtcctcaaccggattggggccaagcggcggatgcgccggtccatagtcatcgtcctccccttcattgtcaaaagggttggtcgaggccttggtgaggggcgtgattgggtcgtttttgaggtttttttcattcatggcgcgaaaaatagcaaaaatcacttgaaagagcgacttaaaaattttaaaagcatagcactgcttacgacatcgcgttcgtgacggggctatagctcagctgggagagcgcttgcatggcatgcaagaggtcgtcggttcgatcccgattagctccaccattttcttatcctcatatatgaattttcttctttttgccatcggcgttccaaaggcaagaatcgtaattccatgcatatgtatgggcggacgggatgatcacagatcaataatcgaagctaagaataagcgcaaaaagcgagcagaactagccgcagaacccaccaaagaaaaagggagcccgaagactccctttaaattttgtgaaatcattcatgttaacatgctgaccacaattcttaattagccactaagaaatacaaaaaccattgtggattgtcaagataagatttatggttgtccgaaaataatctagcggaaggtaaaatcatcatggcttggcgtttgggattggacttaggaacaaattcaattgggtggtgcgtgcttgaattgggggcggattccttgccttgtaatttgctgggtgcaggggttcggattttctctgatgggcgcgagccggcggcaaaggggcggattggtgattctttggcggttgtgcggcgcggggcgcgcggaatgcgccgcaacagggatcgccgcatttcaagaaagaaaacattggcggattatttgatcggattgggagccctccagaaaaattcaccgcattgcccctatgaatgccgcgccaaggcggtttctggaacagtgacgaaggatgagctgggccgcgcattattccatctcgggcaacgccgcggctttctcagcaaccgcaaaaccgactctgacgaagaaaccgcgtttaaaagtaaaatttccgcactaagagctgttttggccgaaagaaaacaaacgcttggtcaatatttgttcgacagggagcaaaccggccaatcgttgcggtttcgcggcgacgaaggcgattattacccagaccgccggatgtataaggaagaatttgccctgattcgcgacaagcaagcggcctttttcacgccggagcaatgggacgcaatcgacaacatcattttccatcaaaggccacttaagcccgtagaaaaaggcaagtgtcaattctatcacgaccaagaccgcgcccatgccggacttccgattgcgcatacataccggattgcacaggaagtgaataatcttcgctggcttgatgaagggctcgctccgcacaggttggatgcagaacagcgccacgtcctttatactgtcctgcaccaacaaaaatcgctgagctggagcgcgatgcgttccaaattgaagcgggcggacggcacgccgctttttccgaaagcgagcaaatttaactttgaggatgccgataatcgccgcaccggcctgaaaggcaacgacacttatattgacttatcaggtttatttggcgcgctgtgggaaaaacttgaccaaacgcgtcaaaacgatttggttgaacttatgtatgacgccgcgaaagatgaggaagtggcgggttattgcaaatctatcgggttcacggatgagcaagcggcacaggcctgtaaatataaattgccaagcgcgacatacaaagtatcccgccattttatgcagcaaattattccaccgatgatggaagagggattgcgctatgacgaggcagtattgtcactggggcttcatcattcctatgatgaagatggcgaaatattcgaaaaattgccttattacggagccgttttgctgggcagcaccatcggtggcaatccatcggcgagtgaggatgaacccgaacgtaaatacggcaaaatcggcaatccgacggttcacgtggcactgaatcaaattcgccgtgtggtgaatgcgcttgtcgatcgctatggcttgcccgatcaaatccacttggaagtcgggcgcgaattaaagcaatcgcgcgatgaccgtgcagagatgagcaaaaaaatcgccaaaaacgaaaaagaaaacgaccgaatccgtgaaaaatgccgcaaactcggccttgctcatcccgcggcgatggatgtgaaaaaatataagctgtgggaggaactcggcacagaccgcctcagccgccaatgtccgttctcgggcgcgtctatttcggcggcgatgctgtttaacggggatgtggagattgagcatattttgccgttctcacaaaccaaggataacggcatgatgaacatgaccttggcgaccagacaggccaatcgcatcaagcgcaaccgatgcccgtatgatgcccgccatgatttcgccgcgcaaggatgggcttgggaggatattttggaacgcgccaaaaaattgcctcagaaaaagcgcgaccgtttcggcgaatccgcctcacaagaatggctggacacaactgcgtttttggatcgtcaggtcacggataattcctatatcgcaaaaattgcgcggcgctatctcggcaagctctgcggcggtaataatgttgtgtgtgtgtcgggtcagctcagcggcttgctgcgcggaaaatggcgtttgaacaatcttttgaacgaagaaggcaaaaaaatgcgtgacgatcaccggcatcacgccgttgatgccattgtcgtggggatgacgagccgcagcattatccaaggggtgaacaccaaccgcacggatgacgggcggattcattacgatgttccggccttgccgcaagggttgtatcagcaggcgcaagccttgttgaatacgatgatcatctcggtcaagcccgatcacggtaaaaacggtaaattcttcaatgacacggcctatggttttgtcggtgaagagcaacgtgatgcggatttgaaggattataatttggtggtgaggaaaccgattgattcgcttagcaacaaagaaatcaccaatattcgtgatccatatattcgtggccttgtgataaattatttttatcagcaaacaggcgagaatccgaaagacagcaaactggacgacaaaaaacgtgccgctttgttgcatgattttgggcataaggaatggccgcgtatctcaggccaagcccgcccgatgcgcagtatccgcattttggttgcaaaccagaaggttgagccaatcccaagcgctccatataaaggttatgccatccccaattttatttgctgcgatatttaccgcgttccgaagggcaaagcaggggcgtggaaaaagggtgaatataagtatgaaggtgttttttggtcgtatattgacattcaaaatggcgaaaaagacgataaaaaaccacaccccgccgcaaagttccttatgcgtctatacaaagacgatatggtcgttttggagcgtaatgggaagaaggatgttatgcgggtttatgggtatagcacgacaaataactgtttagatctgcgccctcaatatcaaacggatggaaaacagacttttgttggcatcaacactgttgcctccaccatgaaaaaaataaatctttccccagacggtaaagtggcgtaatatattcgcattatggttgcgaatattgttgaaattagtgaggcgaatagccatttatctctttatcgggggtttttaaaaatctccgataaagagcaagaaaaaggccgcgttccgcttgacgatattgtggcgctgatcctgtcggcgccggatgcgatgctcagtaaaatgattatcgcgactttggcggagcgcaacattcccgtcattatttgcgggcgcaattggcaccctttgtctttgactctcccggttcacagccaccacgaaacggcaggaatcttgtttgatcagatcgagatgagcgctgcccttcgaaagcggctttggcagtccttcgttcgcgaaaaaataaccaatcaggccaaaatcctttcgcgccattctgatgaggcggcggctagtcaaaaacttatggcgatggtcgggctggtgcgatccggcgatccggataaccgagaggcgcatgcggcgcaattatactggagtgcccttatggggcggggctttcggcgggataccggaaccaacgatcaaaatgctttgctcaattacggctacacaattttacgtgccgccacggctcgcgcggtgtgcgggactgggttgcatccggctttgggcattcatcaccgcaaccgaaaaaatccgttttgtttggttgatgatattatggaaccatttcgccccttggtcgatgctctggtcatccaaatatggcgggattgtcaaaacggctatgacggcttgacaccggacataaagcgccgccttgtcggcattttgctgcaagaccaagaaggcgagcgcggggcctcccccttaattaattgcatcgggcggctggctgtgagcgtgaaggaaagcatccagcaaggggaaaataagctcctcttccccaagctagcggatggcgggcgtttattgtgattcgagaccaagaaacatggctaagtgggtataggattttgtggatattagtgatgtttgatctgcctgttgcggacaaaaaagaccgaaaatcatacgcaaaatttcggcattttttgttggatcagggtttccagatggctcagttttcaatatattatcgccttgtgccgagcaaggaagcgggcgaaaaatatgtgaaagacatcaaagaaaatcttcccgaatatggaacggttcaggtcttgtcaatcaccgacaaacaatacgaaaacatacaaaccttcattggccggcgcaaaaaatccgcccaaaaacaggaacaactatggcttttttaacaaactccacccattttttcaaaagaaaatcccccatatcctgtttaaaaacaacgagatatgggggaggtattgtagctaattaagaattgcggtcaacctgcaactggggttttattcgcatgagtgagcaaagtattgtagctaattaagaattgcggtcaacctgcaaccgatgaaacgcttttgaccctcgaattgccattgtagctaattaagaattgcggtcaacctgcaacttccccatcgtggtgagcttcgagcgttggattgtagctaattaagaattgcggtcaacctgcaacaagcgttcgtttcgaaacgaaatggggcggattgtagctaattaagaattgcggtcaacctgcaaccgtaggtttcaagattgtcgggttgctcggattgtagctaattaagaattgcggtcaacctgcaacgccagaaatgctagtcttaaattttgaagaattgtagctaattaagaattgcggtcaacctgcaactcactgcggcaatggttggtcggcagatttattgtagctaattaagaattgcggtcaacctgcaactaaaaaaggctatgcttgggtagcagaagaattgtagctaattaagaattgcggtcaacctgcaacggatggtttcgcgcaccgccgcatcggtttattgtagctaattaagaattgcggtcaacctgcaaccggcgtgatggagtcggtgtaatgagttttattgtagctaattaagaattgcggtcaacctgcaactagccctgacacgtgtaataatacaattctattgtagctaattaagaattgcggtcaacctgcaactcatccagcagcagcactgcaacaaacacgattgtagctaattaagaattgcggtcaacctgcaacctacagaaacagcgctaaacaacatacaagattgtagctaattaagaattgcggtcaacctgcaacgtaccaaaatcgccgtccatcacagggtgtattgtagctaattaagaattgcggtcaacctgcaacgatttccgtatgatcctacaatattagtcgattgtagctaattaagaattgcggtcaacctgcaaccgtatccagccgtcacataacgcgccgcctattgtagctaattaagaattgcggtcaacctgcaactcaaaatatcacggattcaaggttgcgtccattgtagctaattaagaattgcggtcaacctgcaacagtaacagtataggacaaggtggaattcaaattgtagctaattaagaattgcggtcaacctgcaactccaaatatcacggattcaaggttgcgtccattgtagctaattaagaattgcggtcaacctgcaactataatctttgtcaattgctcaccgaaataattgtagctaattaagaattgcggtcaacctgcaaccctcggcatgaggtaggcctaaacttattcattgtagctaattaagaattgcggtcaacctgcaaccggagtagtggcttgcaaacggaacaacttattgtagctaattaagaattgcggtcaacctgcaacatcgcaattcacggcctacaaactgcatgaattgtagctaattaagaattgcggtcaacctgcaactgtatgcttttaggccgcccgaagctcggaattgtagctaattaagaattgcggtcaacctgcaactcggtttattcgtagcatttttgatttaccattgtagctaattaagaattgcggtcaacctgcaacagttgcggggcttgaccacattgagggtcaattgtagctaattaagaattgcggtcaacctgcaactacgctaatgcccgtgctgagatgtgggatattgtagctaattaagaattgcggtcaacctgcaacataagacgggggcggatggcaagcctgtttattgtagctaattaagaattgcggtcaacctgcaaccccgatcatatcatgcagtacaccagtgccattgtagctaattaagaattgcggtcaacctgcaacacgaaaaatacatcacgtttcgcaaaggggattgtagctaattaagaattgcggtcaacctgcaacccaattagggatttattggcgcagtaaattattgtagctaattaagaattgcggtcaacctgcaactgtttccgctttcgtgcgccaaagcaccaaattgtagctaattaagaattgcggtcaacctgcaacgtcaagacaagtgattatcaatgaaggttgattgtagctaattaagaattgcggtcaacctgcaacagccaatcatttgaggcgtggcatgttcaaattgtagctaattaagaattgcggtcaacctgcaactaattatttctgtctttccagaaattagcgattgtagctaattaagaattgcggtcaacctgcaacctgctacttcttcgtcaccgtctttcgctgattgtagctaattaagaattgcggtcaacctgcaacccttctaatatctcactggttcgagagtggattgtagctaattaagaattgcggtcaacctgcaacgccatacaatctaccgttgtagagcctcccattgtagctaattaagaattgcggtcaacctgcaaccctcatgctcctcacgtgtcacaaaccgatattgtagctaattaagaattgcggtcaacctgcaacgagggatttaatggcatcgcaaaccgactgattgtagctaattaagaattgcggtcaacctgcaacctaacagggggacgccacctacgcggagtactggtgccaaatccaaatttttgtcaaccaaccgacggcggggttttgaaaaaatcggtgatatcggtttttagggcgcgggcgattttgtcgaggactcggatggatatgtttttacggccgttttcgatttcggataggtagctgcggtcgatctcggcggcgccggcgaggtcttcttgcgtcatatgcgcttgtctgcggagcatgacgatagcttcgccaatatctttttccagtttactgtcggcggtattcgcctgtgtggggtcgtcttttttacttgtcatactctgataatgttggtaatagcctacaaacgccgtaggcaattgccaacacggtcttcttttgcaaaaggcctcaatgatactctatcgcaaaaaattcatagcatttgttttggctgtggcggtggctgtgttgttgatcggtgtttttgtggcggcgggtatggcgggcgtgccgagggtcatgtcttgtgtccggcttggggcattgtgcgactcctttgggttttatgcctatttatcgggggttgggatgtggtgatcggcggtgcgggagcctcctttcgcatctgcctttcgtacctgccgcggcatccgtatgtgttttcctgttggtcggggggcggaacgggcgtataatcgccttgcgtaaccactatggattgccgtgtatgtcccctgatctgcctgtatccggccagcctcaatttgcaggggtcgggtattattactcacaaacatctgacttcacatgcgggccggcgagcctgatcatggcgatgcagttttgccgcccgtctttaaaccccagtcgcgagatggagtatcaaatctggcgcgaaagcaacaccgtgttcatggggcgcggtcatgcggggtgcaatccgtatggcttggcggtcgcggcggcgcggcgcggctttgatgtgaagctgtatatccacaagcgcggcgggttgtttgacggatggacgcaagaccctgaacagcaaatgattatgcaaacagtgcaagagcttgaccgcgctttggccaccaatatggggatcgagattatctccgacgccacaacggtcaaaaacgcttggtatgacgatgttttgaacgcgccggatgtggaggacagcgaaacagcgtgggtgattttaacccgtgaacgcaatttgcggcactggattgtggtgaccgatttatcggtggaggaggttgtctattacgacccatggctagaccgcccataccgccagacaggccgcattgaaatggggcgcacgacgctcgagaaattttcgcgcaaggcggaaatcggaatggataaggcgctggcggtgattcaggtgtctttcccgcgagagcaagcgcaaatccagcttaaaaaccgctatttccaaagccatatgattccgaaaattcgcccgtccgtggacttgctccgccgcaatgacgtgttgaaatcggttaagatggggcggcggttttcggacattgccgaagatttgctggcggggccgcgcagcttgctcaaggcgatgaacacccacgaccacaccgtgccgcaagacgcgctctcggcactatatgtgtggcgcgaaagcaacatgatttttgcacggtcgtctttgccggtctgcgggccttatggccttgcggtcacggcgcggcatcacgggtttgatgtgcgtgtcttggcgcataatgtcgagagcatcctcgccccgacccagcgcctcggccttgtgaagcgccgcattcaaacaacgatggatcattacgaccggtttttggcgctgtatcacggtgtccagatcaaggagcaattcttcggcatagaggatttaatgcgccatttgcgggcgggctatgtgattgtgcttttggtcagtacgggcgcgtacgggcattgggtgtgtcttgttggcttggatggcaagggcaaggatgtgaaggtcaaagtctttgacccatgggcggaggccgccgaagttactatggttgaggtttccaaagttgagcgttggctgagtgcgccgcgcggcaagaaaaatgaaaatccccgcgccgccgtcatgatcggcaagcgcggccatatggatgcagaggccgcgcgggacggggctgttggcgtgttgtcggacatgccggacggctttacggcacgcccgcattcggcgaagggacgcgtatcatgactcaaacttcgtttattcttcgtccggcgcaagcggcggatatagcaaatttgcaacggattgaagatgacagtttcacaacggcagaatatcgcgatcaaaaattgtcgcgtgcctccatgcggcgtttgatccgcacggaaacagccgagtttatcgttgcggaacggacggaacgaaccgcaaagaattcagcagattttgccacaaatcagcctcttttgggctatatcctcgttttctatcggcgggggagccgcaaggcgcggatttactcgcttgctgttcatccgcaggcccaaggaatgggggtcggcaaaggcttgatggaggcttgttacatgcgcgcgttaaataaaaattgcgattccgtaattttggaagtagcgtcagagaatactaggcttatcaagctttacgaggggcaaggatttaaaaaaattgccgagttgcccgattattacggcgaaggtctaagcggcataaaaatgtctcgcgcgctgaacacaccgccttgagagttttccgacagtatgacgtgcctgatatcgtatcaataaatcatatgaattttaccaaggtatgacaccatgaaagcaaaatgccttattatcacagacgaaccggacgtcattaaaatcgagggtaattccgaccgtgtccaaattcttgcccccgaagactatatcgaccgcaaacaaatcgccggacttggccgcttgcgcgactcgcggatcatcaatttatgcagtgattatgattatctgagcatggggtattattgctccttgctcgccgaggcgcgcgggcatcggtgcattccgtcggttaataagatgattgacctgaactggaaacgcctcacgcaatccgcgattcctgagttgaacgccattttgacgaaatattacaagcccaccgaaaccgatgaaatcgggcgtacgtttttgatttatttcgggcgctgtgaacgtgcggatttggagcctttggcgcggcgcttgtttgacttgttccggatgccgctgctgtcgtgccagatcaagctggccgacaaaggatgggtgattaaagagatcgagccgttggctctgtccgacttgccggtcgaaaaacatgccgtgtttaacaaatttttgtcccaatatatggggcgggcatggatcacgccaaagcaaaccgcaacgccgaaattctggctcgccgttttggtgaatcctgaggaaaaaatgccgccgtctgataagggcgctttggatatgctgattaaagtcggcaaaaaaatgaacattacggttgaactgattaccaaagacgacatggcaaccttgatggaatatgacgcgctatatattcgcgaaacaacggcgattgatcaccacacataccgttttgctcataaggccgagcaagagggaattccctgcgttgatgatacgcaatccatcattcgatgcacgaataaggtgtttttggccgaaattcttgataaatcagaccttaaaacgccgaaaacaacgataatcgacaaaaaactggccaaggccatcgaaaaaacactcgaatttccggttattatcaagattccggacggctctttctctcgcggcgttgttaaggcgtctaatttggcggaatatcgtgaaaaaacatcaaaaatgtttgctgattccgatattttgttggttcaggattacgtcccgtccgattttgattggcggatcggggttttggacggccagccgctctttgcctgtaaatatttcatggcacgtggtcattggcagatttacaaccacgacaacaaaaagaaaaaggccgaaaccggcgggtttgaaaccttcccgattgaaaaagctccaaaggccgttgttgatgcggcgctccaagcttgtgctttgatcggcaacggcctgtacggcgttgacttaaaagaacgcgatgacggtatttacattatcgaagtcaacgacaaccccagtattgaccgcggcgttgaggataaatatttgggtgaggagctgtatgtccgcttgctcaattatttccaaaaactcattgacgaaggctataaaggcaacggaacggagtatgtcacgcgtgacgaaaaatccgcccatgaccgcgcgaaaattgcggccgcttagggcggcagaacggcagaatacagatttttcaaagagccgcttgttgcggctcttttttataggggggttatgccttggcggccattttcgcggtgattttgaaatacagccaataaggtaggctttgcaggactttcatcagatagacaaaacgccgcgggaaaataatctcgaaatgcgatccgtgaagccccttggcaattgcgatggcggctttttccggtgtgataatcatcggcatgtcaaagctgttcttgtccgtcattggggtgctgacaaagccgggattgattaatttgatatcaatttcggcgcggtttttgtttgccttcgaccggcggcaccatcctttggggcccagctcggcgcgcaaggattgggcgagattgatgatggcggctttggtcgcgctgtagggctgcgcgttcggaaggccgcaatagcccgcgacgctggcgcacaggacgatctggcctttaccttgttccttaaaaatcggcaaacaggcgttgatggtgttgaacgcgcccattaaattgacgtcaagaatcgcggcagtttttgtgaggtcgagtgcgtccagcggcatcggctcatattgcgcggccaagacaatgacgctgtccaaatgtccgtatcgtttatggatcatggcagcgcttttggcgaggcttgcggcatcacgtatgtcggcggggacactcatatgcggggtttcgacatggcctgataattggtgcagcaattggtcaagtttgtcgctgctgcgcgcggacagggcaaggcaagcgccttcatcgtgcaagcgttgggctaaggcataaccgataccggtgcttgcgccgataatccagatggttttgcctttggcggttggttcactcatgaggggcattcttttccatataatgtgtctttgttatgcgtcaaacgctgagcggcgtccataagttcccccgagggggcgcgtattatggggcgcaccttgtgtcgagcagttaaacaggagttctacaccggagtttactggggagttttactttgggctaatacggggactattgtttttgcataaaaactgttaactccgccacggtaaacccgaatttcttgatataggatcggttgatcaaaacaccgtcattcatcatccacatccagtcatcgagtttaacacgatacgtcgtgccgtccaccggaatatccattgtataggcaaaacggaaggcgttgccgcgttgttcgccaagcgcttgtccgataatgtcgccggcggtgccgataatttctgattcccctgacttcgtcaatgtccaaacgcggttttgaacggtgccgtcatagtaacgaaactcttcttccaaaacgcccgtgtcgccatcccatcgtccaaccatatcgacgtcaaaacgcgtcacaacaacgcctttgcggttttggacgagtccccaagccttgattggcccgtcaaagaaactggcgatattcatggcgggttgttggccctcatagggggcaagcgcgtttttgctactgcatccgttcaacatcagaagcgcccccatgcacgttaggagtgtgaagagatttttcatcggaatg

SEQ ID NO: 1693 - DNA, 23147 bp, synthetic construct
  misc_feature 1..23147: note = Synthetic
  source 1..23147: mol_type = other DNA
gtcacggaatcggagatgtcccccatcttctcgtcgatatacgacgccggacccgacgcgctggtgttctccagcgacgtctcggtgtacaaccagctcgagtgggaaggcttcaaggtaccctgcgacatgcgtcccgagatctggggcgagggcatcgccggaggcggggcgaagtccgcctaccgcgagatcgtcgacgtcctccagggctcgacctcgctgaaggagagcaccgcggactggggatgggagctgttcctcgtcagagacgaggaggccgataccctgcgatccggcgggcgcttcgatgtgctcgcgcacggcggcggctacaccctgttcgaactgtcggaaggcggtgaatagcgtggaccgcacggacaccatgcgccgcgcctgcatcctgcgatgggcgtcgctctcggcctcgctcgccgcctgcgcggcggcgctggcggcggtatcgcttaccggctggtcgctgttccaatccgatacgcgatacatggtcgccatcggccggtggatcgtcgagaccggcgagctcccgacgaccgatccgctgacgctgcacgacgggcttgcctacacctgccagcagtggcccctgtgcagcgccgccgcggccatcttcgacgcgttcggcgaggccgggatcaagtgcgcggccgccgcgctcgacatggccgcggcggcgaccctctgggcctgcaccctcgagcgcggcaggaccggcgccgtccacatggcggcatcggccgcatgcggcgccgccatagccgtgctgtgcaactcgacgccgcgcggcatcgacgtgatggccctgtgcatctgctatgcggcgggcaggaagtgggcgcgcggcgggcgggactccctgctggcggccttccccgccgcagggttcgccatggcccagctccacggggcgctgtggaccgtcgccctcatggtcccgtgctgcctcatactcgacggcaggctcgacaggcacggcaggctcaaggcgctcacggcggccatgtcgaccttggccgcatgcatgctcaacccctacggcgcgaggctgctcatggtgccgttcgccaccatgagcgcggaatcgctgagatccgtgggcatcggagagctcgcgccgtggaccgaggcggcgcccgcccaggcggccgccgcgtgcaccctcgcggcggcgctgctcctgtaccgcatccgtgtgcgccgccgcggcgggggccgggcacttctcgaggccggtgacctgctcgtgctcggcacgctcatgctcgcgctggccaacgtgagaaacgagctcttcctgatgacctccatggcgctcgccttgtccgatatccagggagaggtggcgggcccgcgtgtccgcagccccatcgcgccggcggcatgctgcacggcggtgctcctggcctcgctcgggctcctcgccgcgaccgtgccgaggcagacgcccatcgaggcatcggccgcaagggccatggccgcgctcgagtcatccggcgccgaaccgggcgatgccgtgatctgcgatatcgacgtcggcagcgagctggagctcgcgggataccgaccgctgctcgacacgcgcgccgagctctactgccccgagctcaacgggagcacggacgcctgggggacagcacgacacgtgctggcgggcgacgaggacgccatcgagggaaccggcgccgatttcgcggtcgtcccctcgggggcatacccggcgctcgagaaggcgctcaccgggctcgggttctcccgggcgcacgacgacgggtgcctcgcggtatatgccggcaaatcggttccatagagtctgcatattttcgacagggccgcgagcggggaaaacagccgatcccgcccatttttgggaaaccggctgaccgttctggccgcaaggcccatagttcggccgtaccgcccccgcgtgcgggggaacaccggcggtgcggatgcgccgccatcgagagaaagaggttcccatgaacgagctcatcgccaagccgatggccgtcgccacctgcggcgccttcaacatgaagcgccgcgcccaggaggccctgtccgcacagggctccatcgagtgggtcgtcatcgtcgtgtgcatcgccgtcgcgctgatcgccgcgctgatctacctgtccaaccagatgaacatcaagatcaacacggtctcgaacacccttgccggcaccaatgtcggcggcgccaccacgaccccgggcacgcactagcgcttcccggagccatctccccgggggcgcgacgcccccgggccctctcgatttccccgcgcccacgtggcgcgttttccagatatccaacccgcccgcgacggaagggagccgtatgctcggaacattttccatagccgcaggcagcgcggcagccggatggctgctccagcactgctaccagcacatgcgctattccttctacgagcgcgaggacgcggccatgctcgcaccgggcgcggaccccgagcagcgccgcatctggctctcctccatcgcgccgcaaatcagcattcaggcggtcgcgccttccacgatcgccgcgctcaccgcgtccggcgacatcgacgccggactgctccccggccgcgctgccggggcctacgcccgccgctacaacccgacgctcgccggagaggcctattggctcccggtgtacctggccgccgggctcgccggcgcggcgatgtcgcccgcggcagccctcgcggcggtcagctcgctcgccatcgccgcgagcgacatacgcttccgcatcgtgccgatcccccacctcgcggtcctcgccgcatcctgcatcttcgcgttctgcccgaccccgtccggcgccgcaatcacgacggccggcatggccctcacctgggccgtcggcgccgtcgtgcggcgcatcggcggggaatggggcgacggcgactccctcatgctcggctgcgtgctcggcgccaccgccgcgacgccgaccgtgctgacggttgttccggcactcgccgccgcggccctgctcttcatcgcctgctcgcgccgtatcggtgtcgagaccagcgccatgccgctcgccccggtcatctcgctcgccctgatcgcctcactggccacgggggcgctctcatgaccgccgcgagggcgcgcggacgccgcggacagggaaccttggagttcatcctggtcctgcctcttctcatcatcatgctcgccgccgtcgcggactacgcgcacctcgcgcgcgagacggcgatcgtgcagaccgcgagctcggagggagcgcgctacgccgcggccaaccccaccgcgtccgacgacgccgtcgccgcctacgtccgcgaggcatgcggcctcggcgatactgcgagcgtcaccgtcacctcgaccgatgagccgtcaaaacccgtcacgctcaagagcggcgacaagtcggtctccgcgcgctactcgcgcgagaaggtcaccgtcaaggtcatcaaggacgtcccgtgcatcttcccgctcaagtcgctcggcgtctcaggcgccaccgatgccggctggcaggtccactctgagatgtcttccatcaggtcagagatcgggaggtcctgacatgccgatactctctgcgcgccgcgccacttgccgccttgctgggcaggggtcggtcgagttcatccttgtcatgcccgtcctgctggcatttctcttcgcgatcgggtccttcgcgatgctctcctatcagaacaccgtcatccagcactcgctggcgacgctagccgactcgcttcccgccggatggcaggagcgggaccgcaacgagctcgtccgcgacctcgtctgctccggcaccgacctcgagagggataggctcaccgtcaccaacgccaaggtgaagaccaccacctccggcgtcgtcaacgacggcgactcgatcgccagtgagctgggggcctcgaccctcaggaccgagacgcgccgcgtcaccgtcgaggccgacgtcgcctacgagtacaacgaccctctctcgctcggccgcaagacggtcctcacgcgacacgtgtcgcacagctacacgacctacaccgattgggaggtgctgtgatggcatccagaaaaccccgccgcgcctcgggcctttccggccaggtcgcagtcgtattcatcgtcgccctcgcctgcctgctcatcgcggtcggcctcggcatcgacgcaagcaccgcctattcggccaaaacaggccaggaggccgtgctcgaggccgtccgccagtcctcgctggggatggcgaacgccgtcaagtactccgagaaccccggccgcgaggcgcgcgacgaggtcgtcgagctgctttccgacaacggctactccggcaccgccgagatctggtacgcagagctgcccgaatcggaatccggcgccagcgaccgctatgcgggcgtctacgtgatgctcgccaacgacaccccgaccaccttcctcaagctcgcgggccgcgacaagctgaccgccaagtcgaccgcgatctggaccatccacccctactcgactggaaccgtctaccgtccggctaacgcaggcatcggcagcctcgaggcgacgttcgagggcggagccgtgacgggccgcaaggaaacggcatccaggcttgagagcgccccggacgacctcgtcaaggcgatccgggacgagtccaaggcaaagggcgggtccgggaccgaggaaagcggaaactgaggcggccggcggccgtccgctcaagaaaggatacacaaggacatgaacgataaccgagacgagattcagcggctccgcgccatgagggccgaggccgtcagccgcaacgacttcgcgcgcgccgacgcgatcggcgcggacctcgcgcgactcgagggcgcccagcccgcaggcggcgcggtcgaccccatcaccgggctccccgtcggcggagcaccggcgccctcgcgcccggcctatgaggagcagcacgcgccggcgccgcgcccggccgcgccggcgcccgagccggccgagcgccgccatgccgagcccgaggcacgcggccacgaggcccagtaccgcgccacggagcagggccgcccggcctacggcgtcgacagccgccccgatcgcgaagtgccccacggcggccagcgcgacgaaccccagcccaagccggcggcgcgcgaggagaaacgcctcccccgcttcggcaagaccggggacgggaaggcggacaaggcgcccgagagccgccccgcgagcccggcgccgcgccgcgcggcgccgaagacggcgcccgcgggccccaccaagggctcccgcgtcctgaccgcagtggccgctgcggcaatcgccgtctccgtaggcgcgaccgccttctccggcatgcgcctcgccgagtcatcggcgatcatcgccaagaacgagaccgattccgtcaacgtcgtcgtgaccacccgcgacgtcgccgccggcgagaccatcagcgagtcagacctcgagacccagtccgtccccaaggcctactgcccgaccgacgcggccacgaaggtctcggacgtcgccgggcatacctccatcacgacccagaccgcgggcacgtccatctcgctctcctccatccaggcgtcggcctcgccggcgcacatcacgtcggcaatcgaggacggccacgtcgccatcgccctgtcgctcgactcctcccacggcctctcgccgctgctggccgtcggcgaccgcgtcaacgtgctagcggccgtgtccgacggcacgacctcgagcactgagaccatctgcggcgacgtcagggtcatcgcgctcgattccgcgctcacgggcacgcccgaggcgggctactcgctcgtgacgctcgacgtcacccccgagcaggccgccgcaatcgtcgccaacccgaacgtgacgctcacggccgtgccgcatgccgtcgaggaggccgacgatgctcagtagggacctgcttccgctcgagcgcgcggtctaccgcgccgcgcgcgaacagctctcatccgacaaccaggccgagcagacgggcatcgacgccgagcagcgagaccacgccgcggcggccgtcatcggccccatcatcgacgacccggccctctacgggctcataccagagcgccattccgaccagtcggggcgcatctacgacgacgcctaccaggacgtgctgcgcgcggtcatcaacgacctgtactatttcggaccgctcgaggacctgctctacgacgaatccctctccgagatcatggtcaacgcccccgacgccgtctggatcgagcgcgacggacgcctctggctcaccgacgtgtgtttcgaggacgacgaccatgtgaagttcatcatcgaccgcatcgccgccggcatgaaccgccgctgcgacgaggcctcgccgctgtgcgactgcaccatcgtgcgccccggcaccccgttcaacggctcccgcgtcaacgcgtcgctcaagggcgtcgccgtggaccacaacatcatcaccatccgaaagttccgcaaggacgccctgacgcccgaggccctgatggccaacggctcgttcgaccgccgcatgctcgagatcatgcgcgccatcgtcgagggccgcatgtccacgatcgtcgccggcggcaccggctcgggcaagacgacgctgctcaacgccatctcgctctacatcccgcacgaggaacgcatcatcaccatcgaggacacccccgagctgcgcctgaaccagccgcacgtcatccgcatggagacgcgcgacgccaacgtggagggcaagggcctgatcacctaccgcgacctcgtgaccaacgcgctgcgccagcgccccgaccgcatcatcgtcggcgagtgccgcgatgcggcggccttcgacatgctccaggccatgaccaccggccacgacggctcgctcaccactatccatgcggacaactgccgcgaggtgcccgtgcgccttcgcacgctcgtccagcaggccaacaccggcatgtcctcgcgtgagatccttgagtacatcagccaggccatcgacttcatcatctacaccgagcgctcccacggcgtgcgccgcgtgaccgagatcgccgaggtccagggcatgcagggcgacgtcgtgacgatcgcgccgatcgtgcgcttcgagcacgaccccaacgaccccgagcactccggctggttcgtcccgaccggcgagcgcttcatgcgccgccatatcgagaagatggccaacgagggcgtctacgtgaacgacgactggttcaacccgcaggcggtgttctgatatgggcgtatcgaccatcaatcccgtgaacctgctgcccgccgtgccgggcatcgtgctcggcatcgccatgctcgtgatcgcccgcggcgagcgcatcgcacgcgagcgcgccggcgtcgagaccgccgaggagcggccggcgggcaaaatctcggcggccatcacggccgtctgcgagcaggcgtcccctcagctgtcggtgcaggaggcgaagatcgtgtgggtcgccacggcgaccctgccggccctcgtcgccctcacgctcggcctcggcgcgatatcgctcgtcctgctccccttgggcgcggtcggcttcccgatctacctcaaggtgcgccgcgactcgggcatgaagaagttcgaggagcagctgggccaggccatgccgctgatcgcgtcgaacctgcgcgcgggctcgtcggtcgcccaggcgatcgggcccgtcgccgagaacatgagcgaccccatcaagtccgagttcagacgcctcacctcggacatccgcgcgggcacgccggtccccgaggcgttggacaaggtcgccgaccgcaccggcagccgcgacctgcgcctcttctccacggccgtcgacatctcgcagcagacgggaggttcgctggccgacatcaccgagaacgtcggccagaccgtccgcgcgcgcgtcgaggcccgcaagaccatccgctccaagacctcgctgaaccgcatcgagtcgcagatcatggtcggcttgcccatcttcatgatggtcgcgctcctcacgatctcgccggctcaccgcgagttctacagccagccctccggctgggcgctcatcgcgctggcggtcgtgctggactcactggcctacatcatgatgaggaagatgggcgacatcaagctcgactaggcgcccgatagattggaagtaccgtgaacatcgaaatgctgcgctgcatcgcgctctccgcatgcgccgccaccgtcgccgggctgctctcgtatctggcccttcggcgcctcggcggcatcgagtccggccccatccgccggccgcacatggcccagcacggcgagaaccgcctggactcgctcacctacagcgtcacccgctgcgtgccgatgagcgagaaggtcgccgacgcgacgcgcgacatgctctcgcgctcgggcgtcaccatgcccgccgcgtcgttctgggccatccgcgttgcgtcgctgtccgctggaatcgccgccggactggtcgccctgccgctcatcggcggcgtccagggaatcgccgcggcggcggcctgcgccgtcgcggggctcgccgcgccgcaggcgtggctgctcgcccgccgcgccgagtggcgcgacgagctcgaccgccagcttcccgacgcgctcgacctcatggccatctgcatctcggccggatcgtcgttcgagggggcgctggcagccgtcggcacgcgcatggacggcgcgatcgccgcggccttcgcccgcgtggccaaggaggccgcctactcgagccgttccgaggccctgctgggactggcggagcacgcgcaggtgaactcgatcaccttcttcgcggcgtcgctcgtgcaggcggagcgcgccgggtcgtcgctggtcgacatcatccgcatgcaggcgcagtccgtacgcaccgagcgccgcctgaaggtcgacgacatcaccaacaagctgtccaccaagatgctcttccccatgctgctgctcatgctgccctcgatcatcatgctcatgctcgcgccgatgatcctgcagctgggcgagttcttctaggagtgaccggatatgaacgatagatatctcgacgaggcctgggccgtcacgctctccggcaagagggccccgatcctcacccatacctgccgcagttttctcgagcgcttctgcggcctcatgctcaagcgcgaggtccccgaggcctgcggactgtacttcccgaactgccgctccatccacacctgcatgatgcgcgtgccaatcgacgtcgtgtgggttcgcgaggacgagtccggcctgctcgaggtcgtgtcgctcgatatcgccctcaagccctggcgattcttcgtggcgccgcgcggcgccaccggatgcgtcgagttccgggccgagtccttcgacccggacgaccggccggccaagatcgcccgcccggaacaaaggaaataggcgataccgtccgaaattggccatggtaacgaccgacgaattaaacgaaccaggcaatagggccccagccatttggccggggccctatttttggcgattatggccaagcacggaatcggcttgaaaacccagaagcgcttttaggaggcgttatatcacgatgactgggtttcctttccggttgcccgctaattatctgtgaagtagtctttcgaccagggtgtccggtcgcatgccaaatattgccggcggtttctgcttgcggctatcgaacgcgatggctggcttttggagatcgcgcccggtctaccttcgcgttttccatggtcggcggcatggagggaccccatccgtcccgtagacccgccggatgtgggaaacgcgtcgcggctgtgcatggcgggtaatcgactggaagcggtgcgggccgttttttgtgggtgtgagctcggggtatccggggtaaaaggtctggaaatgcgcgggaggaaggagaccgcgcgcggatagattggataccgcaatggataaagccccgggtacggatatcggggagctcgggttcgaccccgacaccttcgccaccgcgctcatgacgtccgaggagttcaggtcgaaggacagggtaatctgggcgggcatcgatatcggcgtggccagcaccggcctgtgcctcgtcgatatcctcaaccatgagatcgtcctgatggccagccacctcttcaagtcgcccgtcgtcgacaagaagaaggcgaacgcggcgcccgagagcctggcgtcggtgaggcgcggggcccgctcggtccgcaggaacatcatgcgcgaggggcggcgcaagaaggccatcagggctgttttagccgattccgacctcattcccgccgatgctgacggcgagtggttcgctgcgcgtcgcgacgagcgcacggtcgtcaagctgaggtccaaggctctcggacatccgttgagctcccgtgagctcgcccgcgttctgtactcgttcgcgagccatcgcgggtatatcgactacggcaagtccgataaagaggacgatgccggcaaggtcaagaaggcacttgccgcgaaccatgcggcgctcgccgacggaggctgcaagaccttcgggcaataccttgccggacagcctcgctcgcgcaacagggccggcgactacagctatacgacagacatcggcatgacgatcgacgaggttcgcacgatcttcgcacgccagcgcgagctgggcagcgagatcgccaccgaagctctcgaagagcgctatatcgctgagctgacatggctcactgacacgagcaagcgcgacatgtcgacctatctcaaggtgggcttctgtacctatcgcggtgcgccgtacaggcgtggggccacgtccacgatctcgttcgagatggtgcgcgcccaccagacgctctgcaacacggtcatcctgcactccgacggcacctcatccaccatcccgggaaacacccgaatcgagatcgtgagggagctcttcgccgtgaagaagtcggtgaagccgctgaaatggtcagggctgcgccgcaggctggggctcgccgagggcgattcgttcaaagggcgtcccctcgaggaggagaagcgcgactgcatcgccctgccggcctgggccgtgctgtgctcggggctctatgagggccatcgcgacctgctcgagcggctgcatgaccatatcgacgacgccgacgcggtctgctcggcgctcaccttcgcatcgtcggcggcatctctcgccggacggctcgccccgctggccctcaccgatgacgaggtcgaggccatcatcgacctaccctgttcggcgcgcctgttctcgggctatgcgagcgcgagcctggaagccctccagatgctccgtggcacgttcgaggacccctgtgtcacatcgctcagtcaggccgaggaggattccggcctcgcgcagatgcgcgccatactcgccgaggagcacggggagacggcggatgggctgctgtgcgccttctccgattgggacccgacgtgcaagaaccccgtcgtgctccgcgcgacggcgcaggtgcggcgcatggtcaactccgccatcaggcactatgggctgccggatgtcatccgcgtcgaggtcgcccgcgacctcaagcgctccaagcacgagcgccagatcgtggcggagagcaacagggcgaggcttaaactcaacgagcaggccaagagggatatcgtcgagttcctggggcttcccgacgaccactacgttcgcgggcgggaccttgacatggtcaagctctaccgcgagcagggcggcaaggacccgtatacgggctccggcatcgacttcaggcgcatgctcgaggaacacggatatgccgagatcgaccatatcctgccgatctcgcgtacctgtgacaactcgcaggccaacaaggtactctgcctcaccaagtcgaacagggataagtcgaaccgctctccctacgagtggatgacctctggtgaggcttcagcgcctgattggaacgtgttctgcggcaggatggagcgttgggcgaagatgtgcgagcccaggcggtacgcccgaaagaaactcgccaaccttacctgcgagaatcttgccgaacgcgccggtaatttcattgaccgcaacctcaacgatactcgctacatgtctgtagcgcttgccaaatggctgagggagtgcctgccttttgccagggacgggcatgagcatgtgttctgcgtcgccggtggcgcgaccgcccttatgcgcaacgtctggggcatcggcatcaccggtccggacggcaagaagaaccgcgacgacgaccggcaccatgcggtcgatgcggcggtcatcgcctgctgcgattccagcatcgtgaagaacgtggcgctggtcaacgagggtcatgctcgcgccgacgtgcgccagcggctcttccgcgactcgctgccctatccggagttcaaggagcaggtcgacgcctggatcccgtgcatcgtgccgacgctcacgctcccgagcaccgttacaggcagcgtgctcaaggacacggtctatccctatcttggacgcgatgaggccggtaaggacctctatctcaccgtcaagagggacaaggacggcaggattgtcgaaaggaaggtaaacaaggccaccacgatgtggaaagacggccacggcggctgtcggaaatatgatgagatgtgcgcccttgatgccgtgttcgacgcctcggccggcaagcgaggcaggtgggcattcgacccggtctactgcatcgacatcccgcaccgcgacgccgagaggcgaaccatgagggcgttttcgaaggagaaggctatcgatttgtgggataccgtcgaggtttccgaggatgcgccacgcatgacgatccggcgcggagacgtgctcgtgtgcgacgggaaggccgctaggtttcattcgtacaatgtctcgaatggagccattttcacgttttcgaaccaaagttataacccgaagcaacttcaatttaccggtccgctatctaatgagcgctttccgacccagtcgaaatggcgacctgatatccttattatgcaggaggactgccttgggctctgctggctgtctttcttggcgcagcgagccgcaaccatgcagatgaaatagctatagctaggggaggtttcggcctcccctcttttctcggtcagaactccaggaagagctggcccatgcaatccatctcggttcgtttttgcgggcgcgtctcgaccaggatctcgcggtcgatatactgcttctccgtcagctctatggccacgacgctgcccgcgggcgggatatggtcgcgcaggcggtccctgtgggccaccgcggacgacctcgacagcaggctcctggtgtatatgctgttctgctcgcgcatgtagccgtcatcctcgaggaacctcttgaacctgatatagcggtccttgtcgcgcttcgtcttcgtcggcaagtcgaacataacgagcaggcgcatgatcctcatatccttcccctcgccctcatcctgtccactgtctccatctcgagcccgatgagctcgggcgtcagcagcatgtcggcatccctcagctcgatagcgcgcctcatggactcacagaagacgtctatcgccacctgaatcgggcattccctgccgtctatgcgcatgagcaccgaggtcaccgccgtcaatttcgccttgtcggccggcgtcagcgggccaagtatgttctcggtgaccaccaggaggtccactgccgcgcggaagggctctatcatgtcatcgaccaggttgaaggcgttgtcggcgctgtggtggtggatgccgcgggagacgagccagccgtgcgataccgcgcactgtgcgatacccgccctcacgacggcatatccgtagtcgagcggggcggccatcggaccctccctcctcgttccatacgggagcatcgcggcgaagtagtcggcagccgcaggcgcctccctgtgcgtcctgtcgtcgctgtgcacatcggcggcgtagccacggaccttcgccacggcggcggcatccccgccggcaagctcgagggccctggcctggttcagaatctttgagactacgatcctcttccacagctggttgcgcagcggtgtcgggatggcaagctggggctccacgatcgcggcgtggcgcgagttggcaccgaggggcaggcacaggccgttcggcatatggtccctcccgcagtacatcacgcctatccccgcgtcgttcatctcggaaaccagggcggacgtcatagttatctgcgggctgtcgatgatcaccacccagatatcggataacgggatctcggccagaacggctccgccgtgcgattcggaatccttctcgcggataaccagcctgttatccctcaggctcaggtgcttggggttgcgtatcgtgaccgtctgcctcataagcggtccaatctgttgaaaatatgacaggagggccgtccgttctcccactaagtctatcgggtatcatgagtatcggcaacgttaccctacgtctccatatcagcttgaggaatggcaacgagtaacgtttgggcaagagggcccgtcagagacgggtcactcgcggagtatatcccgcagggtgtttttgcgccctgcgggtgatctcctttcttctcccctttttcagaaaaacgcgccgaagtgacgcgaaaatgatcgattttcgactcttttctcaatttgaaaacagaaagcccccagctaaggggctttttcgtgggtggataattgtatcagcttgaggaatggcaacgcgctagggcctgtctcgaccggaaaacgtcagccaccgattgcagaaacgatcttcccgatcccctgcattgcaagctgggtatcttctggaatggtcgtaaataggtcttgatgggctattagggttcattttttgggaaccatgtcagtgagattatcgatagacggtacgtatcaccaaccaggagggggtactgattgactgaactgattggagctaacctagccgccctgctaaaaaaacggggcatgagccaaaaggagcttgccgaggcggcgggcctcaccccggcctcggtgagcaggtacgtcaacggcgagcgggagccgtggccggccacgatcgccgcgctatccctcgccctcggggtcgaaccttcggacatcctcggaacctcctgtgaccgggagctggacgaggccgtgcgccttgtggcccgcaatgcggactgcctcacggaagcgcagcgcgccgagcttatcgcggcgctcgcgaaacgatagggtgattaggggacggctggtgccgatatgcctctatgtggaattgacgggcgcgtctatgtctagccggatgtaggtaaaatggctgtagaagacaacgcatcccgtgtaagcaacaaggagcgcggacggcctagttttctggtttagttaaacgcccgggctccaccccgggcatctgtgtatcaattccggtccaccgggtacaataacaggtgaaggaagcggaccccgcgcaggttgctagccagttacgcgggcgatgcggatttcaggtttaaaggccgggctgcactcccggccttttttgctgttacaaccccggcgcccgcctacacgcagggtgcgtcgccccttcaattccagccaatcaaatatgggcatctacctgctgcgttgggacgattgacgatgattcgttgggacgattgacggtagcccgtgagcatggcgtccgggtacatatcgcccatgggtctcttgcggataaactggacggccgccgttccggtttcggcaggccgccgcttgtaatcggagatgttttttagaggggaagggagggggccgtttacgcccggccccggggctgcacctgcgttgcccgcgttcccaaagtgtgactacctgaggaacgggttccgcttgcaatcgattctaccctacggcatgacgctccatcctgcggccccatttctccatatccggtcgaggatgtaaggtttttgcggtctgagcgcatcttttaggcagttgcggggtatacctcctgccgtatctgaaagacctctggaaggcgtgagcatctatgaagccgatcatcgaccctgccggcgagcacggcgtccatatgcttgacataggagcggtatagttgttcggatgggagtgcgatcccgcgagggacgggcggctgacgatcgccgagtaccgcgagcagttcttgggcaaggtgggccatcaggcgaccatctcggggcacataggctcgaaacgcggcaccgcggcgaacctcgcgaaggtgcgctgcacgctcgcgcaggtattcgacagcttcgccatattcgaagtggatgatagcaagcgcaggcagccgggacgccgccggactctgtgcgtcgatttcgcctcggtccattccggcgataccgtagtcgaatggctctaggcggtacgcgaccgcgatgccgcaggactgaaaggaaacgaccatgaccgagaagaaggccgccttcgggaacaacttcacccccgagcagcgggccgccgcactgaagcgagccgccgagatgcgtgccgcgcgcgccgagtaccttggccgcgtcaaatcgggtgaagtggccatcgctgtcgccctggccgaaggcaaggaaaatcccgtcgtcgggcgcatcaaggcgaagcggctgctcatggccctgccgggtgtcggcgcggcgaaggcgcaaagcgccatgaccgcaatcggtatcgcggagtcccgccgcgtcgcgggcatcgggcagcgacaggccgaaaagctcatcgaacttttcgggtagatgcgcacgctgtgttgccccaaggggcaatgagaaaccatatgcgagaccccggagccgtcgcccatctggcggcggctcttccctttcgtgttccaggacgtcgagggtgcgccgtggcgcttcccgttcgggaaacatggacgggcgcgggtgcggtcggggcccagcgcggatagcatcgagggcgagtatacccgcggtgccggagggcgcccgatgaaaggaccgaccgccatgttgtggaactacgacgtcagcgacaaggaagaagcggagcgcatggcctcgctctacggcgaggacggcacgcgcgtcgtcgagcccggaacggaaaccgaaaccggccgcaacctcgtccgacgttgcggcaacgaactcggcatcgccacctgggaggcgtacgacttcgacccggacacctggacgtgcgaaaccttctctaaccgcgaagcggccgaactctggctttccgggtccctttacttggacgagtgtgtagagctggaccgtcagctcacccagtccgtcaaacgcatggccgcacttgctgccaacatgtccggtgggcgatggaccgccgggatccaggaatatagggacgggcgcaagtcgctgtccttccagctctccgacgaaacgggcttcttcctgatcacctcccccatctgcaaggcatccgagcttgccctgggggtggtccgcgaccgcgtgcgcgaggagctggccgacctcgacccgtatcgcgaggcgctggaggcgtgccgccgcgccgaggacagctctatcgcgctcgacaagctcgcgttctacgaaaagctcaaggacctggacatgccggtgctcctcggtgcgctcgccgtcgccaccgagcagaaccaacgtgcgctcggacgcctgctcgcagataggaaattcgaagacatgtccgtgctgccggatgccatcaaccccatggaagccgccttcgccgaggccaaggggaagctcctggagtggaaggagggcggccacggcgacggcatgtattatcacgacaccgcctcctcctacctcgacgactatcacgaactggccgatgagatcagccgtcccctcctgagagacatcgatgagttgatcgaatacggctatctcgacgagtctggcgtctacgagaaccccgtcgccgtggtcggcaccatgctcgccgaggccgcacttgagcatgcacgcgcagacgccgagtacttcgacgaggacttccgcatgcgtgccacggagggtatcgatatgtggaccgtcgcccaggaaatcgccaagacggtcccggaggccaagcctgccgaagaggggcccacgcagacacgcgggcccaagctctagatccccggagagaccatgaccagaaaacacgcaaccatgacggacggcgagggcatctgcctcgccttccaatcagagcacggcggcttcgattgcagcgaggcctccatcgaccgcatctcgggcgcgctcatctgcaacgacggcacgttggagggcctgggcgagggcgtcgccgatgcggcgatctaccccaccgccgagatcttcgccggcgcccgcctgctcgcgctcgaccgcgtcgccgagggctacgccgacggccgggacgcacacgcgatcgatgccgcagcgaagtccgtggcggaatcggtgcgccgcaactgcatcgaggtcggcggcgccggcgcctctatgatcgatttcgcgaggcacccgttcgccgcgtcgcagtggatcgacgagaacttcaagacctcgatcagcgaggtggacgcacgccgcctcatgcaggacctcacgctcgtcgacatctccaggctcgaccgctcccgccccctcatcgagggcatgggcgttcaggcgcacgagggcatcctggcgtttctggacggcatggaggagcttcgcacatcatcggtcgatgtcgagctgttcgaccggttgatgaccgacgatttcaacgtcgtccgcactctcggccgcgacaggtcccgcgagttcggcaccgtcacggtccacgggcgcgacatcgagatttcctgcacgctcgccgacgggttctgcgcgaccgcgcgaccgcaggcgggcaccgtcctcaccttcagctcgaggcgccgcggctggcacggcttccagtcctcccccctctcgttcgggggctccacggtctccatccgccacgacatgccgaacgcgaggctcaccagcgacttcgacctagcgatgctctcaaccgaggcggaaatcgccatgcgcgagctcggcgtccccgtcccggcggcgctcaagtacgtcatggaggagtgcgagagggtttcggcgcgctgcgacgagatcgaggcgaagatcggcgcggccgtcgacgcgctcgcgccgacggccgccaagggcatgagccccgccgccatagcagccgccgccaaggcggcggcgcactccggtgagaccggaagcgcagacatcaaggtacacaggtagaaagagatgcgtggaatggcttactacgattgcgacttcaaagaagtagacatcctggaagtaaagtccgtctcggatatgatttccgccttcaagacctcggcggccgacgccgcgaagctgatgggcggagacgacatcgcggtattctctccccgattgggcctcatggccgcgacctcgcaatacgatctcgaggagccggtcacgacaagccagacggtcgttttcagcgtggatgatgcccagtgcaagtggcccgatccgcccgaatatatatcggacatcgttttcgagctccgtggaccgtccggcgcacgtctcgccacggagttccagaccttctccgacgagaacgccacaccctcggcatccctcgagtattaccgtaagcgtttcgccgaaagcggagcctgcacggtcttctccggatgcgatgcgaagtacctgctcgacttgaagggcaagcgggacgcctcccgggcggatatccaggacgggacccccgttgccgggaaacgcccggcagacggcaaggcgagcccggccgacctggcacatcgcgccgcgggcgccgcacggcgcagccatatccagatggaagatgccgccacccatctcgtacgccactgattttcggaggtttcccacgttcatgtatgcggtgaagaagacggcgccgccgtcttctgcgaggggcccggactgctcttcgcctcggcccggggcgagacgcccgatgccggtatcacgaccgccatcttcaatgatgttgagaagtgcgacatccacgacggcggcaggtggttccccggcgccgggagcatctccgaggtcgtcttcgatatgcccgcgccgctgggcgcaaaacgcagctggagatgcccgcgccccatgcggaaaccaagccctccgacgagatgagatgcccggtcctggagatcgagccctgcgagatccgcgcgccgtatatcgtcgccaaggaggcggcagccgcggcgaagcgcgggacccgtgccgatgaggacggagagcgcgccgccaggacgaaaggcggatccctctagagtccacactttcggttcgagtgctgcgtcctgcacgacggggaacagaactcgcgcctcttccccctggtcttgaccaagatgccgttcccgcaatttttgcacgtcgcggcgatgcagccgtatcggtagaagacggcgccgaacatcgccgccgccgtcgagtggaaacggtatctgggcgccggctcgtcgtcgaagatcgagggcccgcccacggaccagccaatcggatcgccgtcagccgtcgtcagcccggccagcatctcggcgactgactccacgaaggcgaccgacgcgtccctctgggagccggtatcgccgatgcccagatacagctgggtcccctcgaccaccggcttccagccgatatcgaagaacggcacggcggcgccggccccatctagcgcggccatcagcaccgcgttgccgagcgaaccggagaattctccgtttcccctcggtccgcggtcgaagacgtgcgtctcaagcgggttggcgaccatataggcgaagacgtccccaaaccgcctcgtcgagtagttgagggtcatgtcgattgacggatcgtgcttgaagggcaggacccagtaggagccctttatcttcccggcgacctggcggtggcgcatttcgtcgaaatgcctgaaaccgcttctctcgagaacgtcgtcgtgcccggcggcgatgttcgccataagcctcagcaccagcgacccgaggtttcggcacagcacgatatcctccaggggctcgaccacgacggtgcacccgggatcggcctcccgccacctcctcagctcggcgagaccgtcggactcgataaggccgtgcctcttgacgtcgcgcgggatagaggcctgggacggatagagcgacgaggcgctgcccgtcgcagacatcccctcaaggcacaattgaaggaaaagagatttctcgtcacaacgctcgaagccgtgctccccgttaacggactcctccacgacctcgacggcctcggagatggaaagccgtctattctcctccctatagatactgcggtcgataagcgggcccgattccgatatggcctcgacgagctcgccgagcgtgccccagcgaagcaggcgctcggcgagctcggagcccataggcgccgcggcgggcaccggatcgccggatccgaccacctcgatcagcgaatggaatcctgtgctccggttccttgcgatgaacacgctcctgcacatttgtcgatcaaccccaatcaagatactagctgtcgatattcacaatctacccacggcatccagtcaatttcaggtccgttattgattcttccaaatgccaaccgtcaatatccggatgcccaggacgacatatgagaagacggcgccggacggggttctcccgggccggcgcttcccgttcgggaaggtgcgttggcgtgcgcggcccatggggatacggtatccgggataacgcacaaccgaccatgaaggcgaggcaccgatggcgcgccgctcccgcaagacgctacaggcagaaggacagctctcccttttcgccacgacggacgacttcctgttcgccgtaacagaaaacacggagaatgccgttgacaaagccgccgagtcgcggtcttatgtaaaccaaatcgcgggcgaggcgcccgccgacgcatctcggaagggagacgaagatggccgtcctgaagcaaccgtacaccggggtccgcggcatgaggtaccagttcatgctggacaacctgccggagaaggtagccgagctgaaggcgtccggggagacggaatcctatctcgagcagatcgagatggcgtaccgcaaccggatcagcgagctcacgccgggctgcatgaagtcgtgcggggcgacgacggaactccgctcgagcgacctgccgagcttcatcaagaaggcgaactccgccgaggcgatggcgaccgaaatcgctatcaaggagattatcgaggccatgtagaggccgccgcgggcgtggactcgcagtgcgcgggcagccccatcgcccgagccaggaagaacctggcggcactcgaggcgcttgccgccgccgaggagcgaggccgcgccacggccgaggagatcgccgccatggaggcctattccggctggggcggcgcccagaaggccttctccgagaaggccgaggacgagtggggcgagatccgcgacaagctcagggaactgctcagcgaggacgagttcgcatcccagcgccataccgtcctcaccgccttctacacgccggcgcccgtcatcggcgccatctacgacgcgctgcgcgaggccggcatcggccagggcgacacgcccgcggcgatcctcgagccgggctgcggcaccggcaacttcatgcgcctcgcgcccgccgacctcgccctggacttccacggcgtggagctcgacccgatctcggcgcgcatcgctcaggcactctgtcccgaggcgcacatcaccgccgcaggcctcgaggagtgccgggtctcccccgcgtccttcgacgccgctatcggcaacgtgccctacagcggcgacatcaagatcgacggcatgccgattcacgactatttcatcaagaagagcgtcgaggcggtccgccccggcggcatcgtcgcggtgctcaccagccgctacacgctcgacaagaactcgaccgcgacccgccgcgcgctggccgagcaggccgagctcctgggcgcg

SEQ ID NO: 1694 - DNA, 23117 bp, synthetic construct
  misc_feature 1..23117: note = Synthetic
  source 1..23117: mol_type = other DNA
ttgatgagctttacggatatatcgactacatcgccgtgaccgagaaagggcttcgtaaggaggggagcttctacatcgaggatgatccggttgacgacggttttggaatgattgctgctgtcgagctgattcttctccggaacgattggttccggaaatacgtgaagacactcaactgctactggtgggatgaggaaacaaacagtttcgatgttgaggatgggattgaggaagccgtgagaaattggggttcatttcattcgggcacctattccttccccaccggcatccggaaagatgcgattccgatgcacaagctggaactcatcttggatgagcagagaatcatcgacgacgggcttatcaggatcgatgatgtgaacaattacctcgccaagctgatcgtcgagacaaatggtcttcgcagggagggaaacttctatatcgaggagaatcctgaagacggtctgggtgcaatcacccatatcgccctctgtctctcgaagcagaactggttcaggaactacgtgaaggtcctgaagtgctatcgttggaatgccgatacgcaagatttcgatatcgaggatgcgattcaggatatgatttttgccgattttccagtcagctaatattttggagttcccgtggctgaaaagccgcatccccacgctctggacgaacagctacttcgtttcgactgtgggaagggtgtcccttgcgcaggtaaggaagtacataaagagacagaaggaggtctagccgatggaacgcggattcaaataccgaatctacccgaatgcgtcgcaacgcgatcagatcgcgcggacgctcggttgctgccgtttcgtgtacaaccgcgctctcgacgtcaagaagtccgcttatgcgaagacgggcaagacggtctcgtgggcggagctctcccgaatgctcccggcgtggaagcgcgactctgagacctcctggctcgcgcaagcggactccatggcgctccagcagtccgtccgcgacctcgaccgcgcctacaagaacttcttccgacgcgtgcgcgagggcgggaagccgggcttccccaagttcaagtcgcgccggcacgcccgacagtcgtaccgcaccaacggcggcaaggtcctcgaccacaaccatatcgcgctgccgaagctcgggactgtccgggctaaggtatcccgaccgctccaggggcgtttcatgtcggtcacggtctccctggacgcggccggtcgttacttcgccacctttctctgcaccaacgtgccgtccaaggacacgaccgcgaccgaccgggaggtcggaatcgacctcggcgtcgagacgcttgcgactctctcggacggcacgaaaatcgagaatccgcgccatctcaagaaatacgagcgcaagctcgcgcgggagcagcgcaggctttcccgcaggaagggcgcacgcaggggcgagaagccgagcggcaggtacatgaagcagcggaagagggtctccaggattcacgcgaagatcgccgatgccagaaccgatgcccttcacaaggtcacgaccatgctcgcggacgagaaccaagtcctgtgcatggaggacctgaatgccaagggcatgatgaagaaccatcatctggcgaaagccgtgacggacgcctcgttcggcgagttcgcgcagctgcttgagtacaagtgcgccgagcgtgggcgctcccttgtcaagatcggccgcttctacccgtcgagcaagacctgctcggcctgcgggcacaggctcgacgccctaccgctgtcggtgcggtcgtgggactgtcctgcgtgcggtgcgcaccacgaccgcgacgtcaacgcggcgagaaacatactgacggaggggaaacgcatcctctccaacacggaaggtaccgcggggcacgcgggaaccgtggcggctacaaccgcctaaacgctcggggagaggacgtaagaccctagaggactatatcggtcctcgacggcagacctcgcagaactgagaatcccctggtttcaactacggggagtgtcaaagcactcttctacaggagaggtgtgcctagtcgtcttgctcgctgacctgatcgttgcgcaattggtcgcgtttcatggtctcaaggacggtcggaggcagacccatccagccggcaatgatctcatcgggcagctctggattggcattcttgatgaattggctgatcttgcaggcacgctccgtgattgacgcgctgcgtccgttgctgaaatacagcagctcttggctgaagaacttgacgccgttgacgagctcgccgccctggcgccattctacaagctcgccgtcaagggtgattttcgcaacatcctcgagttccctcttggaaatcaggcggatgcgggtgctcgccttgaggagtgcgttgttgagcgtggcgttcttcttctcgtcgagcgatgtcacggcattgtccttgtcatggatcttcgcatcgtaccaatagacgtcgacgacaaggccctcattcgagttcttgtcttcaagcaggtcgaagcggattgcgaattccgtgatcaggttcataccgtccctcttgaagggatcggtcgccgtgaaggtggcggtgtcgaacacatcgatcttgccggtctgataataggttataagtttcataggtcactttcctttcttcgatagcgtaaatcaattataaatcagcgagcgtggcgagcggatcataggcgcgcgtgcgcgccgcacaaaaagcggcctgccatccgaatggaacgacagaccgcatgtctgattgcactaaatcaatgacaacctaatgctcaagattgtccttagcgggcgcggcctgggtttgaccgtccagcttttcggacgcgccgcgggcggatgcggcctttgcgccgagactcttgccctgctcgcgctcggcatccttgcgctcgaagaaagcctcgcgggcggccttgttcgccttggacgcggcgaaggggtttacctgaatggtatgggcttccttagattcgtggttgtagaaattgacctcgatcttaccgtccttgagctgagtgctcggaagtccgacattgatctgctcaccgttagctttctgctcagcagccttgaaatactgcttctctgtgaggaacacggtcatatggccggagatgccgttctgatcgccgagatcgatgccgtttgcgacagagcccggcatgaagcggcaatctgccagatacatctgacggtcgtccttctcgatgaccttgagtttgacctggttgttgaagaacttgaagttcgtccaggtcgtctcttccttgacattggtgttcttattctcgttggacatagcaagactcctttcattagtcatgtccttgattacatcatcgggaaacatcagttcatggatcgggactccaagctggtcctcgatgtcatgccagatgtcttcccgaaatgtcccgatagggtagccgtagaattccgaatcgatacattcattatcgtctatgcagacatctccgagttcattccaaatcctttttgcggcgatttccttcgtatccggtccgttcgcatccgtaatgacgtagcagttgttgaaattgacgatttcgccttcagcgaggtcttcagctgcgcaggcatacgggccgaacccttctcgaaatccgccgttgcactggtcgacgagacgtgaggcgtattcgatattaccgtgtgccgcctggtagaaatcgcgccagcaaagtgtttcatattcatcatgcgtatattcgacgcgcaggtaatctggatcgattgctccgctgtggagctgggatgcatagctaatcgctgtgcggagcgaatcgaattcgacatcgtcatggaaacaggctccatcgccgtaactgtagacgatgaaaggatgatccctatggcttggttggctctggatgaccattgcgacgccattgggaagttcaaagccgtaatagtcggttgccgtttgattcgggtccatctcaccggtatcgatgacatgctcgaaattcatccacctgggtagatcatgaccgtattcatcatgcttgccatcataagcgttcgatatggttgagttttcgttcatgttcagttcctgctttcgtgtgttcctgggagtccacgttcatatacttcctccgttttgaaacgataggatcggtcttgataggaggatacccggtttccttttccctgcctacacccgctgacggaacgtgctttctgcaccttcggcaggctttcttcgagtttctttggagaatagttatgggtgaactgctcaccttcgaactggactggaattacgccgccctttatatatttaagcttcatcccgatatggataggggagttctggttttgggccttgacggccttatcgtactgccattttgcgagatgcagggtaaatgagcagtttcgcccggcgatttcggacgtcacatcggcacgataatccgttctcgccgtgtctgggtcgatggattttgaaaggtcgaccaggtccgggaagaagcgaaaattcacccattcgttcccgtcaaaggattgttccgtggcggtgcgatactcctcgggacttttgggcagtgggtcgggttttcggacattgatatcggcggcaaggtcttcaagtgcgaccatctcaccgtcgatttcgactccatctggatacctggcggttttcaagccgagactgaccggtttaccggccttttgttgggcgtcggcgcgtgcgtactgcctctcactcagcaggattttaaatttgccacccggcttgattgaagattcctctccgagagtgcaatcggcacgataccatggtctgtccgtcttccttgaaacacctgtgaggagaattacactgtcgggaggaacttcaaggttcgtccagaccggcttcttcggttgtgtgggatggcttttgggctctcgaatggaagtatcttccatctcggcgatgggaggcttttccttggaaacgcctgcgttttgttccacctcgatacgctctggttcttcagggacatcgattctgtttagatggccattttctactttgcctacgttgtcgatcgccgcactgatatcttccaggctcgtaccgagagggaaaccgtggaaatacccggtgatatgcccattcccgtcagtcgggacgctatcgatttcgaagcgcaagatttccgcgctgttcagacggttcttctgaccggcatctccggtcatgatgtactcgctgccgaactcggcaatgactccgttgatcaagtcttcccttgcgcatcggcgcgggtccatgccgtcgcgatcaccggcttggcaatcgaaaaggagcttgttggcatattccaggttgccgtgagccgcatagaatagatcgctccatccggcgaagccgccacccggcatggctttaaatcccggctctttgtacatgatgaaactcgaatgcagctggatatcggagatgaaaccggaacggacgtcctcgcagtagcgcagcgcctcgtcgagatcatcgaataggatattcgatctccattccgtctcatagtcgctgaaaaaagaatggatgttgtcgacctcgccgacaacaaggagatcttcacgacgggcggactgcttgagaaacatctccttttttgttttcggcacggtgaagccgtaccaatctaccaattgcattcccggtgcttgggttttccgtttgatggcttcatgcggctcaagccatggatgggatgctgctgtgtcctgaagcttttccttccacatattccctccttagtagagtagaaaacaatccatcagcgagcgttgcgagcggatcataggtgccgaaggcgccgcatttaacgctcttcgtaagtcttctcgttattcgtctcgcaatcgcctcgcacgacggcacgattgtcctttaacagcccacacatcttggaaagggacagatcgctcttccgatcggtcttgatcgtctcgacgtaccgctttcgcaaaatgaactcgagcgtcttgccccgcgggatacactcggtgccgtcgataatcctcttggcgttgtcgacgacttcacggtatgcgttctcgttcagcatggtcccgagcttcgttccgagtacggcggtagcgataatgtcccggccgatatacgggtcgacgattgcctttgcgagcctgaggtcacgttcgctgatcattttgcctcgatctgggtcggctgctcgattcccggttcacgttgttcagtctcagcgattttgctgcaggcagatttgacggtttcggctttatcggaaagtctcgtgtgttcacggcagggcgccccgccgttggagacaccttcgatcggtccgttttcgataacgtcgatgatgtctgacgagctgacgattgaatttggatcatggaacagttggtcgagatcgcccatgaactcattgctttccggacggccctcaaaggagaacttttccgtcacggcatgtgcattggaaaaatcaagttggtggaaggtgagtagctgatccacatattcgccttcacggtagaaaccggtatgggcgagcatggcaaggtgctcgcgattctcatcgcagccaaagtcgacgccgctcttgaaatcatccatgaaccactcggtgaaatcggcaaggtcctcaccggaagtgggaccgagaggaagaagctcgtattcgggttcaccgatttgtttcgttccggagaaattgaccttttgcacgacgaaagcggtgtcctgtccctcggcaaatttagagatcaaaccgaagatatggtcgttctcttcggcatgggcaagctggtccggttcggggacatcggccttaatctgattcaggtagataaagttctcaatcgagacatcatcggcttttggtcggattcgtccctgcagatcgtcgatcttatccacgaggccggaaaatgctgaaaggatatagtccggcttggaatcgggattccattcattgatttcgagaacgtcagtcaatccatatttttgtgcaaaagagtccagttcatcaagttgttctttagtgaatccccatgagtccagatcttcaggatcgtcgataaagaccattcccgcatagctgtctcggacgttctccgtaatagcgttcagcatttctggaaatttcgatgggtctactttcggaaccattgcataagtcctttctttgaatatcttttgtaagattctaccacttcgcattaaaaaaatgaccccgtccataagaagagatcgagactgttgatggtatatgacgactacgcggatattggtatatttgcaaaatgggtgatggatgcgcccgagattggggagcgggcacatccatcggtgggaagaagatgtccctgcacgagaaaggggatcaaactcgtgctcttaaccataatagcgatttctcagcccgttttcgtgtggactttccaaattcgcaaacgtttgcgaatttcacttccgaaatttgtcgaagaggccttttagccttccgagaatcccgtgcggtttcgtcggcgtttcaaaaccggtatctttggtctgctttatttgtcggccggcgggtgcgctgtttttataggaagagcatctggaactgagtgaccttttcttcctcagtgcctcttcttgcttctcgacggtcgcttcggagatctcgcggagtgtgaggtcgatgttgtcccatgaggtctcacctgtcggtgcgccttttacggcatagaccgtgattgccggaagcggtgtctccagccttatgagatctgttcctttatggcggagcggtttagcggatggttctgcctcgatatgccagctacgcttgagaatctttttagctgcaggagagtagagccattcgcgaccggcgaaacgcgtcgcatggccggttcctgtaattcgttctgccaggctctttctggtatcctccgcatttgcgatgtcatctgtgatggatatttccatgaccgggaaatccacggtggcatatttccgcacgtcctcgatggttttcggatggctgacgcggaattcgatggcgacccagatctctgtatcggcatgcgacagcagtgcgaccgcatccggaatgagaccttcagagcacatcgcgccgcaatcgcgctccgttttgacatcctcgattttagtcatgcaaccggtaccgggaatgaacgatttgtatgtttcgggaccgaactttaggacagaagagccgggaacgggaaggactgtcagtttgccatacttcttgaattcgagtttgccggcgttccgatagcgtgacgtatgcgggacgctatcgatgagtgacaggttggggaggtagaaatcatggccgatgagcccttgaaggacggcttttgcctccaggtggagaagggactctggattcgactcgaccgcgcaccggctgttcgcctcgtgggccaaatagtggatgtctttctccgggtcgtccttcgaccatcggactgccttgagccgttttccgcaattcggatcgggacagacaagtccgcacttgaacccgttgcggtcgtaggggatttggtctgcccatacggcattgccgtgctcatcaagtccaaaaggaaccctcatttatgaaccgtctttctgtcccatagcctggtgaggacgatcggctgtgtcttgtcttcattcaattcaaaaagatgcgcagcgcccccgaagcgagggcggctgcacgctgttttctttttatgggcgtcaaggagccgtttcaaggaattgacttttacccaaactgtttttccaaactccatacctcggggatcctctgggattttaaccgattctaggacgtacgtagataccgtcgcttactttgccgttgcaaattgccttaggaacaaatgtcttgcttttcccgttgacggtcaaggtcacctcgcaattgatgtacgatccctgtaaacctgagagagacagagaggggctggagccgagttctttggcgacaagtccggcgccgcttccgagaccggcgcatttaaaccatctgtaggtgatattgccctgcgggatatcggaaagctcgttgtcgaagacgatagaggcgtaatccccttcacccagacttggaatctgagttgatgagtcatagggggtagtgcagcatgcgagcgagtttccattaaaacgtgggcgatagcttccggtgggatatttagaccaatcgaaaacatagactttgccgattgtctcgctgtaggcatctgggacttttcctttgctgctggatgtcgtcaccttgcagcgcagataatagtcctcgtcttcttccgagatttcgtaagaattcgtatttccaccgtatttgatatcactgaaagttccggttttcgtcgatgagtactgccattggtagctgacttgggttgcgcctgctggtaaatttgacactttagcggtgaccctctcaccgacgacgtccattcccgttaccgacacagtaggggcctggagctgtgagccgctattctcatcccctttgttttcaccgccggcgttatttcctccgccggtgccgttcccgccagaagcattatctccggcgccgttcgccttgccgaaccatgagctgatgctgttgccggtttttccgatctaccctgagacctggtttccaaaacccatcagtccaccaccgatgacgacgacggccaatatcacgatgatgtactcgacggtctcgccaccaaattcgcgtcgggttcgatggcgatatttagacgcggttggaaatatttggcgtttcatgattggtctccaatggcagaagtggctaaatcggtctagattttaccgcatcgaattctgtctgctcgcggtggggaaaactaaaaaggacctgcttgtagtattattaaaccatctgatcatcaatgaaaaggaaagtgagggtctatggtggagtacagcgacccgcgtgaattcggatttcatccggagacggtcatgacggcactgatgccttacgagcagttttcttctaaaacgcgcaggctcattctcggaatcgatattggcattgcaagcgttggagtctgcctgatcgatatacgcaaccacgagatcatcctcatggctagccatatcttcaaggcacctgtcgagggcaagcagaaggatatttcggctcgcccgagtggcgctagcatacgacgtggctatcgctcggttcgccgtacgaccaaacgccggaagaaccgaaagaaggttgtccgcgatatcgaaaagaagtacgtcttgattccggacgatgcggacggacagtggtttgcaatccggaaggacgaaccggacgttcttcaccttcgtgggaaggcacttctctataaactgaacgcacgcgaacttgcgcggattctctacgcttttgccggcaggcgcggatacatcgaccatggcaagggcactaccgacgatgactcaggtaaggttaaaaaggctctgtcggaaaaccgtaagattctggatgaaaacggctatgagacgattgcccagtatcttttgaagcagcctacttcccgtaacagggaaggtgactaccgctatatggtcgacatcgagatggtgacggacgaggtccataccatcttccggcaccaacgcgatcttgggagcgatatcgctaccgaggagctggaaggggagtacctttccgcacttcgcaggcttaccgacacgagcgcccgcaataagaaaatctatagcagggtcggttactgcacctatctcggagccccggagaaacgtgccgcaagctcgttgatttcctttgagatggtgcgcgcgtatgagaagctatcgaacataaagattgagcatcagggtcgggaagcgacatacatctccccggagaagcggaatgagatcgttgagtccctgtttgccgtctcgaagaatcccaaaccgctcaaatggtcgcaacttcgtgaaaagctcggcatgcagtcatccgacagctttgacagccgcctgccgaccgatgagaagagcgactgtatcaagatcccggcttggaatgccctctgcacgggtcttttcacgtcgaacagggcgctgctcgatcgacttcatgatgataccgacatagccgatgccgtcagctccgcactgacatacgcctcttcaggcgaatcactgcgaaacgcccttgaaaatctcagtctcgatctgtcggagcaggatatcgattctctgctcgatcttccctacgcctcgaagctcttttcgggatattgcagcacgggagttcgtgccctgcagatgctccgcgatgcatttaaggatccgcagattgagaaactgtacgatgcggagatggcgaccggtctatatgaggccaggcaggcattggcagcggaaaggaacgaaagtaaagacggactgttgtgtccctacctcgaattcgatccgacatgcacaaacccggtggtgcttcgcgcgaccgcgcaggtgcgccgcatgatcaattcgattatcaggcattatggattgcccaacatcattcgagtcgaggtcgctaaggatctcaagcgctcgaagcatgagaaggcgattatcgcggcgacgaataaggccaataaggacagtaacgagcaggcgaaaaaagacctcgttgcgttctacggtcttccgaatgacgcccacgtgagcagcgccgatttcgagaagatgaggctctaccgtgaacaattcggccaggacccttatacgggcaagggcatcaatctggagcgtatgctaaacgaccgtgattatgtcgagatcgatcacatcctcccgctctcgcgttcctgcgatgactcgaaatccaataaggtcctgtgtcttacgaaaagcaaccgcgataaggcgaaccgcacgccgtatgaatggatgacttccggcgagccttcggcgcctgatttcggggatttttgcagacgtatggacgcgtgggctggaaagggtaagtctgcgcattatacgaaatcaaagctttccaaactgaaaaacagcacgttcgggaaagaggagcagaaattcatcgatcgcaacctgaacgacacgcggtacatgtcacgacagctcgcgatgtgggtgcgcgaatgcctgccattccccgatgataagaggcagcatgttttctgcgttgccggcgcagcgacgtcgctcatgcgtcgaatctggggcatcgggattgttgacaaaaaagggaagaaggatcgaagcgacgaccgtcatcatgcggtcaatgccgcggtaatcgcatgctgcagccctgagatcgtgaagggcattgcacgagtcaatagcggccggtcgaacataaaggagcgggagaggcttcgttacgagtccatgccgtatcccgagttcaaggaccaggtcgaggcttggattccctgcatcgtaccgacccggacggtttcccgcaccgcgaccggcagcttgcttaaggacacggtatatccctatgtcggtgttgacgaccgtggaaaggatctttatcggcgtaatgggaaaatcgagcctgcatccacgctatggaaggatggcagtgggggatgcaagctgtatgatggtgtttacggccttgtggcagtattcgacgaggggatgaggaagtccggcggttggagattcgatcccgtctattacatcgatgtgccgaatgtcagacaggatttcatcagggaatttacaaaagacctctcgattgattattggacgaaagtacagctgaaaggtgatgagccacgcattttcctgaagcaaggggatgtgctgctgcaggatggctgtgtgatgcgttactacaagtacaatgtgtcaaatggcgtgattagctcttattcaaagattggagagaagagcgtaccgctccaaaagacaggtcctctgtcggaggagaagtttccgaagcaatcgaaatgggactcatcgttgactgtcatgcaggaagactgtctcggtctgtgctggttgaggttcctatcgaaccgtgccggcaaatttgaaaatttcccggtttaacaggcagccgcaaaggggacgggtatgaactcgtcccctttgcattttagaactccaagaacagttgcgtccccgggctctgatcgtcacgaccgttagacggattcgtgttgacgaggacttttcggtcgacatattgcttttccgtgagttccatggcgacgacgtgtcccgccggtgggagatgtttgcgaagctgttccgcatgggattcagatgaggccctgcttagaaggttacgcgaatagacgctgttctgttccctctggtagccgtcgtcatctaggaaccgcttgaatttgatgtagttgtccttgtcggttttcgtcttcgttggaagatcgaacatcacgagcagccgcatgattctcatacctttcctttcgcccgtttctcttcgtatgtttcacattcgagtccgatgatgtctggcaatagcaattgatcgacatcttttaactcgacggcccgtctcaaggattcacagtagatatctattgcagtctggacggaatgcctgcgtccgtcgattgaaaccagaacggaagtcacctccgtaagggcttttttattcaatgtggacaagggttcgagaatattgtcactgacgatcttgagatcgacaattggacggaacggttcgataaggtcatcgacgaggttgaacgcattttctgcgctatgatggtggatacctcgtgaaacgagccaaccgtgtgaaacggcgcactgggcgatgcctgaccgtaaaattgcataaccgtagttaagaggagcggtcataggaccattccagcgcgtaccgtaggggagaagtgccttgaagtattcacttgcggcgatgctttcgcgatttgtcttgtcgttgctttggacttcctgggcatagccacggatttttttaacttcagccgagtcgccgaagcacagtgcgagtgttttagcctggttctcgattttcttcgtgacgatccgtttccaaatttggtttcgcaatggctttgagatggcgagctggtgttcaacgatttcggcatgcctcgaatgtgcccccaaggggagtgcgagtccgtttggcatatggtctgagccgcagtataggactccgataccggcatcgttgatgcccgatatcagggcgcttgtcattgttacttgggggttatcgataataatgacccatatatccgacaacgcaattttaccgagaactaccgacgatcccttttcccggataatgagggaattatctttaatgcaaagatactttggtgttctgattgcaacggtttgtaacatctcggctccatttttgctgaagtatttatggcggtcgggattattgctcaaatcgattgttttcctggtattattacttataccaagttcttcttgttcctattcgtaacagctgattgaattgcaacgagtgacacttgggtaagaggacttgcgaaatcgcaagtcactcgtggagtatatcctgcggcacatctataggttgtgtcgcaggtgatctccttttttcaaaaaacaggtgaatcgagccgaaaatgaccggatttccgcgtttttcagaattctataacagtaaagcccctgcttaagggtctttttcgtgggtgggtattataacagctgattgaattgcaacgcactagggctagtcaccgatagctccattgacccgtctaattataacagctgattgaattgcaacgcactagggctggtcgatgttgcgcatagacgcgaggtttattataacagctgattgaattgcaacgcactagggctaccgctcatcggtcactcctttcgagtgcattataacagctgattgaattgcaacgcactagggctgaacaggattgcgtttgcctttgtccaccattataacagctgattgaattgcaacgcactagggcatgcacatcatcggcatcccctacggccagattataacagctgattgaattgcaacgcactagggcctacgcgagcattgaagtcgggcggcgtaaattataacagctgagtgaatgtcacaccgcaatagctagtcgacgcgtggtagaatacaagaagtaccagcgaagctcgtccttggacggtcaaactttgggaacgcgggcaacgcaggtacagacgaattgatagcccggtgccagccgtgctatttttttctcccttcgctatccgttccgcttatattccttccaccagccgtacacgtacaggacggaacggacggcgccgggggctttggtgtatcattatccacagtgcttgcaaaacgaatatcaggatatgagcaggaatttcaccatcatcgaaaagagatcgcccatgttatcattgcccagaattacccccccccactaaaaaacggtcatgcaggacgtatccggagtccggtgccggtaccgtcgaatacgtcatcgtcctgattgtcgccgtggtaatcggcgcgggactactcggcttcggcaccaaaatcgcccagcaggtcaatgagacaggcgatacgattggcggctggttcggtagcggcgaggatgtttttggcgctggttcagccgatcaggccgaaaccgcatttgccgtgtatagtgccgatgataacagtctggatttctacaaacgcgctgaggtcccggaagtcggcgataagttcgagttcaagaccgtgaccgaggtgtacacggggtttgagacggggacgtatacgctcgtcgagaagcccacagatcgctatggctcatcaaacgctccttgggccgctcatcagtcgcagatcgagacggtcaccgtcgtggatactggcatcgctcccgaaagtgtcagcgtatggttttcaaacatgaccaatctcaaaaccgtcgatgtggcaaagattgacacgtctgagtgtcgtcagatgttcgacactttcttcagggctaggaaattgaagtcactcgacctttcctcatgggatgtttcaaaaacctggaacttcagctgtatgttccaagagtgccattcgcttgagagcatcaatatgaaagactggtccgcacacgcatcccgtagtggaatgttcggaatgttcttcgactgcccgtctctgcaatctctcgatctttccggcttcgatttcacttcagtcgttagtgccaacaaaatgttcggtaattgccaatcgctgtccaaagtcagtctcggttctaattggaaatgggtcatctatgacgatggtgagggaacaaattcctatctgccggctccttcttcaaaatatatcagtggggcagacggcaagtggtatagcatttcgactggcaagggatacgcgccgcaagacattccgaataacacggccgatacttatgtagcatcgaaaagtctgttgtcgaaataatgtcgagcattcagcggggtccaagtgtcttcctggccccgttttctatgagatcaagggcggcacagatactcgcaccacttctttttcgggtcatagaacgtatctggtgaggtcgattttttcggcgttgacctgcgtggtcttgcagacactctggcggtggcccacccttacgacctcgatctcactcggcctccattgccatatgcatgacgtcatccatcgaatagcgggtggcatcgtcttccattagcgcctcgttgtatgcctttatgtcggccgcctcctcgatgagatcggtgtccgtcctcgagaacttgaagtacaggttggtgttgggctccccctcggaaagcttggagcggtcggcgcggagattcaccaggttcccctcccaggagccggattcgtattccgcgcactcgcgctcaatatcttcgtccgtgatcgcggatccgtttgcaagcctgtactccatcagcaacctctccttctcgcgttctcaatctcccttagcgtcttcttgctcggcggagcgaataagctccgcaagacgctcacgcgcctcatgttcctgacgcaagatttcattcagctgagcttttttcacagcaatttcactgtcaagtcgttccagctcggcttttgcatctatgtagtccttcaaccccaacccgctcaggattctttcgccggctttttcggaatcgagaagaatctcgactttacatccaagggacgattccatgaaccgctgcatgtcgggatgcagcgtcttaagctcaagacgtgtcacgacactcttcgccgaaacgcgaccgtcctcggtaactggtatccaggcaaagtgcatgtgcggacgggagctgttcctgtgtatgtaggctgatacgacgttatcgacaccataacgctgagatagaaatgtatatgccgtcttgaagaactcgcgttcgcgattatcatcgaaagagcgtgggagtgtgacgatgcaatcgcacagactcaccgcatccttgcgcacatggcgtttcagcgcgagggcggaaattcgctcgctaatgaactgcacttgggaaatgagccttttgggaccaaggttgtaaccgttggcttgcatcgcctcattctcgtaaagggcgcacatgtgaccgatcgcgccagattgatatttcgctatatgggccattgtgatcacctttcagggagcttcagacttcatcaagtatatcgtgggtgggacttatcataaccgtcgtaaaacccctggtttaactacgggaaaatcaaagacgggtctcgaagcctaaaaagaaaggtcaccgtcgctaagacgatgacctaacttcgttaagcaacggcgctgcccagctctctacaacttaggcttccgtcggcatcattttaatctattcagagtgatagatttatcggaaactgcgagatcgacttttagaacatttaatgccattgcttttaaacaaagactgcctgttttaccagcacgtttaaccgaatttgcaggtttcatttaaccagatttgcacgttttgtttaacaaatcagattaaacaagtacaagtatgattacagcggcatacgtgttgaaacgatagttccgaaattgtttcacagtttgtcgccagattgtttcacgtgacgtcgtcagaatgtttcacgtgctggtaaaatgctataaaacaagatggctcaatgaacgacgggaagttctatgaataggtatatagctagatgcatcgatcgtttaattgaacgcgatctcagtatcttcggtgccgtgcttatccagggaccgaagtggtgcgggaaaactacaacggcgcaacgttttgcagcgtcctccctgtccctctcagatccagccggcggttttgcggcacttcaactcgcccgactcgatcccgcccaggcggtagtaggctcagctccgcgactcatcgatgagtggcaggaggagcctaaaatatgggatgcagtgcgtttcgagtgcgaccgaagaatgggtgagcccggacagtttcttctaactgggtctgctacgccgaacgccgcaagccaacctatgcacagtggagttgggcgcgtgtctcgactccgcatggacacgatgactctcctcgagctcggcatttcatcgggatcggtctccctcggaacactgttcgctgaaaagccgatcggggttgctcttggatcaattgaaggcatctctgccatcgcagacttggtgtgtcgaggcggttggccgcaagccgttggcaggtcaaccgaagatgccatgtgtatctcttctgcgtatgtcgacggtgtttgcgaatctgatgtttcaaaggttgacggtgtgaagcgtaatccagagaaagtcagggctcttctttcttcacttgcccgcaacgaatccactcttgccggcgaaaagtctcttgagaaggacctcggcggtgatgtatcgaggagcacactgcggcgctatatggatgccttgcgtagaataaacatcatcgacgatattccagcttggcatccagcgctcaggtcgcctgtgaaactgcgacagagcgcgaaaaggcatctcgttgacccttcacttgccgtcgcgctactcggagcaaatccggagtcattggtatcagacccgaaaacactgggactgctcttcgaatccttcgtcctgcacgaccttaaggtctatgccgctgtaaacgactcatcggtatcccattaccacgacgccgatgatctcgaagtcgatgccgtgattcacaggcgcgatggaacctggattgccgtggaagtaaaacttggaagctcccagattcccgaggcatctgcaaacctgcttcggctggagcgaaagttggttgagcgcggtaagaagccgcccgcggccaagctcatcgtcatcgggttcggtatgccggcgcacacgatgccagagggcgtcatcgttgcaccagttgacacgcttgcgccgtagagctgcggtgggattaccttgccctcgaaaaggagattcagccttggctggtaaagcggtaaccgagaaataaatcattgaagggggagaaggcgctgcgcttctccccttgccttatcgttgcgataggtgcaatccctatacgttttgagacgttgaatatgaacaataacagaggtgtaccagttaactggggcagtcgcaggttcggttagaattgatgccacggcgcattccgtgcgcggacggccgacgatttgatcggaggtcaccatatgctgaaattccttaacgcgctggccgctcttgcaacggtcggcacgttcatcatcgcgtttttaaactcgtatgaggttcggattaaggtccgtaggcgtacgcgcggtgcggacagtggacggcatttgcgccacaagcgcaaataagaatgcccgggggtcggagcccgggcatttaacaaagactgaaaactaggccgcccgcgctccatgttgcttacacgggatgcgtcgttttctgttgtcattctaccctctttgggcagataaaaccaccgtacgcttgggttctcatgcgagttcatcctggggtcttcatcaagcatatcgtgggtgggacttaattataacaacagattgaatgatgcttcttacagcgcttgttggcctttccaaggcactcaagcagggttcgaagcccaaaaagaaaggccaccgtcgctaaggcggtgacctaactcttcaaagcaacggctctgcccagctcaccacaacttgggctgccgtcggcatcattttaccctatccagagtgctgaatttatcgaaaactgcgagatggacttcaggaacatttaatgtcattgcttttaaacaaagaccgcctgttttaccagcgcgtttaaccgaatttacaggtttcatttaaccagatttacgcattttgtttaacaaatcaggttaagcgagtacaagtactctcaaagctttaggaaatatccgatcagatcaaggagaacctacatatatcgctacaatgatgatacgtacgacacactcgaaaagttaacaggtggcggcgaactgtccgatcacagcgaccagcgaatatttaggtgactaacatgcaaggcaattacctttccccgatcatagatgcctgtaagccgatcctgattttcgctgctgttctctggggcattgaaattatcatcacgatgcttatcaaagatcacaagaaggcgaaacgaaagcaggcacgtgagaagcgccgcttggaatatcaggaccgccgcatggcaaacgatgccgagcacgctaaggtcacaagagccatacgctacgacgtactccgtcgcgacaattttcgctgcgtccgctgcggcaggggaaaggaggacggtgtcaaactgcacgtcgatcacattgttcctgtctcgcgcggtggcaaatcggtaatggacaacctgcaaacgctatgcgaggactgtaactacggcaagggcaacaaatataaagagtaatgtcatgccagctacgattagaaattatctatcttggagacgtatggcatacaatgtcatccttaatgccgcacgttcaaatttcgcccgctatttctcgcaaaacttctctagccttggtcgtactgtttttggaaaagatagctatatgaattatttccaaggggcattgacgccagacaagattgtctacatagacaaaaaacagggtcaaaaacttgagcgtctggccgaacgccaattgttcgggaactactcaagccttgaccctaattgcattatacatcagactcaaggcatttacaagctaaacgaaatggagagcatcgatagggcgagatcattaaccaacaaaatccttgaaacaaaggactcatgcgaatcgttggctaatcagcgtaatgtagtagagctaaattcgcacgatgagcgaatttagtgaattaagcagcactacaagacccgaaaagaagggttctctaaatggcaaagctaatcgtcggtcaaaatgacctggcgacagtcaatccggatttggcagcggagtggcattcgactatgaatggttcgcttttgccgtcgcaaataacttacggttcaagcaaaagggtttggtggctggggaagtgcggtcatgagtgggaagcggtaatttcaagaagatcaggtcgtggggatggatgtcctctttgtagaaaatcgcgcccaaaaactcacgaggagttttgcaaatccatcaataagataaacccctttattgaaattaccggaacgtatgtaaaatctaacgtaagggtctctgttcgatgcaagaagtgcggttttgaatggagtacaaaaccaaatacgctacaacaaggtagcggttgtccaagatgcgctaaaacaggaacatcgagatcggaacaatacctttgtgtttttatggaacaagtattcggaatcgaatctgttctaaatcgcgacaagacatcaattggccttgagcttgatgttgtctgcggcaagcatgcctgggaatacgggtcgtggttctggcataaaccaaaaagaaagcaagccatcgatctcgaaaagtatgaacgatgcagggaacgcggaatcacactacacatcatttacgacagctgcgccggcgagagatcgaaaattccgtccagcatatgttttgactatgacctgtggcaggaaatagatcataagtcgctcaaacgaatctgtatcaagggagccaaagaaatctcccctgatgtcgatctatcctctatagactgggagtcgatagagatagaaagcgcgagaaggtgcagggcgctttccccggaagaatattccgctgaagttgaatctatctataacggaaaaatcatcatagatagcgcgtcgtttaaatcgatagctaatagggttaaggcccattgcacctcatgcggcaaaacatggtcaccactcgcctattcactggtccaagggcacggttgcagaaaatgtgcatatgaccttgccgtcacaaatagggtcggagtgacggcaaagaaaacccacgatatgtttattgaagaactacgaaagaagaacctcctatacgcaaagagccaatttcatttacttggtagctacactggcagcaaagaaaaaataccctgtcaatgcaatgtttgcaatcatgaatggcatacctctccgcaggcccttttagccggaaggggttgcccgaaatgcgggtatagggcagccggaaaattgacatcggaaagaaagcgtctcgattcacagacattcaaaaatcgcattgccgaaaaaagcccttcgctcgagctgctttccgattacaaatgtgcaaaagaaaagatcaagacgcggtgccgcaaatgcggatacacgtggatggcttcccccatttccatgaacgcagggagtctttgccccgcctgcgcgaatcatgttgtattccgaggtcataatgatctcggcacggtaaacccgaatctttcaactgaatggcacccgataaaaaatgggtccttgactccagcagacgttgttgctggaagcacgaaacgggtctggtggca

SEQ ID NO: 1695 - DNA, 23084 bp, synthetic construct
  source 1..23084: mol_type = other DNA
  misc_feature 1..23084: note = Synthetic
ttcgtacgttcatacttgcagggcgtttcaattgtttttaaaccgagtccagtgcgaatcgaagtgagttaccgctccgaattatcgtctcggcaatgctcagaataaaattagatatccaactgagaagcaaatcgaatagcatgcggagtgcctttaatggcactccgcagtactgcgacatgggcaaggccatcgcgagcggccttcgaactcgtccgtaacgagctgggcgtggagcccgcgggggcgtaggagcgagggccctcagcctaccgccacgagcgaacagaaggcccggcgcagtgcattcgctactgcagcgggcctccgacttaaccaactagctagtcaattcgttccgtacgcctcagatatcgatcgaactgagggacggtaaaatcgacctctccacttgcggcggagtaaatcatgcccttgctaattaattgagcacgcaaggggccaatagacgaaacgtctctccccatataatgggccacgttcgcgagcgtacagggaagcccgccgcatcgcaccatggcaaccagaaactccttttgccttggggtgcatcgatcggatcgaacgctgaagaaatcttcgtcaagacgtgcatccgttatagaggtgcagttgagcacggtttccagagaaacgagcttacaatcagatgaagtccaaatggtcgagcaaagctcctggatgaaatacgggtacccctctgtgtagtcgatgatggcatcaatcgcttcatcggaatagctcacatcgagcttttgcgctggcctgacaatagcctcaaccgccttatcacggggaagcgaatctactttcacaaagctaaactgcctctcggtataggtcttggcttcgcccaacatctttagaagcttgggcaggccggcacagccaaacataacgggaaggccgagctgggtcgcacgatggagcgcgcacgacaatgcttcaagctcttctttgccggcatactgcagctcgtcgatcccaataaatatcgaggctcctgccgcctgagcatattttcccaaaacgacgagcgcataggtaaaatcgccggatagattatgggacgaggcgagaacctcccccagagtctcttcattaaagcccgaagacaatgggccatcgcccgcatcaacagataacgttaacgatgtagacaagttcttaacctgctccaatttactcttaacgggtccaattctattgagcgaggccgatagcgcacagcaagccgaagccaaaggggcaatcaaaccccttttctcctcgacctcaatatggcggacgagaataccctcgccctcggccattgattcgatcgagttaagcagcaccgtcttgccaacgcccctaaggccgtacaagacgagcgaacggctctggtagtttgcggcgagggccttgagctgaagagaggccgattcgaggatatcgttgcgcccggcaaggtatttgggcatcgcgccggcaccgggcgtatacggattgcgataatcaatcattgcaagctcccaaaaggtggtgtcgggatagttggtgtagagcccgccccgaagcgacttcaccgcttatcgcacactcttttcggtcgtcattttatagctacggattatcatcacgagagcatttcaagcaatcggtacaacttgcacagcgcctttaatggcgctgtgccgtatcgctatttgttctcattctttttatcgaatgttgcatgcggcgacatggaccgactgagattatctttagcgccgtgcaataaaaaagtttttagcgcgttcgatttcccctacacacgaccgcgctttcactgtcaaaacactcgaccgatacccatcttgaatacaagccgtccaatctgcaaaggcctttttctcttcaattctgccctcctctaactaatttctacgggtggatgaactttgcaaaacgctgaaattggttttacggttgccactcgccagcagtcaaaaaggcatttgcactttaatttctggttgcacggaaagcggcaaacggctttccgattacattgcgaagcgcttagacttttattattcgcagccgaaagacaaccgaatcatctctcagtttaaatcgttgtcatcggtttttcccctaacaaatagttagccgcgaagaccgtttcgatatcgtgctgctcttgattttgagtcagagggctcgctgcagacactttggtagtcaattcgtcaaacccgaaatcgaccatcggataggggagaggcatagccggcgacggttccgaatcagcgcgtccgaatgcgaatacgcccccaagacgcgccctgattcattgcgacgtctcccttcatttgctctttttcccacctgttgctttgtcggacattcatcaggatccctatagtctgtcagacattcccgctccacagttgttgcgttgtcagacattgaattgtcagccaataccattttgtcagacatttaccggcatcccaatttccgattatccggtcccacagaaacggatcccacggcagaaatccccccatgcggagtcggatcgccccgcggcgcggccgcctgccctgcgggcaggcggcaggtgcaaaacggccttgccaattgtggatgccgctgcggcaacaccctgacctgccgaaatacgtgccccagactacccataaggccattttgcacgccagcttcgttcaacgtcagacattgggaatgtcagacattgaacctgcggcaaagccgcagctggggccgcaagcggcctgtagtcgcttcgctccgctcgctcccgccaagcgaaatgtccgacaggctgtcagacatttagatccgcttgacggacggcctgctcgcgaagctcacgatcggccgcatgtaaggagatacgaaatgtcagacatttcgacagatgaaaatgaaccccggaccgccccgcccaatttgtcagacattggccccggcgcatcccaaatgtccgacatttcgcagccccagacgccggcccccatgtcgccacaggcacagacgactcggccgctcgaaacgccgccggccggcctgtcggacattttgccgcccccagacgcctcccagccagccacacgccgcatcacggtccgcctaccgaccgcagacctgaccgccctggacgcgcgggccgacgccctcaacgccagccgcagtgactacctccgcaccctggtcgccctgcccgtcacactcgacctgacgtccatccgccgcgccacgccgggcaccgaatcgctcacccgcccgctcggcccggacctcgccctcacgcagtccgacggccaaacggaaagtttggccgtccaggccatcaccgacagcatgctcgaatccatctcgaacgaggtccgcgccatcggcgttaactacaaccaggcggtaagggctctcaaccgcatcatcaagaagtacggcagccaccgcgcactctcgcaagacgagcgggtcgagatcaccgggctctacgagcgcctctcgaaacagaacaaggcgatctacgaacgcctcaaggccctcgcatccgatgtcgagtccctgtccggcaaaccgtccgtcaacctgaccgccgtcggactctcgcaatctggggcccctatcgataaatacggacccgagcgccgacgccgcgtccgcggcaagaggcacgggcaggcccgacccgatcgaatcggggacgggggcgactcatgacgtacatgaagccgctgtccggccacagctccgtcaagtggatccgctactacctcttcaagaacggccgcgccctggacaaggacttcctcaacctgaccgaccgcgactggaaggggcgggactgggcgaaggtcatggaccgcacccgcgagattttcggcaacaatgtgccggtgaaaaaagattccaaggtccgcacctacgagcacatgatcatctcgctcgacgagaaggatggcggcgtggaactcgacgatttccgtgacttcgtcaacgaatgggcatccaaatggttcgactctcgtggaccggaaggggagggcatcggccggttcgaggtggcaatcgcctaccacgatgacaacaaggctcgaggaatccaaggcaaacaaggaatcctgcatgcgcacctcgtcatcaacaacaccgagctcgagacgaagcgccgcatctccggcctgctcacgacgaaggtcatccaggccatgagggccgacctccagactatgtccctcgagcggggctggcatgccttcgccaccgacggcaagtcctacacacaggccgagatggatgccagggggctacaggtctcacgcggcaagaggctcgaccgcgccatggcggccttggacaacgtcctcgccaacgaggccaagggtgcgcaggatgtcgacttgggcaaggcgatgatggagcggatggaggagcgctatccggtccggaagatggtgcccgagacttacgggggaccgagtccggatgaggcgaatcaagccgagagggaacccggcaatacccggcccggcgacgtccccgggttctcctatacgactatgcggactgaggacggaaaggttctccgcctcgtggtcccgcgtggcttcggtgattccgacacgatggcggagcgccagatcgagagacgcgagggctggtcgtggaaggacgatatccgggaccgcgtcgatgtcgcagtccgcatatcggagggcccggcggattttgcggccaaactcgccgagctcgggatcaccgtcaactacaaccggaacggcgatttcgtctaccaccatccgagcgaccccgaggctcgaaaggtaaaggggtctacgctgggcgcgcgatatgccgccccgtcggttgagcaatcgatggccgagaaatacgccagccgccgccagagggcccaaggcctcgccgggcgcgagcgatggatggacgaggacgagcgtgcggcggcgctggccatcgcgaaggcggctaggccctgcacgcgcgagggcgcggagcttatgggccgtctgaaatcgaccatcgagcagaatgactccgcgcctcgcgaccagacccggcgcggctccaatgtcgagtacccgtcctctttggcgagctcgctcggcatcgattaccccaaggcctccgcttcgggcgacggacgtcgcaagaggatgaccgaggaggagatcctcgaggccatggcggacgtgcgagacgagaagggttacggcggccttgccgcgaacaacccgtcgggtgcctcccccaaatccaacgtctctcgccagcaggaggatgcgaccgagatccagaaatccaaacaccactagggagcggacatgattattgccattgagtacaagggcggtcgcgtgaaggagttcgacacgagcgccttcacggcgacgaacgccatgagcgccggcgacaagacggcgcgaaacgtcatgaccgaactcgacctccgactcgacctcgtcgacacggtcggcctgaggctcgacttctactggtacgacgccgcgccgcagggggagcgcgtcgacattcccggcctcatggattcgaagggggaccccgtttcgctgactgccgcggcgaggcgtctggggacctccgtcctcctctgctcccgcgagggcataaagcggatttcccgaatcatagttcagcgtgccaacggcacggtcgacgcgctctggcgtcagggctcgggggactggctcatcaacggcgcgaagttcgaggcccagcgtgtgctgtcctatacggacagcaacgtctcgtcgatgaactcccaagcggtgttcgtcttcaagtacatgaagaaggcgaacccctcgctgaccgatgccgagatctgcgagctcatcggctaccccctcgatgcctacaaggagatacagctggacgagtccaagaacgcggagaagacgacgggcgcggagctcatcatgaccgacgatggggaagatccaatcctcctttccgacccagaggccgccgagtcggacggctcggcggccgccgacccttccgactcgacatccgattcctctttcgggaggcatttcgccgtcgaggacgacggcgatgccttcgatgacgatgaggactccctgttcgatgtctgacatttgccacggccgtccgattcatgatattttggactggatggcgtgaccccaagcgccatgaaacaggagagacgaatataccgcccgaccgtgcgaggcacggctagctatcactgacttgtatacgcatgactgacccggtatgactcggctcgtctctccgctcgtcctgacaggagatgacaggttttgcagaagcgcgaagagacacgaacgcaagaggtcggcggaattgaatcgggtcggtcgcgatgagggcggccgtgaaggtgagcgacgccatcgcccggcttcgcaggcatgtggacacggcggagctcgaggaggccgtcgatgatttcctcgcggcctatggcgagcttcgcagccagttctattacgaggactccgaggcgcaggcgaacgccaaggcggcctcgacgcttctcgaggcaatcgaccgcggcctgatcgagctgccgcagaccgatgacgggatcgtcatcgtccccgacatgaagctgcgccttcccgacggcgcgaagctctacgtcaactcgatcgagatcgaatccaccgcgaccggccgcgccccgatcgtccacttcgaggacggctcatccatccgctgccgccgcggctcgggcgtccagattgtccgaatgcccccggaggaggagcaggatgacaactgaaggcaatccgaatctcccgctgccgttccgcatccccgtcctgcgcgtcttcctcttgccgttcgcgcaaaccgggaggcgtgaccgcctgctgctcgccctgctcgcctgcatcatgtccgccgcgggcttcctcatgcagggaaacggatcgtatgactccgacggttggttcctgctcgccacgggaaagcggatcgtcgagcacggcatcccgtacgcgaacccgtggtccctttcgtcctacaggccgatcgtcgtccagcagtggctgcacgatgtactgctctacggttcgtatgccctggcgggatacgccggcacgatactgtatcaggccgtcctggcggccctcgtcgcgctctccatcgcctttgcggtccgaggattcggcgatagacacctcaccttgccccgcctgctcttctgcataggcctagcccttttcggggcgggaatctacatctcggtccgtcccacggcatggtcgatggcatgcatgtgcctgacggtcggcatctgtacccgttggaggcgcacgggcgattggcgctaccttatcgccctgcccgcgatcacggtgctgcacgtcaacatgcagtctgccatgtggctcctcgatgtcttcatcgccggttgcttcctgctgcccgacaatctttcgaaattcaagaccgttgcccccggggagatgttgggcggaatcttccccctaaccatcgccttggtcgcgatgcttgtcgcctccctcgtcaacccctacggagtcgatggcgcccgctacgtgatgacctcgatgggggcggcgtcgtacggcaacgtcatatccgagatgaagcccgccctcgaggcgaccgggggcttctgcgtcgtcttcctcgcagtcggtctcgttcccgtggcggcggcgctcgcgatcggtcgcgggcgaatcggtctccccctgctcgcgatcgtcctcgccgccttcgtcgccacgatgctccattggcgaaacgtctggaccttctcgatcgcatgctccctcgcctttgcgagcatgcttccaaaaacggaggaccccacacctctgaaatctcccaaagcggtgagatccgccgccctgatagccctccttgccgcaatcggcccgattgcggccaactgctgcgcctgcgccgcgaacggcgggcagacctgctggcagtcctccgagcgttcggcggagacgctcgcggaggcgatttcgggcagcggtgcctacgaccccgtcgtatacgccgaggaccccgtcatctacaactacctggaatggaaggggctgaaggtcccgttcgacctgcgccccgagctctgggacgagagaggtgccatgggtgtcacttccccgtaccgcgactacgtggacggcatgcgatcggaaaaggcgaaactgtcctacctcgcctccaccggcttcgactactacatcgtctcggcggacacggccgattggtacaagatgaacctggacctgaaggccgtcgacacgaccaacaccctggtcctgctgcggaaaggggtgtagggaagtgaagttcgaagtctggtcctgctcggagggggatggcctcccgaaccgtaggccatcgtttttccgaaggcacgcgaaggcaatcgcgattgccttcgcggcggtgcttctcggcacggcactcatcgcatccatcgcggcgggcagggctgatcaaccgacttttacggaaggctcgccctatgtctacgacggcgcccatgtcttggactcctctgctgccgacgcactgacggaactgaatgggaagcttgaggcccgagccgaaggcgcgcagctctatatcgtgacaatcgatagcctgccgccgggcaagaccatcgagggctattcgattgagcaggcggagcgcatcggtgcgggcgattcgaaaaaggacaacggcgtgctctacacattcgtgaaaggcacccgccaggatcgcctggaggtcggctacggtctcgaggacaggctgacggattcgacctgcgcggagatcctcgagaccgcccacgcctgttaccgccgcggtgatataggggccggggtaaagaacctcgcgcgtgacgtggccgatattattcagcccggcatcgtcagtcatttcgatcataccgtcatcgataaatttcccgaaaaaagcgccatggacaaacttgccgagggtgccgtatatctagtcgcctttgccttaatcgtggcatgggcatactgcaggggcgcggccttgccctcgcgcccgcgtcgcccgtacggttcatcctctcgcccgcacagctcgccctctcaccattcctccggctccccccacagatccggcggcggtcatttcggtggcggcgcctcgggcggctggtagcttcgcattcgacacttcgaccataatcgacacgataggagactcaaaatggaaggcagtccgaatcaggccgagacttcgaaattgaaaccgtggatggcggcggcattcgccgtcgtcgtcatcctcctcttggggatggcggtcggtggcgcgatgtataactccatgaacgcctccaagcaggccgtcgatggcgattgggcgcaagtcgagaacgtgatgcagcgccgggcggacctcatcccgaacctcgtggcgtccgtgaaaggcgagatgcgaaacgagcgggagatcttcaagtcgatcgcggagagccgcaaggcattcgagacgtcggatacccaggcgggaaaactcgccgcggatgacaggctgaacgcgcagacggccgtcctgctcaatgccgtcagggagaactatcccgagctcgcatcctccgaacaggtgaagaccctgatgacgcagctcgagggttcggagaaccgtatctcagtcgagcgcgggcgctacatcgatgacgtcgcggactacaacaggaaggtgacctccttcccgatgaacctcttcgcccatgccttcggcttcgacggtatcgcccagtacagggcggacgcgggtgccgcgaacgtccccgtcgtcgatttcaactgacattcaaccgtaaatcctgaccttgatatagcctcccgccgatacgggaggctatactattgttattaccggcaggcgtgccccaagcgcctcggaaagacaggaagtgaatatggcagcttatgaagacccgtgcgaactcggcttcgaccccgggctcgtgaagacggccctgatgtcgcgcgggcagttctgctccaagccccggaagctgattctcggtatcgacatgggtatcgccggcatcggaatctgcctcatggacgaggtgaaccgggagatcgtcctcatggcaacccatctgttcgattgcccatggaacccgaaaaacaagacgagtctggcatcggcaaggcgccaggcgaggtcgcagcgccgcaacatcgcccgccgcgcggcgaggaagaggcacatccgtaagatcctcatggctcacggcgtcattccagaggacgcgaccgccgaatggttctccgtgcgcaagggcgatcaggacaacatccgggtgcgcgtgaagggcttgagcgagattctcgacgggcgcgagttggcccgcgtcctctacggcttcgcctcccgccgcggctacatcgaccacggcaaggccgacaacgacaaggacgccggcaaggtgaagaaggccctgaaggaaaacgccgagatcatggaggccaacggctacgagacgttcgcccagtacctcataacgcagccgagaatccgcaaccgccaagacgactacacccattgcgtcgatatcggcatggtggtggacgaggtccataccattttccgccatcagcgcgagctgggaaataatttggcaactgaatcgctcgagggggagtatctcgccgcgctgcgctggctcacggatacgaccaaacgcgaccggatcatctactccaaggtcggttactgcacctatctcggcgagcccgtcaaacgcgccccgaaatcatctatctcctccgagatggtccgtgcctaccagacgctcgcgaacgtcaaggtcgagcatatcggcggcgccgctacgcagatttcacctacggagcgcaaccggatcgttcacgacctgttcaaggtctcgaagaacccgaagccgctgaagtggtcccagctgcgcaggaagctcggcctcgccgacaccgccacgttcgccggcatccgacaatcggacgaggcgaaggacatctgcgtaaaggttcccgcatggaatgccctctgctcgacgctccatgacctgaatccgaccctgctcagccgcctgcacgatgataccgatctcgccgatgcggtatgtgccgccgctacgttcgcatcctcatccgaatctttcgccacccgtattgccgagctcgccgacggactctctaaagatgacgttgaggctctcctcgagctgccctatggctcgaagctctttacgggatacggctcgacgagcctgaaggcgctccagatgctccgcgatgcgttcgaggacacggccatcgaccgcctgtatgatgccgaggtcgcgacggggctacacgatgcgcggaaagccctcgcggccgagcgaaacgtatctgatgacggtctcctgaagccctattcgagctattccccgatctgtacaaacccggtcgtcctgcgctcctgcgcccagctccgtcgaatcatcaactcgattatcaggcactatggcctacccgatacgattcgcgtggaggttgccaaagagctgaagcatacaaaacacgaaaaggagctcattgatgacggcaacaggtacaacaggagggaaaacgagaaggccaaggacgatatcgttcaattcttcggtcttgccgattcagaccatgtcaggggaagggatttggagaaagtccgactctacaacgaacagggcggcaaggacccctacacgggtcagggcattgatttcggtcgcatgctgacggaaaagggctatgtcgagatcaaccacatcctcccgttctcccgttcctgcgacaactcgaagaccaacaaggttctcgtgctgacgaaatcgaatcgcgacaagtcgaaccggacgccctacgagtggatgacctcgggcgaacccaccgcgccgaactgggatgaattctgcatccgcatggatgtctgggctagcgggaaggagccgaagcactactattcctcgaaactcgcgaagctgaaggaggataacttcacggataacatcgataccttcatcagccgaaacctgaacgacacccgctacatgtccaaggatgtcgcgaaatggcttgccgactgcctcccgttccccgcggacggacgtagacacgtcttctgcgtctccggagcggcgacggccctcatgcgcggaatctggcgcatcggcattctcgacggtgacgtcaagaagaaccgggaggacgaccgccactatgccgtcgacgccgcggtaatcgccgcctgcacgccctcgattgtcaagggcatcgccctcatcagcgaggaacacgcctcgaaccgagatgccgaccgcctgctggatggctcgctgccgtatcccgagtacagggaccaggtcaaggcatggatcccctgcatcgtgccgacctattcaccggcccgtaccgcgacgggggcgctgttcaaggagaatgccttctcctacaagggtatcgatgggaagggcaaggacctcatcaagaagaaaaagggcgcattgggcccctgcaccaccgcatggaaggacggcaaaggcaccgctagggcctacgacggacagtacggcctgcttgccgtatatgatgaatctgccgcgcgttggcttttcgatcccctctattacatcgacgtgcagaagcggaaggccgaggaaccgttcattcgaaagttctccaaggacctttcaatcgactattgggagaagattccgctgaccggaaacgagccgagccttttgttgaagcgaggagtcgtgctgattcaagacggtaccgtcgggcgttattacggttatgacattgcacacaatacagtaaagctgtcgtcctccgggaaagttcccttccagaaaaccggcccgctcgcagctgagaagtttccaacgccgacgaagtggactgacgaattgaaggtcatgcaggaggactgcttgggtctctgctggcttgagttcctcaccgaacgggcggaccgctgtcagtagatagcgggaactatgtgagggggagggcgcaatgccttcccccttcgttttaaaagctcaggaagagctgcgttcccggcgtctcgtttcccccgggaccggaaacaccggtgttgacgaggatctccctgtcgacgtactgcttctcggtgaactgcatcgccacgacatgacctgccggcgggaggtttttcctcagctgctcggcatgggcctccgcagatgccctactgaggaggttgcgggaatagatgctgttctgctccctgatgtacccatcgtcttccaggaaccgcttgaacttggaataggcgtccttgtttgatttggtcttcgtggggaggtcgaacatcaccaggagtctcatgattctcatagccttcctctcgttctcaggctgtccggtgtcgccatttccaaaccgatgagcgtgggcagcagaagctgatcggaatctttaagctcaatcgcccttctcagggattcgcaatagacatcgatagccgtctggacgggcatttccttgttgtccaacaggacgacaaccgatgtgaccttcgtcaacgtttccttgttcattctcgaaagcggggccaagatgttctccttgaccaccatgaggtctacgacggcccgaaacggctcgatgaggtcatcgactaggttgattgcattctcggcgctatggtggtggatgccgcgcgatacgagccatccgtgcgagacggcgcattgtgcgatgccagtcctgaggattgcgtacccgaaattcaacggcgcggtcatgggacctgtccatcgcgacccgtaggggagcaatttagagaagtattcgccggctgccgcaccctcccgatgcgtcttgtcgttgctctggacatccctggcatagctgaggattttctcgacatcgcacggcttgccgccgctaagctccaaggcacgcgcctggttctcaattttcctgcgcacgattttcgcccagagttggtttctgagcggtttcgagatggccagctgatgctccacgatttccgcatgtcttgaatgtgcgcctatcgggagcgccaggccgttgggcatatggttggagccgcagaagaggacgccaatccccgcatcgttgacttgccccataagcgatgccgtgatcgagacttgggggttgtcgattatgatgacccagatatcggacaggggtattttgtcgaggactgtatcctcgtggcgttccttgatgacgagacagctgtcctgggcgcagaggtgcttgggtgtgccgatcgtgaccgtcaatagcataggtggctccgtttcccggtatcttgtgagatatggactgggtctttacgtatgtagacatctaatcgataatgttattgccgaaacggcaggctttattcaccgatacaccacatttgatcgggcattttttgaaaaccgaggaaagagggacggggttaaatggcgattttcatccgaaaaagcggtaaatcgaagtcgttcgccgccgatctttccctgaaaagcgcccctcttgaaaggcgattaggggtaccgaaagccgttttacggaatttgaaattgaaaaagcccctgctagaggggctttttcagcggagggtattctagcatctcaatgaatggcactcagctagggctatcgccgccctcaagacatggaatacccgattctagcatctcaatgaatggcactcagctagggctcaaagtaacagacatccgccacgggaatgattctagcatctcaatgaatggcactcagctagggctcctagaatggattggtgttccttttccatattctagcatctcaatgaatggcactcagctagggctcggcaatgcgcagttcctgcggcaaagagattctagcatctcaattaatggcactcagctagggccaacagctatctcatcgcccatcgcgaccaattctagcatctcaatgaatggcactcagctagggcaggagtatcgcaacttgcagccaatcaagcattctagcatctcaatgaatggcactcagctagggcaagagcgctgtgctcaacatgaccgagcggattctagcatctcaatgaatggcactcagctagggcgtgcgtcgcgccagtgccgttgacgacctaattctagcatctcaatgaatggcactcagctagggctgacacagctccgagcatcggcgcaaagcgattcaagcatctcaatgaatggcactcaactagggctcgggcgatatgtctgctgtctacgaatcaattctagcatctcaatgaatggcactcagctagggccgtacaggcttcacctgcggtttcttgtggattctagcatctcgatgaatggcactcagctagggcatccacgcggtaggggtaggtaccatgatttattctagcatcttattgaatggcactccgctaggacgaagacttatctctggattgcatgcgaggtagtgagccgtcaggcttcggtactttcggtagaacccggacagcaggtcggccacgcggcggttggcggcatccgtccaccagctcgtgaactggtaggaggccgaggacttcttcttggaaccgcccttacgcgtcttctgccaacgcgtggtgttggagtagtacttggtgtgccgcccgttcgagatcacgaagacctgaacgtactcgaacagccccgtgccggaccagaagctctcgcgctggcagcgctcgatctggtcgaacgcctggcgaagctcgacgccgcggcgcttgagctcgatatgcacgagcggcaggccgttcaccaggatcgtcacgtcgtatcggttgtcgtgggtgccggaccctgtcgcgtactggttcaggacctgcaaggagttccggtagatgtggtcgcggtcgagcagcatgatattgcggaacgtgccgtcgtcgagcgtgaagtcgatgaccggcgcctactggatgcggcgggtcttctccacgatgccgtcggtctcggcggcgacgtgggtgcggaagaaccgctcccagtccgggtcggtgaaggcgaatccgttcagccgctcgatgcggtcgcgcaggttggcgatgagggcggcctcgtcggtgatgtcggcgtactcgtagccctggtcgatcagctgcgcgatcagctcgtcctcgagctcggcctcggattggtaggcggtcgagtcgtgcgccgccgcgggagcctcggcgcagaccgtggactcggggccctcgagcagcaccgagtatgatggcgcggccgcgccgccgacggaatccactatcgtcacgaggccgccacctccttgcgcgggaagtcgagcaggcggtcgcggtagtactcgtattgcgcacgacgcgcctcgatctcggcgggcaggccgtcggtcagcgatgtcgtgagggcgtcgaaccggtcgaggatgtcgacgaccttctgctgcgtttcgagggatgggacggggatttcgacctttgacagacttcctccgtttgtatgagctcttgttgtcatcgtgctgaacctaataatctgctttctcgattcgtatgttcggaagcagtaagcgcaaaactcaggaatcagtgattgggtcttcggacgggcacgcagcacaaaaccgctgaacacagcattgggtatatcttcaaggcaaacagatgcgagtccgatttcgtttcttgtctccgatgtcctagtaaagaacacatcgcctcttttcaccgaataacgccgctgctcgtcttcggtcgcgtcaacgcgtccaaagatatccacgctaataaaagagctccttttgtatgaatcgacgtagttgacgatcggcaccccatgaccaaacgaatctttgtctttactgattccgtttttaaattcaaacaaatcgcctaagcgcctcatcacgacagatccgctgtcaaatccaaccaagctccccggagacagcaggcggtcgcggtagtactcgtactgttgcttgcgacaaaccaactcttcactgaggctatcggccaactcggtgaaagcgtccaagatgtgagcaatctcccgttgaatctcgatgggcgggacggggatctcgagacgggatagatctgccccatggacatggggtactccgctccctttctttttggcgtagatccagttctgattcgacttgagcaattggtagaggaaggcggaactcagctcaagttcatcattcggtgcaacgctgaaggcatctgacagccagattggcgtgtcccacatagagacatgtccggcatatgcacccgatcccgctacagcgatggttccggcaggtctgttcgagacgttgtggtaataggctggcttttgcccgcccgcgatcacgggtacaccgccgtcaacggcgtcctttgccgtgatgacctgccccctgtcgaagtgggcgacgtcgtatagatttcgatactccaccccgtcggggcagagctcggcgaccggctttccgattccgctcatgcttcctgccttcatgcggccacgcggcgtcggggtcgccgcgcggccgccaatcgagtcgattgctccttgaagtgtgcgggaaggtgtaaatttctccggagtgttgccgcagcggcaacatcggcggcgggcggccgccttgccgagtccatcggttgccggagggcgtgcggtaccgcagccaagcccgattgcgacccgggtctttccgaataggccgtctggtttcagacgtatggtctgagctggcagccctctcggttctgctgcctcaagactttggatgacgacaggacgcttggcttgggggcgccttcggagggcgctcttcctgtttgacttgacgcctggcgtgtagccctgtaggcgtgtagccgtgtagcgagatggggcgccacaccgcaccgagacgctgttttggagccgctattcctataagcctaaattaaggggccttctcgtttcttgcgagaaggcccctatttctttacagatggaattatgttgggaaacggcatcgattgccgatagcaaattcgagggacctaggcatcgggagacggcattttggcgagatgcgctttggaatacattgcgatatcgattttgccctcgtacgggtccatgtggccgtggatttagacgaccggcttgcggttctcggcctcgttctcgcagaggtcgaccagctcatcgatagcgctcatcatctacgcctccagatccgccacgatggcgtcgatggcgtcgcgcatctcctgctcgcgggcgacgatgccggcgatgcgcccgttcagctcggcgatatcgaccttttcgcgagtgtcgcgcttctcgacccaggtggagacggacaggttgtacttgttctcgccgccgagatccgccatgccgaccagcttggagacgtactcctcctcggtgcgcgtctggacgagcgcgttgatgcgctcgatgtgcccgggcatcaatttattcttgttgccgacgtgctcgaacaactcggaggcgtcgatgaacagcgtcgagtcgtcggtcttgctcttggagagcacgatgatgcacgtggcgatggacacgccgaagaacaggttcgccggcagctggatgaccgcctcgacgaagttgttgttcacgaggtacttgcggatcttctgctccgcgccgcctcggtagagcactcccgggaactcgacgatggcggcacgtcccttggcggaaagccaggagagcatgtgcatcgcgaaggcgaggtctgccttggacttgggcgcgagcacgccggccggtgcgaagcgcgggtcgttgatgagtgtcgggtcgtcgtcgcccacccacttcgtcgagtagggagggttggagataatggcgtcgaagggctcgtcgtcccagtgcatggggttggtgagcgtgtcgccgcgcgagatgtcgaacttatcgaagccgacgtggtgcaggaacatgttgatgcggcagaggttgtaggtcgtggggttgatctcctgcccgtagaagcccttgcgcacgccgtccacgcccaggatcttggcgaacttcagcagcagcgagcccgacccgcaggcggggtcgtagaccttgttgacgctcttcttgtcgccgatgacgatgtgcgcgagcagctccgagacctcctgtggggtgaagaactcgccgcccgacttgccggcgctggaggcgtacatgttcatcaggtactcgtacgcgtcgccgaagaggtcgatgtggctctcgtcgacgcggccgaagtcgaggtcgcggatgccgatgatgatcttggaaaggcgctcgcagcgctcctcgaggtttccgccgagcttgttgctcgtcacgtccacgtcgtcgaacaggcccttgaagtccttctcggacggctggccgacgttcgatgcctcgatggccttgaagatgcccgcgacgcggacgttcagctccgggtcgcgggcggggtccttcgccacgttgcagaacagctgcgagggcaggatgaagtagcccttgtcctcggtgatgccggcgcgcgccgcctcggcttcctcgtccgacatcgcggcgtaagagaaatcgtcgtcgcccgcttcatgctcgccatcgtcgatgaactcgcagaggtcctccgagatgaaccgatagaacaggaagcagaggatatacgccttgaagtcccatccgtcaacggcgccgcggacgctgtccgcgatgccccagatggctttgtgcagctctgccttctcgttctcgctcgccatgtgtcttctccttgttcccggcgtctacccgccgatgtctgacccgtattgctcggacttgcctacgctcggcgctcccgccgctcgcgctcgatccactcgtggagcagcgccgatatcgtcgtgtcgtgctcagccgcgatgattttcagttcgcgcttgtcctccctcgtgacggagaggtgcagcgtggtgcgcgtctctgttttcccaaccatatgccgctccgatctcatggacgtccatttgcccaattgtccacccttttgcagagggcggctaagtcacgccggcctacggtggagaggcctacacaaccgagcgccaccgatcttgtcctgccaaaacaaaaaacgcccaggggcaagcccccaggcatttacaaaaagcgaaagcgacgcccccgtactctcgatacaacatacggaaccgccgctttcatttggcatcttaacccaataattacagcctcgttaaccgaatcaacaggagcatattgccgcagggtcaataaaaggggcgagataaaagaaaagcctttgcggggaggcgcgggattaacggctggaattagaagcagaaggcagggcagatatctgtatcagtgctatccgaaatggtccaatttgagccgccatcgttgcttgtgcacctaaatccgtaattaccaactagagagcgagtccaaatgttaccgggaatgtaacgccaatttgcgctcgagcttgtgcagccttttaccctataaaattcgtattgagtaccatcgccatctttgtcaccccagagttcagtcgatgaaagtaaatagagtctatcgttagtcggagtaactattgagttttgatcttgccccttcgtgttgttcgtcaatttggtgacggtttgcacctttgattgaaaatcatcaggcatgaggttccagatctcgccggagttcatcttctggcttccaaatgttctataggtggtagttacaaacgtcaaccccgccttgcccgaaccgtccgcgagatcatcgtgattaatgccgatgattcgataggtcacagtcctgccatcggtgagcttcatcggccacgaggtattcgcatccatcgcggccttggccttggcgtatacgaccgaggacgtgccgttcttcgcgatgtcggtggcggccgccttctgctcatcgagcgtccagtccttggcctccttggaggctacggtcttcatcgcctcgcggtgggccttctcctcggcgctcatgaagctatcgccgtcggtgccggagtcgaccgtgttgccgaccaggttgaactggtttcggatggcgcccgagacttgaggtcccgcgaacacgaagaccaggccgatgatcgcgaggatcagggcgtactcgatggttgactgccctcggaggcgggtattcctaggagataccccccccccgaaggttaattgccgctgcatgcatttgcgacactcccttcgtatggggattgatattgcatgcgggagcgtacgatgcagcggcctaatcagccctcaacgtgccgcagcggcatctcaaaacaagtagccaatacgtcccgaacgacaagcgggatatctttcttgacatcccgcagtacggctggtcgttattattctcattcttttatggctttccgcaactcagccattgcataggatattttccttctcctccttcttatccggcgcccatgcgccgcccccagaccacgctattcctcaacatcgaataattttcagttttgaggaatagcgcccgaatcctcctcccgtcacgccaattgtcgtcactttatgaatcgtagattcccattacgcatatgtggaatctcgcctattatgtgaaccaccgaacgggtacaggaactcgcatctcaatgaatggcactccgtttgggtaagaggattcatccattgggatggatcactcgcggagtatatcctctcggtcggttttgaacgccggccgaggggtgatctcctttttagaccgcaatatctaaatcgaaattcgcgggcgctttcggtgaaagcgcctttttgtactacaatggctgatgatctcaattcggtgcgccgttattccttttttgggataacggcgcattatctttctgttatactcgaaagacagacagggcgtaccccaagcgccttgtggaacaggaagatgacaacatgccccagaatctatacggttcgcgtgcatcccgtctccgagatggtgcgcgccatgccgactgataccgaagtgacagaagcccagacggcaagccccatcatcgccccgcggcaggaggcgatcgtcctgacggcctgcatgcgctcgagggacgttcgcgaggacgtcctcccgatgctgctcgaggacgatttcgtcaggtccgaccatcggacgctgttccgcgccatccgtgccatgcacgaggcgggctatcccatcgatgaggtgtccctgctcgactacctgaaatccgcccgcaggctggatgccgccgggggagagcaggcggtgcagcgcatgttcgggtccgatatgcccctgctgtcctggcaggacgcatatgaccggctcaccgatgcctcgaggcgcaggtcgctcgtcatggccatgaacgagatcgaggcgaaggcctacgagaccccggccgacatgaaggcgttcgtctcgaagatcgagaactcggtcgcgcaggtgaccgaacgccgcgacatgcggccctaccgccatatctcgtcgtttctcggcgcggccgtgcgcgaggtccgtcacctcgatgaagttcccttcgagtccaccgtcgtgaacacgggcttcgcgacactggacgagatgctggccggcctccgtgcaggccagctcatcgtggtgggggccagacccgcggtcggcaagacctccttcgccctcacgctcgcgttgaatgcggcccgccggggcgtgaaggtcggcatcttctcgcttgagatgtccggcagggaactcgcccagaggatcatctgcgcggagtcgggcgtctccatctcccatttccgcatggggaccatctccaagacctcatgggatgccatcgcggcggcctgctgcgatatcccgggcaacgacatcgagatcgaggacagggcgagcgtgacgataggggatatccgcgccaccgccgcccgcatggtgcgcggcgccgatcgcggcctgatcg

SEQ ID NO: 1696 - DNA, 23084 bp, synthetic construct
  source 1..23084: mol_type = other DNA
  misc_feature 1..23084: note = Synthetic
gcattgggcatcaccggtcgttcggttaaagactggaagaaccccaagcgcgatattatgctgcctgttgacgaggcgtgggacttcctaggcgactacgccgagaagctggagggccgtacttccgaacttcttgagagtaagcccaacccgatgccgtatcatcccatgactcgacaggggacgctgtcactgcaagatcgaattgataatcaggcggctcttgctgcctcgaagcagattatgggtgacggcaaatcggttgttgatttcgcatacgtctaagtgttgccggctaatttaagagctgttctgccctttaagtagacggaatctagtccatatctagacggcgaatcagcgaacaataggagagaacctatctatgacaataagcgatgggatgattcgagcggagttgagaactttggagcaaatggaaaaggcaaaacgcaagtgcgcgaactgtctctattgcacatccagggacaatgttcgcgacaacctgcatagacccgaagacacgaccgttgagtatctatgccaccgtagggaaggtcacgaattcgagaccgcccattcgaaccgatgcaattattggaagaagcagatcgacagctgatcctagcgccgcgttttcgcatcgtcgcgcggcttgttttcatcaatcccgcgcaggtcgaactgtttgtttccgcgtttaagcacaagctgccagccgcacgcatcgcagatcttgacaaactcatcgatagtgaagcgcgtgttgttgtgcagtcgcgtcgacaggcttcccttttgcttgccggtcttaattgatgcatcctgcagcgtcatgccgcaatcttggaccatatagcgaatggcatcggatgaaccgattcgttcaagcactgaatacctctttcagatatacgatagtctatttcgattatagctaatctagaaatattctagacgcgacaaagtgttcgacgtactgctaacggcgctgggtttcattctgaaacctataggctccaccgcgaaattgccgctgcggcaagtcgcattggatatattttgtctgtcccaagatgtaggaggcaattcccacattaggaggacagatggataacgacacccaattcgatttggcagccattcgaatggcatatttcgcgcttcttctgagcggtcgaaagtacgacaacctggagctcgccgttgctcaggaaatgttaaagatgaatcgcctagtttctgaacgctcgttgccctccttgattggtcgatccatcagaattaccgcgacgatcaactcggttgaattcgaggaatcttcaaagcgatatctgattaagttccaagccgataatgatgaaaaagaagagcgagtccgttctgaacgcatggattccaaccacaaggatgcggtgaaaaagatttgggaacgagatttggtcggccaccgtgccattatcttcaaatgcaaggatagggttggatccaaagaggctcccaatggctatcgaatcgctccatattgcattgatcttggcaaggtggagtagatacagatgaagcagccaaaacttgaagacttgaatctaactgcaattgttgaagccgagctcgagaagcgcaactgcgatggactttattctccatgcaatcgctgtgagtgcggatgttcccgtacgaaactattttcctgcggcaaagcgtgtgcagaatgtcgtcccggcatgcagcatccaggcacaagcgatttgaagatcgtctcggttgatgagtattgcgaaatcatcgaccgtattgaagccgagcggaagcgtctcaatgagaaacgccgtgcagaagcagctgcaaataagaaagcagaacgactcgaagctaagggaattagagaagagaaagccctaaaaaagaagcaggagcgagccgagaagcgaaagcaattcacggataaactccgtgcgcgattcgaagcgtttgttgcagatgtttctgctgccgtgcgcacgagcatcctttgcaaacttctcagtggtgtttcaattggatcgattgtattttcgattgcatcgattatcttctttgagatcatcaagtgcgaatggttggcatctgcggcgaaagccgaggcgcttgcagcggtctatctcttccaaaaactgtttatgttcgaagcgatttatgtcttcgtcatcgttgcgttcacgattggcttgatcatcgttcgcgttgttcgcggcgattacaaagcagattttgagctggaaaatcaatctgaaaaggaagagaaggacgaccagtttttcctatagaccttcggagctcctgtttctagagtgctttcagtgccagattaaagggccaatccgatttggattggcccttttctatattattttgaaaatgattttcatcggtctcattgcctgattcccagctcctaacaagctcgacagccttcgcaattaccaatcgagtcatatgcgaagacttttacaacgggctccattttggttttgcaagtccatactgcagagcgtgcaagttgtttttgaccgagagtcttacgaatcggaatatgtcatgattctaaattaccgtcacgacaaaattcaaaatcaaactgggtatcagattgataggcatgcggagtgcttttaatggcactccgtggtatcgctatttgttattattctcatccttcgttcaagtaggaggacagtctcaactggattgtgacgctcaatcagaaaagatatttcggcaattcagtccgtttgatatctacgaatcaaacgaaatctaatcatcctttcatacggattgccttttgctattgccatttagatgctcagtttagatacggatcatgtccaaaaggacgaagcagggcgcccatggattcagtttcatttacttgtttgccaatgattttacgaaaacaaagtgactctaatgcctattgtgtgctcgattcagttttcaatttagggctacagggattattccaagcagagattaagcaattggtagaactcccacagcgcctttagtggcgctgtgctgtatcgctatttgttctcattcttattgtcgagaggtgcaggcggcggtatgaatcgactgaaattaactttagcgtcgtgcaataaaaagtatttggcgcggtcagtttccattacatctgacggtatttttaccgcaacgacttccgactgataccaatttgaatacaagtcggcagacctgcaaaggtaattttctattcaattctgccgttctctatctgatttttacggccgattgtactttgcaaaatgccgaaacgggttttcggattgttaatcggtagcgattaaaagccggctgcgcttccatttcaggttgcacggagagcggtcaacggctttcaaatcacatcgcgagtcgtttccgaatttatatttcgcatccgaaagacaaccgaatcatcgctcagattaaatcgccgcaatcaattttcccttacaaatagtttgctatcaattcattttcgaggtcgtgccgaacgtgaattaaagtcagcggactcgccgcgaacactttaaaaaccaattcagcagactcaaaactgttcatcggatagggaggaggcgcatccgattcgagttccgaaccaccaaatcagcccaccgattacgttcctaaggcgtgcgctgaatcatcgctttgatcccctttataaacgttatttctcacctgttgctttgttggacattcatcaggatccctataatctgtcagacgtttgcgttccacagatgggagattgtcggacattgacctatcgaccaatagcaacctgtcagacatttcccgacttcccagaaccacgtcacaggtatcggaaaatcgatcgcacagcagaagatcaccccgagcagagtcgaatcaccccgcggcgcggccgcctgtccgcaggacaggcggcaggtgcaaaacggccttgttaattgtgaatgccgctgcggcaacaccctgacctgcctaaaaacgtgccccaaactacccataaggccattttgcacgccagtatcgttcaacgtcagacattaaaaatgtcagacattgaacctgcggcaaagccgcagctggggccgccagcggcctgtaatagcgtcgctccgctcgctcccgccaagcgaaatgtctgacaggctgtcagacatttaaatccgcttgacggacggcctgctcgcgaagctcaccatcggccgtatgtaaggagatacgaaatgtcagacatttcgacagatcaagaaaccccggaatccatcacgctcaatttgtcagacattggtcccgacgcatcccaaatgtctgacatttcgcaaccccgaacgccggcccccataccgacccaagcgcagtccagctggccgcacgaaacgcctgcggccagtctgtcagacattttgtcgcccccaaacgcctttcagcctgccacccgccgcatcacagtccgtctcccggccgctgaccttaccgccctcgatgcccgagccgacgccctcaatgccagccgaagcgactacctccgcaccctcattgccctacccgtcgcgctcgacctgacttccatccgccatgccactccgggcaccgaatcgctcacccgcccatttggccccgacctcgctctcctgcaatccgacagccaaacagaaaatttggcaattcaggcaatcaccgacagcatgcttgaatcaatctcaaacgagatccgctccatcggcgtgaactacaaccaggctgtgcgagccctcaatcgaatcctcaagaagtacggcaaccatcgcggcctctcgcaagatgagcgaacggagattgttgggctctatgaacgtctctcgaagcaaaacaaggcaatctacgatcgcctcaagtctcttgccgaagatgtcgaggccctgtccgtcaaaccgtccgtcaacctgaccgctatcggtctctcccaatctgaggcccctgtcaataaatacgaacccgagcgccgccgccgcgtccgcggcaaaaagcacgggcagacccgccctgaccaaatcgaggaaggggacaactcatgacctatatgaaaccgctctcaggtcacagctccgtcaaatggatccgctactaccttttcaagaacgaccgcgccctcgacaaggacttcctcaatctgaccgaccgcgactggaaaggtcgagactgggctaaagtcatggatcgcacccgcgagattttcggcaacaacgtaccggtgaaaaaagatgccaaggtccgcacctacgagcatatgatcatctcgctagacgagaaggacaacggcgtagagctcgatgacttccgagactttgtgaacgagtgggcgtccaaatggtttgactcgcgtggaccagaaggacagggcatcggccgcttcgaagtggcgattgcctaccacgatgacaacaaggcacgagaggcccaaggcaaacaaggaatccttcatgcccatatcgtcatcaacaacaccgaacttgaaaccaaacggcgaatttccggtttgttgacgactaaggtggtccaggcgatgggggcggacattcaggcgatgtcgctcgagcgcggatggcatgcgtttgctactgacgggaagtcttacaccaaaaccgagatggatgcgaaaggacttcaggtctcgcgcggcaaaaggctcaacagagcgatgcaggcactcgacagagttctcgcaaacgaggcgaagggtgcacagatcgaggactatgggcaggccatacaagacaaaatggaagagcgccattcggtcgagaagatgattccggaaacttataacgaccgcaccgcagtcaagtcgcaatctaaatctgacaaaattgagtcaaatggttcagcggaatctgtcggtctttcgtacacctccatgagaactgaagacggaagagtcctgcgccttgttgtcccgcatggatttggcgattcggaaaccatggcggagcgacagattgagacccgtgaaggttggtcttggaaagacgacatccgagatcgagtggacatcgcgatgcgcatttccaggggcccggtagactttgcaacaaagttgaatgaactcgggatacaagttaactacaaccgcgagggggacattgtctaccaccatccgagtgatccgtcatctagaaaggtcaagggtgcgacgctcggcagtcgatatgcagcggaatcgatagaacagacaatggccgataagtacggtgcccgccgccaccgagctcataacctgccgggccgtgaacgctggatgaatgatgacgagcgctccgctgccatggcaatcgctaaggctgcaatgccgtgcacgcgcgagggcgcggaactcatgggccgcctgaaatcgaccatcaagcagattgactccgtcccgcgcgaccaggcgaaccacggttcagacgtcgagtatccgtcttcactggccaactcacttggaattgaatatccaaaggcttccacggcaagcaacggtcgtcgcaagaagatgaccgaagaggagattctcgaagccatggcggacattcgcgacgaaaagggttatggcggtcttgccgcaagcaacccaaccggttcttcttccaataccggtaatccccatcagcaagagaacgtaaccgaaatccagaaatcaaaacctcgctaaggagtgaacatggtcattgccatcgagtataaaaacgggcgcatgaaggagttcgacacgagtgctttcaccacgaccaatgcaatgagtgcaggtgataagacagctagaaacgtgatgacggaactcgacctgcgtctcgaccttgtgaacaaggtcggtttgaggttggatttctattggtacgatgcgacccctcaggggcaacgtgtcgagattgacggtcttacggactcaaagggagacgccgtctgtctcacatccgcatcgcgccgcttgggtacttccgtgcttctctgctctcgtgaaggcatcaagcatatttcccgtatcatcgtgcagcgagcgaacgggacggttgatgttctttggcatcagggttctggcgattggcttatcaacggagcaaagttcgaggcgcagcgggtactttcctatacggatggaaacgtcgcttcgaagaattcccaagcggtgtacgtcttcgattatttgaagaagactaaaccgcgtatgaccgaagaagaaatttgcgacctaatcggctatccgctcgatgcctacaaggagattcagctggaggagtcaaagaacggagagaaagcgacgggtgcgaaactcatcgaatcagacgatgagggagatgcgagttatttcaccgattcgtctgcctcagggccttctgattcggaaggagggtcatcctttggaaagcatttcgccgtggaagacgacgatgttcctttcgacgatggtgagaactctatattcgatgtctgacatttgccacggcgacctcattcatgatattttgagcttactggcgtaaccccaagcgccatgaaacaggagagacgaatataaccccgaccgcgcgaggcgcggccagctaatcccaacttgattacgtgtgactgactcggtatgactcggctcgtctctccgctcgtcctgacaggagatgacaggttttgcagaagcgcgaagagacacgaatgcaagaggttgccggaatcggatcggagtggtttcgatgaagtcggcggtcaaggtaagcgaggccatagccagacttcgcaagcacggagacacggcagagctcgaggaggcgatcgacgatttcctcgcagcctatggagagcttcgcagtgagttctattacgaggactccgaggcccaggcgaatgccaaggcggcctcgacgcttctcgaggccatcgaccgcggcctgatcgagctgccccagaccgatgacggtatcgtcatcatccccgacatgaagctgcgcctcccagacggggcgaagctctacgtcaactctatcgaaatcgaatccactgcgaccggacgcgccccgatcgtccacttcgaggatggctcctccatccgctgtcggcgcggctcgggcgtgcagattgtccgaatgcccctgaaggaggagcagaatgacaactgaaagtgaagccccgctcgcttggccgttccgcatccccgttctgcgcgtcttcctgcttccgttcgtgcaaaccaggaagcgcgaccgcctgctgctcatcctgctcgcctgcatcatgtcgacggcaggcttcctcatgcaggggaacggatcgtatgacagcgacggctggttcctgctcgccacgggaagggagatcttaaagaacggcatcccgtatgcgaacccgtggtccttctcgtcctacaggccgattgtcgtccagcagtggctgcacgatgtgctgctctacggttcgtataccctggcgagctacgccggcacgatagtctatcaggctctcctggctgccatcgtcgcgctctccatcgcctttgcgattcgaggatttgacgatagaagcctgactttgccccgcctactcttctgtataggcctcgcccttttaggggcgggaatctacatctcagtccgtcctacggcatggtcgatggcgtgcatgtgtctgacaatcggcgtctgcacccgctggaagcgcacaggcgattggcgctacctcatggcgctgcccgcgatcacggtactgcacgtcaacatgcagtctgccatgtggctcctcgatgtcttcatcgccggctgcttcctgctgcccgagcgcctatccaaattcaaatccgtcacccccgaggagatgctcagcgaaatattccccctcagcatcgccttggtcgcgatgcttgtcgcatccttcgcgaatccctacggtgtcgatggcgcacgctacgtgataacctcgatgggggcggcatcgtacggaaacgttatttccgagatgaagcccgccttcgaggcaaccaaaggcttctgcgtgatctttttctcggtgggcttcatccccgtggcgctcaccgccgccagcggacgcgagcgcattgacttgcctatgctcgtaatcgtcctcgcttccttcatcgcgacgatgctccattggcgaaatgtctggaccttctcgattgcatgcgccctcgcgtttgcgagcatgcttccaaagacggaggacccgtcacccttgaaatcgccgaaggcggcgaaatccatcgccctgatagccctccttgctgcaatcggtccgatagccgcgaactgctatgtctgtgccgcaaacggtgggcagtcctgctgggtgtcctccgaacgctctgcggattccctggtgaaagagattgacgaaggcggcttctacgaccccgtcgtatacgccgaggatcccgtcatctacaactacttggaatggaaggggatgaaagttccctttgacttgcgtcccgaactctgggatgagaagggcgtcatgggaaccacttccccgtaccgcgactacgtggacggcatgcaatcgaaaaaggcaaagctgtcctacctcacctccaacggcttcgactactacatcgtctcgaaggattcggcgcactggtatgagaataaccttagcctgaaagtcgtgaacgcaacggatacgctcgtcctgctcgagaacgcggggtagggaagtgaagctcgctccctagcgctacatcgatgaagtcgcggactacaaccgcaaggtgacctccttcccgatgaaccttatcgccaaacccttcggattcgagagcgtcgcccaatacagggcggacgccgccgcggctaacgttcccgttgttgacttcgactgatattcgaccgtaaaacccaaccttgatatagccttccgccgatgcggaaggctatactattgttaatttactggcaggcgtaccccaagcgcctcggaaagacaggaagtgaatatggcagcatttgaagacccgtgcgagcacggtttcgaccccgatctcgtaaagacagccctgatgtcacgcgagcagttcagctccaagccccgcaaattgattctcggtatcgacatgggaatcgccggggtcggggtctgcctcatggatgagctgaaccacgagattgtcctcatggcgacgcatctgttcgattgtccatggaatccaaaaaacaaaacgagcctggcgtcggcaaggcgccaagcgaggtcgcagcgacgcaatatcgcccgccgcgcggcaaggaagaggcacatccgcaagatccttatggctcacggggtcatacccgagaacgcgactgccgagtggttctccatccgcaagggcgaccaggacaacatcaggctgcgcgtgaagggcttgagtgaagttctcgacagtcgcgatctggctcgcgtcctttacggtttcgccggccgacgcggctacatcgaccacggcaaagcggacaacgacaaggatgccggcaaggtgaagaaggcgttgaaagccaatgccgagattatggaggcgaacggctacgagacgttcgcccagtacctcatcacgcagccgaagattcgcaaccgtcagaacgactacatccataccatcgatatcgacatggtggttgacgaggtccatgcgattttctgccatcagcgcgagctgggaaacgatctggccactgaatccctcgagggggagtacctcgccgccttgcgatggcttacagacacgaccatgagggaccgaatcatctattcaaaggtgggctactgcacctatctcggcgagccgaataaacgcggcccgaaatcatctatctcatccgagatggtccgcgcctaccagacgctcgcgaacgtcaagatcgagcatatcgggtctgccgctacgcagatttcacctttggtgcgcaaccagatcgttcacgatttgttcaaggtctccaagaacccgaaaccgttgaagtggtcccaactgcgcaagaggctcggtcttgccgataccgatacgttcgcgggaatccgccaatccgatgaggcaaaagatatctgcgtgaaagttcccgcatggaatgcgctctgctcgacgctccatgacctgaacccagccctgctcaatcgcctgcacgacgatatcgacctcgccgacgcggtatgcgccgcggcgacgtttgcatcctcatccgagtcgttcgccacccgaattgccgagcggactgacgggtttgcgaaagaggacatggaggcgctcctcgagctgccctatggctcgaagctgttcacgggctacggctcgacgagcctgaaggcgctgcagatgctgcgcgatgcatttgaggacacgaacatcaatcgtttgtatgatgccgaggtcgcgacgggtctatatgacgcgcgtaaggcgctggctgccaagcgcaacgcgagcgatgacggactcctgatgccctattctagttactcaccgatttgcaccaacccggttgtcctgcgctcttgcgctcagcttcgacgagtcgttaattcgattatcaggcactatggcctacccgacacgattcgcgtggaggtggcaaatgaccttaagcgcactgaacacgagaagaagctcatcacgagcgggaacatctataaccgtaggacaaacgaaaaggctaaggacgatatcgccgagttcttcgggcttcagagcaccgaccaagtgaagggcagggacttggagaaagtccgactctatgacgagcagagcggcaaggacccctacacagggcaggggattgatttcggtcgcatgctgacggagagggactatgttgaagtcgatcacgtccttccgttttcccgttcctgcgacaactcgaagaccaacaaggttctggttctgacgaaatcaaaccgcgacaaggcgaaccgaacgccctacgagtggatgacctctggtgaaccatccgcaccgaactgggacgagttctgcatccgaatggatgtctgggctaagggcaaggagccgaagcactactattcggcaaagctcgcaaaattgaaggaggatagcttcgcggataacgtcgagagcttcatcagccgaaacctgaacgacacgcgctacatgtccaaggaaatcgcgaaatggctcgctgactgccttccattccccgatgacggtcgcaggcatgtctactgcgtctcgggcgctgcgacggctctcatgcgccgtatctggcgtatcggaatcctcgacgataatggaaagaaaaaccgagaagatgaccgccattatgccgtcgatgccgcggtgatcgccgcctgcacgccctcgatcgtcaagggcatcgccctcatcagcgaggaacacgctacgcaccgcgatgccgaccgcctgttgaaccgatctctgccctattccgagtacaggaatcaggttaaggcatggattccctgcatcgtcccgacctattcaccgaaccgcaccgcaacgggggctctgttcgaggagaacacctattcctacagaggggttaacgaaaagggcaaggatctcataaagaagaaaaagggcaagctgggcccctgcaccaccgcatggaaggatgggaaaggctcagccaaggcctacgacaagcagtacagtctacttgccgtctatgatgactcgacctcgcgctggctaatagaccccctctactacatcgacgtgcagaagcgcaagcacgaagagccgttcatacggaagttctcgaagaatctttcgattgactattgggagaagattccgctgactggaaccgaacaaacgctatttttgaagccgggagtcgttctgacgcaagacggtctggtgggtcgcttgcactcctacgacatctccgacaacaaagtaaggatgtattacgcaagaggggagacttccttccagaaaactggacccctggcgggcgaaaagtttccaactttttcgaagtggactgacgatttgaaggtcatgcaggaggactgcttgggtctctgttggcttgaattcctcaccgaacgggcaggcagctgctagctgcaaacgttaagcatgagaacggggacggcgctaaagtgtcatccccgttctcgtttaaaacgtcaggaaaagctgggttcccggcgtctcatttcccccggagcccgaagccccggtattgacgaggatttccctatcgacatactgcttctcagtgaactgcatcgccacgacatgccctaccggtgggagatttttcctcagctgttccgcatgggcttcagcagatgctctgctgagaaggttgcgggagtagatgctgttctgctcccttatgtacccgtcatcttctagaaaacgtcggaactttgtgtaggcgtctttgtttgatttcgtcttcgtggggaggtcgaacatcaccaagagtctcatgattctcatagccttcctctcgttctcaagctatccggcgtggccatttccagaccgatgagcgtgggcaacagaagctgatccgaatccttgagttcgattgcccttctcagggattcgcaatagacatcgacggccgtctgtatgggcatcttcctcccgtccaagtcgacgagaaccgatgtgatctttgtcaaggtttccttgttcgccctcgatagcggtgccaagatgttctccttgaccaccataaggtcgacggctgccctgaatggctcgataaggtcatcgaccaagttgaaggcattctcggcgctatggtgatggatgccgcgcgatacgagccacccgtgcgagacggcacattgcgcgatgcccgtcctgaggattgcgtacccgaagttcagcggcgcggtcatggggcccgtccatcgcgacccgtaggggagcaattttgagaagtattcgccggcagccgcgccctccctatgggtcttgtcattgctctggacatccttggcatagttgaagattttctcgacatcggctggcttaccgccgcaaagatccagagcatgcgcttggttctcaatcttcctgcggacaattttcgcccagagctggtttctgagaggttttgagatggcgagctggtgttccacgatttcggcatgccttgaatgtgcgcctatcgggagcgacaggccgttgggcatatggttcgatccgcagaagagaatacctataccctcatcattgacttgtcccatgagtgatgccgttatcgagacttgcggattgtcgattacgatgacccagatatcggataacggtattttatcgagaactttatcctcatggcgttccttgatgacaaggcatctgtcttggacgcagaggaacttaggggtgccgatcgtgactgtcaatagcataggtggctccgtttcccggtatcttatgggatatggacggggtctttacgtatgtagacaactaatcgataatgttattgccctaactggcaggttttattcatcgatgcatcatatttggtagcctatttttataaatataggctgaagagttgagaccgcgacttgttaatggagctcaaaaggtgattagatcgagggcgtacgccggcgatattttccagaaaaccgtcttctctgaaaggtaaattcgagtgctaaagaccgttttgcagaattttaaatcaaaaaagcccctgctaaaggggcttttttggcggagggtattttagcatctcaaggaatggcactccgctagggctggagggcttgccgtcctcgctcacgctaaattttagcatctcaaggaatggcactccgctagggcagcgaggatctcggaatcgcgctgagccatattttagcatctcaaggaatggcactccgctagggctgaggcgtgtccgggtgtagcgaagtggctattttagcatctcaaggaatggcactccgctagggctggatgccgatcagaaattcgagagggttaattttagcatctcaaggaatggcactccgctagggcgaaaggaggtgaactctatgtctattttcaattttagcatctcaaggaatggcactccgctagggcggatgaaaacctacaacctggacaccattcattttagcatctcaaggaatggcactccgctagggcccgagcgcgccatgacgcgtatctactacgattttagcatctcaaggaatggcactccgctagggcacataagggtcgtcgaacggagattgccatattttagcatctcaaggaatggcactccgctagggccgcgccatcgccaacagcgggatcttcgagattttagcatctcaaggaatggcactccgctagggcgatacaccgccgagtcgtcgccactcaaggattttagcatctcaaggaatggcactccgctagggccatacgtctcggaggtcgagcgcatcttgtattttagcatctcaaggaatggcactccgctagggcgcagcaagcgaagtcctacagctcaataccattttagcatctcaaggaatggcactccgctagggctgctcgccccccatccccccgagttctcggattttagcatctcaaggaatggcactccgctagggctatagcagccgaaatcaaaccgtggacgttattttagcatctcaaggaatggcactccgctagggctgacctgaaaccgcttaatctcgtcctcgcattttagcatctcaaggaatggcactccgctagggctccgcgcgccccataccccggcgttcatcaattttagcatctcaaggaatggcactccgctagggcgagcaagtgggacaagtggtcgctattcggattttagcatctcaaggaatggcactccgctagggccctatcagtccgagcaggcggatgttgttcattttagcatctcaaggaatggcactccgctagggcgggccatgacggtcgagcaacggaataagattctagcacctcaacgaatggcactccgctagggcggccctctcacaattcgggttgctgtcattctaccatctcactggacaccccacactcaccccgcaaagcaaacggggagccccaaagagctccccgcagcaccacacataggcagaaacatatcgcacggcaaaaccctacccacgctcctgctcgtcaggcacatgcccgcaatcctcgtggtcgaactccgcctcggcgcttttcgcatcgcagatctcatcgagcgactcgccagccccctgcgacaccttatcgccgaccggccaaccgtagacctcgcaaattgcaggcacaatgtcctgcaaacagccctgcttctcggcaagcgcaacgatcacatcatcgagaacggcattcttgtcgaatccgttatcgctatagagcttgtccagctcttcgccgtcaagactatcaatctcattcacgaaatccttatcgacgagcttgacgatatggtcctccatctccccgacgtagccgatggattcactcgcgaccaattcgccgtccttgactgacagctcgatggtgtctccgtccatcttcctgtagagggcttcaagcagatcgcccgcattgtagataggatcgcaggaggaataaagacggtagccctcgagaacgcaatatccgtcatcatctttgacgaagggagtggagccattaacgtcaatgtaggataggtttcccacctcatcaccgagccagttctttacgcccgtatcggcgcgttcggcaagctcgtcttcgaatcgatcgtcgatgattgccccgatgttctcctcatcagcgaagtcctgacacgcctcgacgaaattgatggtctcctcgtgattctccatggcgttagcgatggcatcatcgatagccgcttccttgacggcatcgacaagacccgaggggatcggaatatcgtttgattcgcaaaggccaaacgctgcctggacttcatagatccagtcttctttgatgcattcctcttggtcatcatgcgcgatggagtcgttattccagatgacatgcttgtctttatccatggtgcctccaatagacgttttgcctgcctatcagtttgtcgggtagacaggccgcaaggagaccttgggacagatatagaagcgccaaacatgttgactactcgataacaaaacgacccacattccgctgggacatagactggaagacaggctggcggtgtggccgcaaacagcacaaactgtcgtaccaaatgccgacataagcaatttcgacacaaccggcgtttaagtacggagacgaagttagaggctttgttcattatctagcagagggttttaatgtgtctagccagccgcaggggcaaaaatcggatgtatatagaaaacggggacacacccacaggatgcgtccccgataagaagacaatcagccttctttgtattctgcgtaaacagactagttatatgcacgttgccataaaagaacttttatctgattcacaggccagccatttttccttcgcatctccgagcgtatatgttttgagaaggttcaccctgaacaataagaggtgtaccgataactcaacgctcggctgaaacacctaaagggtatagaaacggtataggttcgcttcgctccctgggtttttcaggaatttccgaaaaaaccgccaaaagaaaaggggaccgacgcatcagcccccttcaggtgtcgcccgaaggcttccaccgcaattgttttcattttaaaccacctgtgagccgagtcaatgcctgaaagcaggggagagccatccctctccaaaccctctccaaaccaaaccgaatgagagccgatttaagccccattcttgagcacgctccccacaaagttgggctctcagtaaaatcgcgcttcatttacgactagggcaagccagacgcagcttaaataactgtctgagcatttaccagccatctggggaagccgattgacccatactgaccgacggaggagaatcctacacaaccgaccgcaaccgattttgtcccgccaaaaaaatgcctgggggcaagcccccaggcatctacaaaaagtgaaagccatgccgcccgcactctcgatacaacatacggacaacatcgctttcactgaagattttacctcaacaattccagtctcagtaaccgaattaacgagtccctattgccgttgcggcagtcgtgttggctcaacaaaagataggctagaagcaccaagcgggaagtacgcagtaggtgtccgccgcgccgtcgttgttgccgtcgccgccccagccggtgccggtgatatggcggtagcacgcggagttgccctgaaacacagagcgagtccagtgatggcagctcgacgaagctccggaatagctcgagtacgtcacgcccttggatttgtagtactcatactgggtgccctcggactggttagaccggttatccccatagacttcggtcaacgagagcaggaagaccttgtcggtcgtggccgagggagtgccggcgctgccgcctcccttgttgtcggtcatcttcgtggctgccttcgccttggactggatctcggccggcaggagtgcccagaggtcgctggaattgaggcgtccgcgcagctcggacttctcccagccgccggcattcgaatccgtggcgttcatgcgctgaacgcccagtacgttattggttgcctcgaacgtgagaccagccttgcccgatccgtccgcgaggtcatcatggttgatgccgacgatgcggtactcgagggtcttgccgttcgtaagcttgacggagaacttggtgccggcgtccatcgcggcctttgccttggcgtaggcggaagatgcctcgcccttggcggcgatgccctcggccacggccttctgctcgccgagggtccagtccttcgcgtccttggcgatggccgcttggacggtcgcggaatcggcccctgtggagccgccgccggatgctccgccgccctcgacgccgccggtcgtcccgctgttcaccgtgttgccgaccaggttgaactggttgcggatggccccggccacgccgggccccgcgaacacgattacaagaccgatgatggcgatgatcagtacatactcgatgattccttgccctcggagaagagtacctctaggagataccaccccccccccgaaggttaattgccgctgcttgcatatgcggctcccttcgctcagggtttgtagatacgacctgagcgtaggacaggcgcagccattcaccctactcttgccgcagcggcaaaaggcatttcggcatgacaatgcgtaaggtcagagggtaaggtcgtgtaggattgcggcaccgcctaggtgcggcaacgctgaccgtaggggagggcgaaagccctctttttttcatcccctccaattagcttttctccttattattcttcttctcctccggcgcttgtgcgccggcacccacccccgccattcctcaaaatcgaacatttttcagttttgaggaatggcgatccgaactcaacgttcatgtcacagcaggtacagctaaaagctggcatttaccgcagattgcccgacaaccgctgcgacaactacgacagactgcgacatccgccgcgcacgcccctcgggtcgcgaattgtcgccactttatgaatcctagatttaaattacgcatatgtggaatctcgcctattatgggaaccaccgaacgggaacgagagttagcatctaaaggaatggcactccgtttgggtaagaggattcatcccataggatgaatcactcgcggagtatatcctctcggttggttttgaactccaaccgagaggtgatctccttttcaaatcacaatctctaaatcaaaatccctgagaatagatcctgataaccctttcgatttatcctacaatagctgacaacctcctatcgttgcgccgttattccttatttgggataacggcgcgttatctttctgttatacttaagttatcgataaggcgtgccccaagcgccttgcaaaacaggaagatgacaacatgccccagaatctatacggttcgcgtgcatcccgtttccaaaatggtgcgcgccatgccgactgaaacccaaaacgaaaaagcccaacctgcaaaccccatcatcgccctgcagcaggagacgatcgtcctgaccgcctgcatgcggtcgaaagacgttcgcgaggacgtcctcccgatgctgctcgaggacgatttcgtcaagtcagatcatcgaacgctgttccgcgccatccgcgccatgcacgaggcagactatccgatcgatgaggtctccctgctcgactacctgaaatccagccgcaagctggatgccgcaggaggagagaaggccgtcctgcgcatgtttgagtccgatatgcccctgctgtcctggcagaccgcatatgacgggctcatcgatgcctcgaggcgcaggtcgctcgtcatggccatgaaccggatcgaggccgaggcgtacgagacaccgaccgatatgaaggctttcgtttcggagatcgagagttcggtcgcgcagatgaccgaacgccgcgacatgcggccctaccggcatatctcatcgtttatcggcgcggccgtggacgaggcccgccatctcgacgatgttcccctcggttccaccgtcgtgaacacgggctttgccaccttggacgagatgctggctggcctccgtgcaggccagctcatcgtggtgggggccagacctgcggtcggcaagacctccttcgccctcaccctcgcattgaacgcggcccgtcagggcgtgaaagtcggcatcttctcgttggagatgtccggcaaggagctcgcccagaggattatctgcgcggagtcgggtatctcgatttcccaatttcgcatggggaccatccccaagacctcatgggatgccgtctctgcagcctgctgcgatattcccggcaacgacatcgagatcgaggacaaggcgaacgtgacgataggggacatccgcgcaaccgcggcacgcatggtgcgcggtgccaatcgcgggctgattgtcatcgattatctccagctgatttcgtccgcttccgacggcaccagattccaaaaccgagctgtcgaggtcggcgagataagccgccggctcaaggtgcttgccaaggaactcggcgtcccagtcgtgacgctggcgcaactgagtcgccaggcggagggccacccaggtgtcccgcggctgtctgaccttcgcgagtccggctccatcgagcaggatgcggataccgtcctgttcctatcgcgcgacccggacgagattgaggacgagaagtctggttcaaggcaggtcatcctatcggtcgcgaagaaccgaagtggcccgacaggcgatatcgacatgctgttcgtcccaacgagtacgaaattctacgaggttggacctaggaaggagaaccgtgatgactaagaagaagcgcagccgaaactcgaccaaggtcgtcggccgatgccttgaatcggatgcccacgcccagacaatcgacgagggcttcgcctttctcgaccgcccgataatcaacccgcgcgaggcgcttgcctaccagtgggcgctgcgaaaccttgcgctgggcaatatgcggatcaagtcggagagcacgcgcgatgcgatcgatctgggcacgagctattactccgaagggtcgattagggtgaaggcgcatatcctgtgcggcatcgcgaccgatatcaggttcgcctccgaagatcccgaggcgaatatcgaccgcatcatgatgtcgttcgtgaaggtcttcgacgagcgggggcattgttggcgcccggtcgattcccacatgtggctgttcatggacaagctcgccgtgcgtccgggcgagggctgggaaaaccgaaaagagggggggcttcggtgttgcgctcggcgaccgcgtcgtcttccttgccgaggacaggatctatggcgggccgaaggggatgcgccgccacggcgtgggcaattggtccatcctctcctcgcgcctcatgttcggtataagcggcaagaaggggactcggattcgcgaagtgcccagaaaggtggtcaacgacggctacctgatctacctctcgaaacgaggggatcaggtcggtttaacgttcgtgaataactccgaatggcaggattgccaggagcgctgccgagcagcagcggagaaggaaccgtggagccagacggcctatctggaacagaacagacaccccctgaggagatagaggagaaaccaatggagaaagaaatgaagagcccgcgttgttcccgagtggttctggtcgacccgaccagaaccatcaacgggcatatcgtttttaaattctcgatcgatgccgagcgggcgaccacgggtttcatcgagagggacaaccgggaggacggctccgtcatctggcgcccgtatatccgctcatcgacgcaatctggctactggaacgccgggtcgatgaaacagttcgtcgacgggtacaaatcggaagaggatgcgatggcagcccttatcgatgaggcacaggaggttctttggggcgactgatggacgggaccgaacccaaccggctgcacaggcgcctgaaacgcgccttgacggccaagaacatctcccagcgcgagctgggcaggaggatcggtgcgacgcaggcaagcgtctctcattatgtgaacggaaggcaactacctggggcaacgaccctcttcaagatttgcagcgaattggatgtctcagcggactggcttctgggactgaaacgaaaggaaccggaaatgaacgaatctatttggacggtcgagggcgatgcggcatggcgtacggcagatgactgctcgttggtcgcccgtatcgtaccggtagaggacgggacactcgaactgggaatcctcgagggcgacacagcctgtgaattgttcgcccagcgattcgataccatggatgcggccaagaagcatgcagacggaatccttgggcgaaagccgcaaagggatagggatatcacattcatcgagaatgaactggatggcgtgctgagcctcaat

SEQ ID NO: 1697 - DNA, 23084 bp, synthetic construct
  source 1..23084: mol_type = other DNA
  misc_feature 1..23084: note = Synthetic
cctcctcttcaaatacaaagacagggtcggaacaaaagaggcgcccaacggctatcgaatcgccccatactgcatcgaccacggcaaggcggagtaggtgcagatgaagcgtacgaaactggaagacctagatctaaagacaattgtttcgtccgaactcgagagtcgcaactgcgatggactttattctccttgtaaccgttgtgagtgtggctgttcccgaatgaaactcttttcctgcggcaaggcgtgtgcagattgccgccccggtttacaacaccccggcacgagcgacctaaagatcgtctcacatgatgaatactgtgagattatcgaccgaatcgaagctgaacataagcgccacgaggagaagctccgagccgaggcaattgagaaaagaaaggccgaacgactcgaggcaaagcagattaaagaggagaacgccctcaaaaagaagcaggcgcgagccgaggagaagcagcggcgaacagataaacgaaagcagttcattgatagcatccatgcaaaactcgagaagcaggtcgaagatatttcagccgcgatacacacgagtattctttgcaaacttctcagtggcgtatcaatcggatcgattgtcttctcgattgcatctatcatcttctttgaggttatcaagcatgaatggatgacttcggcggcaaaggtagaagcgcttgcagccgtctatctatttcaaaagctgtttatgttcgaggcgatctacgtattcgttatcgtagcgtttacgatcggcttgattatcgtccgtgtcgttcgcggcgattggaaggttgatttcgagcttgaagaacagtctgaaaaggaagaaaaggacgatcagttcttcctttaggattatctgtaccctcgcttcttatatatctccagcctcgagttattgggtcaattcattttggattgatccattttctttcttcaaaagcagtcttgatagctgatttagatgttcatcggctcgttgcacaagagcctggcaggactatattcggccgatagttttttaatttcgcggccgaggtgcgacattactgcgacagaggtgcgacatttttgttgccgcctgtttcatgcatgaataggttgagcatcttcacaggctttcagacgatgatttagatctactttgctatctgatttcaactcaccgtcctaaagaatttcaattgccgatgcactgcttttgcttcaaaacgccagcgaacatttaattcagcagggctgagattcttatagggcagttctaatttcaattttaaattgcagtccagataccaaccaaacaccaacttgagactaattgaaacgcatgcggagtgccttgaatggcactccgcggtatcactgtttgctattattcatattcttataattccgccgaaatgccgatgcatttgaattgcgcggcttatttgggattgtattctgcgtatttttgcccgtttgctttttaggaatcaaacggaatctatctatccactcgttagggttgtcattgcatcccatcaaatatggcagaagctaatgcctgattcacacgcagaagcgagaacgaaaacctatcagctcacccatgtccacatgtttttatcgctcatttatattcttcagcaattacttccgtcctttacgtgcgctgatttcaggttgtaatttatggttgcgggtactatcctgcgtacgatttaaagcaatttgcaaaccaagcggagtgccttgaatggcactccgcagtatcactatttgttcttactctatttatccaaaggcgaaaatagcttcgcaaccggcctgaatagcccatattgctgtgcaataagattaccagcagtttttgatttcctttatatcgaataacgttttcagtctcagaactgcaaccagtttttaatttacggcgtgcatcaatcgttacgcgaagcgcttttcttttctatttcagctgccagtccatcaataatacgtagtcaatttgcgtttctaaattggaagaactggctttctttttgccaacaatcatcaaacacgaagcgttcgcaccatcgttttgcgttgcacggaacacatttaccgactttctaagttaatacaaaggcatttgcaaatatcgactgcactcccgaacaacaaccaaatcagcgttcaaatcttattgctagaacccaatcaaccttacaaatagtttgttgtcgaactatttccgccgttgttcaaatcgaaactcgtatataacttactaattgccgcacacacatcagaactcgatcccagactactgaaccgctcaccaaataggggagtgcgctacctgatccgaattgcagatcactgtggtttcctgccaagcgcattttcaaaacacacctactttcatcgcccgtaacttctttgctagccctgttccccatctgtttcattgtcggacattcatcacgaaccttatgtcctgtcagacatttacgctcctcggctgtgggattgtcagacattacctaggcaatcaatagcaggctgtcagacatttcccaacgtcccgaccacacgccacggaatagcagaaattgccccaagcaggggccgatcaccccgcggcgcggccgccagccctgcggacaggcggcaggtgcaaaacggccttgccaattatggatgccgctgcggcaacacctgagcccacctaaaaacgtgccccaaactacccataaggccattttgcacgccagcttcgttcaacgtcagacattagaaatgtcagacattgaacctgcggcaaagccgcagctggggccgctagcggcctgtaatcgcgtcgctccgctcgctcccgtcaagcgaaatgtcagacaggctgtcagacatttagatccgcttgacggacggcctgctcgcgaagctcaccatcggccgtagttaaggagatacgaaatgtcagacatttcgacagatcgagaaaccctagaaaccgtcagcccaaatttgtcagacattgcccccaccgccatccaaatgccggtcgacacgtcaccctacgccccgccagttcggccgcaacccgaacggacgcacaccgaaatgtcagccatctcgccgaccccaaatgctgcccagcccgtaactcgccgcatcacagtccgcctaccgaccgcagacctgaccgccctcgacgcccgggccgatgccctcaacgccagccgaagcgactaccttcgcaccctagttgccctcccggtgaccctcgacctgacatccatccgccatgccactccaggctccgaatcgctcacccgtccgctcggcccaggcctagccctcgcgctctccggcaaccaaactgaaagtttggcaatccaagccattaccgacagcatgctcgaatcaatctccaacgaggtccgcgccatcggcgtcaactacaaccaggcagtccgtgccttaaatcgcatcatcaagaagtacggcaaccatcgcgccctctcgcaggatgagcgaacggagattgttgagctctatgagcgcctctcaaagcagaacaaggcgatctatgagcgcctcaagactctcgcatccgatgtcgaggccctgtccgccaaaccgtccgtcaacctgactgctatcggcttggttcaaaccgaggcccctgtcaataaaaccgaacccgagcgccgccgacgagttcgcggcaaaaaacacggcacaccccgacccgaccaatttgaggacggcgatgactcatgacctatatgaagcccctctccggtcatagctcagtcaaatggattcgctactatctattcaagaacgaccgcgccctggacaaggatttcctgaacctcaccgatcgcgactggaaaggccgcgactgggcgaaagtgatggaccgaactcgcgagattttcggcaacgacgtgccggtcaaaaaggacaccaaggttcgtacttacgagcacatgattatctcgctcgacgaaaaggacaatggcgtagagctcgatgacttccgcgacttcgtgaacgagtgggcttccaaatggttcgactcgcgcggccctgaaggggagggcatcgggcgcttcgaggtggccatcgcctatcacgatgacaacaccgcccgcgaggccgaaggaaaacagggcatcctgcacgcgcacatcgtcatcaacaacactgagctcgagaccaagcgccgcatctccggtcttcttacgactaaggttgtccaggcgatgcgagctgacttgcaaaccatgtcgcttgaacgaggctggcacgccttcgccaccgatggcaagtcatacactcaggctgaaatggacgaaaagggcttgaaagtttcccgcggcaagaggctcgaccgagccatggcggcgctcgataacgtccttgcaaacgaggcgaagggtgccaaagttgaagactttggcgaggccatgcagcagcagttggatgagcgtcgttcggtcgaaaaattgattcccgagacatatacggacagcttgaccgccagccgacggccaagtgacggtaagcccgactcaaccaattccgacaagttcaccggtctttcgtacacaaccatgaggaccgatgacggccgcgccatgcgtcttgttgtcccgcgtggattcggagactccgataccatggcggagcggcaaatcgaaactcgtgaaggctggtcttggaaggatgatatccgagaccgcgtggacgtcgcgatgcgcgtttccaaaggccctgtcgatttcgcatcgaagctcgccgaactcggcatcaaggtcaactacaaccgtaacggcgatatcgtctatcaccatccaagtgaccccgaatccagaaaagtcaaaggctcaacgttgggcaagcagtattccgcaatatcgatagagcagacgatggcagaaaaatacgctagccaacgtcaaaaagctcaaggactcgtcagtcgcgagcgctggatgaacgaggacgagcgctccgctgcgatggccatcgccaaggcggcaacgccatgcacccgtgagggagcggaactcatgggacgcctgaaaacgaccattgagcaaaatgatgccgctccgcgcgaccgcacagttcgcggttctaacgttgagtatccgtcttcccatgccagctcgctcggcatcgagtaccccaagtcttccgcgaccggtgatggccgtcgcaagaagatgaccgaggaggagatccttgatgcgatggcggatgtacgcgacgcgaagggctacggcggtcttgccgcaaacaacccaacaggcacttcctccaattccggcaattctcagcatcaggaagatgcgaccgagattcagaaaaccaaacatcactaaggagtaggcatgattattgctatcgagtacaagaacggacgcatgaaggagttcgacacgagcgccttcaccgccaccaacgccatgagtgcgggcgacaagacagcccgaaacgtcatgaccgagcttgacctacggctcgacctcgtaaacgaggttggtctgagacttgatttctattggtatgacgcaacgccccagggacagcgcgtcgatattccaggtctcacggattcaaaaggggaccccgtcagcctcacctctgcatcgaggcgcttggggacctccgtgctcctctgctcccgcgaaggcatcaaacagatttcccgcatcatcgtgcagcgtgcgaacgggacggtggatgccctttggcggcagggtacgggcgattggctcatcaacggggcgaggttcgaggctcagcgcgtgctttcctacacggacagtaacgtcacttcgatgaattcccaggcggtgttcgtcttcaagtatatgaagaaggctaaccccttgatgagcgaagaagagatttgcgaccttattggctacccgctcgacgcatacaaggagattcagctggacgaggcgaagaacgccgagggaatagtcggtgcagaacttatcgaatcggatgatggagaggactcggaatatccttccgattccgccgcccccgaaccttccgattcaacctctaacccatccctcgggaagcatttcgccgtggacgatgatgatgacggattcgatgacgatgaggactctctgttcgatgtctgacatttgccacagccgtcggattcatgatattttgaatgtgctggcgtaaccccaagcgccatgaaacaggagagacgaatataccgcccgaccgtgcgaggcacggctatctattccaatttgattacgcttgactgactcggtatgactcggaccgtctctccgcacgttctgacaggagatgacaggtttgcggaagcgtaacgacacccagacggaaaaccagatgagcgcctggtcgaggcggtctcgatgaaggcggcggtcaaggtaagcgaggccatctctcggcttcgcaggcagatcgacacgacggagctcgaggaagccgtcgatgatttcctcgcggcttacggagagctccgcagccagtactactacgaggactccgaggcgaaggcgaacgcaaagaccgcctcgacgcttctggaagccgttgaccgcgggttgattgagctgccccagaccgacgatggaatcgtgattgtcccagacatgaagctgcgtctccccgatggggcgaagctctacgtcaactcaatcgaaatcgaatcgaccgcgaccggccgcgccccgatagtccgcttcgaggatggctcgtctatccgctgtcgtcgcggctcgggcgtgcagattgtccgaatgcccctggaggaggagcagaatgccgactgaacgtgacacccagctcgccctgccgttccgcatccccgttctgcgcgtcttcctgctgcctttcatgcaagacgggaagcgcgaccgcctgttcctcattctgcttgcctgcgtcatgtctactgcaggctttctcatgcagggaaacggatcgtatgactctgatggttggttcctgctcggaacgggaaagcaaatcgtcgagaacggcatcccgtacaccaacccttggtcattggcgtcctacaggccgattgtcgtccagcagtggctccacgatgtgctgctatacggttcgtataccctggcaggatatgccggcacgatactctatcaggtcctcctctccgccgtcgttgccctcgcgctggcctttgcaatccaaggattcggcgataaacgcctgactttgccccgcctgctgttctgcatcggcctagcccttttcggggcgggaatctacatctcagtccgtcctacggcatggtcgatggcatgcatgtgcttgactgtcggtgtctgcactcgttggaagcgtaccggcgactggcgctatctcatcgccctgcccgcgatcaccatactgcacgtgaacatgcaatcggccatgtggttcctagatgtcttcctcgctgggtgcttccttttgccccgtgacctatccgaattcaaaaccaccactcccgatgagatgctggccgagatcttcccgctaaccatcgccctgcctgcgatgcttctcgccgctttcgtgaacccgtacggcgtcgatggcgtccgctacgtgatcgactcgatgggtgctgcatcttacggaaatgtgatatcggagatgaagcccgccttcgaggcgacgaacgggttctgcgtcgttttcttcgcggtcggcttcattcccacagcacttgccgccgccatctggcgcaaacggatcgatgccccgctgctggtcatcctcatcgccgccttggtcgcgacgatgctccattggcgaaacgtctggatcttctcggttgcatccgccctcgccttcgcgagcctgctgacgggaatcgaagacccttccgcatctaaatcgcaccatgcggcaaaaactgctgccttgattgccctccttgccgcaatcggcccgcttgttgcgaactgctgtgtctgtgccgcgaacggcggacagtcctgctggcagacctccgaacgctcggcaaattcccttgtgaaggagattgccgaaagcggcatctacgaccccgtcgtatacgccgaggatcccgtcatatacaactacctggagtgggaggggatgaaagttcccttcgacctgcgacccgagctctgggacgataagggtgcggcgggagtcgtctccccataccgtgactacgtggacggcatgcaatccaagaaagcaaggctgtcctacctcgcttccggcgatttcgactattacatcgtctcgaccgcatcggcgccttggtacgcaactaaattgaacctgcaaaccattgattccaccgacaccctgaccctgctgaaggatgcgaggtagggaagtgaagatcaaagtctggacttactcggagggcgatgaatttccgattcgcaggtcctcttttttacgcaggcattggaaaacatttctgattgctttcttggcgattatcctcgccgctacggcgtggtcatctattgcggcaagttctgcgagtcagccgtctttcacgcccgattcaccctatgtgtacgatggtgccgatgtcctggactcatccgttgccgacaccctgacgcagctaaacgagacgctggagagccaagcagatggcgcacagctctacgtagtgactatcgacagcctgccgctagctcagactatcgaggactattcgattgagcaggcgcagcgtatcggcgcgggtgattccgaaaaggacaacggcgtactctacacgttcgtgaaaaacacccgccaggataggcttgaggtcggatacggtctcgaggacaggctgacggattcggtctgcgcgaagattctcgacagcgcccacggctattaccgagaccgcgacatcaaagccggcgtgaaagacctcgcgcgggacgtggcaaacgcaattcaacccgacatcgatggcggtacctatttcaacgataacgcacaagatgaggaacagcccgatttggccgcgaccgtgattgcgtggatcctctttatcggcatcatcgtgttggcgattgcgatgccaaatccgcgcaactcgaattatgtcagcgattcctcctcccgcacagatcactcgcacagctcatcctcttatcgctcttcacactcttcccaccggtcaggcggcggccatttcggtggcgggggcgcttcgggcagctggtaacaatccgtccagcatcgcaacagtaattcacagaacaggagacacgaaatggaatccaaagacaatcgacccggaacaccgaagctgaagccgtggatggtggcggcatttgccatcgtcgtaatcctcttcttggggatggcaatcggcggcgggatgtataactccctgaatgcctcacggcagaccgtcgatgccgactgggcgcaagtagagaacgtgatgcagcgccgtgctgacctcatcccgaacctcgtcgcatccgtgaagggcgaaatgcaaaacgagcaggagatcttcaagtcgatcgccgaaagccgcaagcagttcgagacatccgacacccaggcggaaaaactcgccgcagacgacgagctgaacgcccagacaaccgttcttctgaacgccgtcaaggagaactatcccgaacttgcctcctccgagcaggtgaagaccctgatgacgcaactcgagggttcggagaaccgaatctcggtcgagcgcaagcgctacatcgatgacgttgcgggctacaacaggaaggtgacctctttcccgatgaacctcatcgcaaaacccttcggtttcgacagcgttgcccaatacaaagccgcaccgtccgcggcaaacgtccccgttgtcgatttcaattgatattcggccgtaaaaccttaccttgatatagccttccgccgttacgggaggctatactattattgatgtaccggcaagcgttccccaagcgcttcaagaagacaggaagtgaatatggcagcattcgcagacccacgcgagagcggattcgaccccgagcttgtcaagacggccctgatgtcgcgcgagcaattcagctccaagccccgcaagttggttctcggcatcgacatgggaatcgccgatatcggaatctgcctcatggacggactgaaccaagagatcgtcctcatggcaacccatctgttcgattgcccgagaaatccgaaagaccagacgagtcttgcatctacgaggcgtcaggcgaggtcgcagcgccgtaacatcgcccgccgcgcggcgaggaagaagcatatccgcgagattctgatagcgcacggcgtcattcccgagggcgcggacgccgaatggttctccgtacgcaagggcgaacgggacaacatccaactgcgcgtgaagggcctgagtgaggttctttcctgccgcgagctcgcccgtatcctctacggcttcgcctcccgccgcggctatatcgatcatggcaaagccgacaacgacaaggatgccggcaaggtgaagaaggccctggaagccaacgccgagattatggaagcgaacggctacgagacgttcgcccaatacctcataacgcagacgaaaatccgcaaccgccaaaatgactactcccataccatcgatatcgacatggtggtggacgaggttcataccattttccgccatcagcgcgagctgggaaacgaacttgccaccgaatcgcttgaaggggagtatctcgtcgccctgcgctggcttacggatacgaccaaacgcgaccggattatctactccaaggtcggttactgcacctacctcggcgagccggtcaagcgcggaccgaaatcatccatctcgtccgagatggtccgtgcctaccagacgctcgcgaacgtcaagattgagcatatcggcggtcccgctacgcagattgcgcctgcagtgcgcaaccagatagtccacgagctgttcaaggtctccaagaatccaaagccgctgaaatggtcgcagctgcgcaagaagctcgaccttgccgataccgccacgttcgccggcatccgccaatccgacgaggcgaaagatgcctgcgtgaagattcccgcatggaacgcgctctgctcgacactccatgccctgaacccagccctgctcaatcgcctgcacgatgatatcgacctcgccgatgaggtatgcgccgccgcaacgtttgcatcctcatccgaatctttcgccacccgtatcgccgagcgcaccgacgggtttacgaaagaggacatggatgcgcttctcgagctgccctatggctcgaagctgttcaccggatacggctcgacgagcttgaaggcgctccggatgctccgtgatgcgttcgaggacacgaagatcgagcgcctttacgatgccgaggtcgcaacggggctgtatgacgcacgtgaggcactcgcagccaagcgcaacgcgcccgataatggtttcctgaaaccctattcgagctattccccaatctgcaccaacccagttgtcctgcgttcctgcgcccagctgcgccgaatcatcaactcgattatcaggcattatggtctacccgacacgattcgcgtcgaggtggcaaacgacctgaagcacactgagcacgagaagaaaatcatcacgagcgggaacatcttcaaccgaaggacaaacgagaaagccaaggacgatatcgttcaattcttcggtcttcccgattccgcccacgtgaagggcagggatttagagaaggttcggctctataacgagcagggcggaaaggacccctacacggggcaggggattgacttcggtcgcatgctgacggaaaaggactatgtcgagatcgaccacgtccttccgttctcccgttcctgcgacaactcgaagaccaacaacgttctcgtcctgacgaaatcgaaccgcgacaaggcgaaccgcacgccctacgagtggatgacctcgggcgagccgaccgcgccgaactgggacgagttctgcattcgtatgaatgtctgggcaaaaggcaaggacccgaagcactactattcttcgaagctcgcgaagttgaaggaagagaacttcacgaataacctcgataccttcatcagccgaaacctgaacgacacccgttacatgtccaaggatgtcgcgaaatggctcaccgactgccttccatttcccgatgacgggcgcagacacgtcttctgcgtctcgggcgcggcgacgggtctcatgcgccgagtttggcgtatcggaatcctcgatgaggatggtaagaaggaccgagacgatgaccgccatcatgccgtcgacgccgcggtgattgccgcctgcacgccctcggtcgtcaagagcatcgccctcatcagcgaggaacacgccacgcaccgagatgccgaccgcctgttgaaccgctcattgccctatcccgagttcaaaaatcaagtcgatgcgtggattccgtgcatcgtgccgacctattcaccgacccgcactgccacgggagcgctgttcaaggagaacgcctattcctacaggggagtcgacgagaagggcaaagacctcatcaagaagaaaaagggcgcattgggcccctgcactaccgcatggaaggatggcaaagggactgccagagcctacgatggacagtacggcttgcttgccgtttataacgaatcgacctcacgttggcttctagaccccctttactacatcgatgtacaaaggcgaaaggcggaaaaaccgttcatcaggaagttctcgaaagacctctcaatcgactactgggagaagattccactgactggagacgaacagacactatttttgaagccgggagacgttttggcacaggacggcctggtgggtcgtttgcattcctacgacatttccgtcaacacagtaaagatgtattacgcaagaggggaaatttccttccagaaaactggcccgctcgcggccgagaggttcccgaccctgtcaaagtggaatgacgggctgaagattatgcaagaggattgcttaggcctctgctggctcgaattcctcaccgatcgagcggccagttgctagccgataacagacagtcttaagaaggggagtgcgctgaagcgccttccccttcttactaaaacgtcaagaagagctgcgttccgggtgtctcattcccgccggagttcgaggttccggtgttgacgagaatctccctgtcaacgtactgcttctcggtgaactgcatcgccacgacatgacccgccggcgggaggtttttcctaagctgctccgtatgggtctcagcagatgccctgctgaggagattccgcgagtagatgctgttctgctccctgatatagccatcatcttccagaaaacgcctgaacttgatgtaggcatccttgttggatttcgtcttcgtggggagatcgaacatcaccaagagtctcatgattctcatagcctgcctctcgttctcagactgtccggtgtagccatttccaaaccgataagtgtgggcagcaggagctgatccgaatccttcagctcgaccgcccttctcagggattcacaatagacgtcgatagccatctgaatgggcatctccttaccgtccaccaagacgataaccgacgtgaccttcgtcagggtatccttgttcatcctcgatagaggacccaagatgttctccttgaccaccagaagatcgacggcggctcggaacggttcgataaggtcatcaaccagattgaaagcgttttcggcattgtggtgatggataccgcgcgaaacgagccaaccgtgtgataccgcgcactgcgcgataccagatctcaaaattgcatagccgaaatccagcggcgcggtcatggggccttccctgcgcgttccatagggaagtagtttggggaagtatgcacccgcagcggcgctctccatttgggtcttgtcgttgcttcgaacatccctggcatatccgaggagtcttttgacatcagattgatccccaccgcataactcaagacaacgcgcctgattctcaattttcctgcggacgatttttgcccagagctggtttctgagcggtttcgagatggtgagctgatgctccacgatttccgcatgccttgaatgtgcgcctatcgggagtgccagaccgttgggcatatggttggagccgcagaaaagaatgccaataccttcatcattgacttgccccataagagaagccgtgatcgaaacttgggggttatcgattatgatgacccagatgtcggatagaggtattttatcgaggactttatcctcatggcgttccttgatgacaaggttattgtcctgaacgcaaaggtactttggagtgctgatcgtaaccgtcaataacataggtggctccgttttctggtatcttatgagatatggacggggtctttacgtatgtagacaactaatcgatattgttattgccgaattggcaggttttattcaccaatgcaccatatttgattgagcatttttccaaaaacagggaaggaaggccggagcggaatggcgattatcatccgaaaaaacgataattcgaagctgtattccgctgatatttccctgaaaaacggccttcttgaaaggcatttatgggtgccaaatatcgttttacaaaatttgaaaatgaaaaagcccctgctaaaggggctttttcggcagagggtattctagcatctcaatgaatggcactctgctagggctttttatgtctactgagctcaagaccaccaattctagcatctcaatgaatggcactctgctagggctcattgtgctccttactggcacaatgaaagattctagcatctcaatgaatggcactctgctagggctacgcgccccctgtacccggcgttttccctattctagcatctcaatgaatggcactctgctagggcgacttacgaatagccccgatgagctcagagattctagcatctcaatgaatggcactctgctagggctcaatgattttcccgtttccttacttttccattctagcatctcaatgaatggcactctgctagggcgggccatgacggtcggtgctgctgctattctagcatctcagcaaatggcacttcacaatgattttgccctaagcaatgggtataatcatcgtactacattgtaatactttgattggagtggccatggccatgagtgcaacagctatcagattcgatgagggcgagaaggactggatccagtcctatgcgagcgttctcggcatgtccttttccgagtttgtgaggagcgccgccctcgacaaggtcgaggaggcggccgacatcaaggcatacaacgaggcgctggcggaagataacggcacccgctactcgatggatgaggtcctgcgcatggccatggaggccgaatgagcttcagcgtcgtgtggtcaaaggcggcgaccaagcaacttctcaacatcccgaagaaacagcgcctcattatcttgtcttgggttcaggagaacctagacgggtgcgacgacccgcgccgcgcaccgaacggaaaacagcttcagggaaccgattccggttggcgctggcgcgtcggcgtctaccgcatcctaggaaggattgaagacggaaaggccgtcatcgaggtcgtgagagtcggccaccgccagggtgtctacaagaacatgccgcggctgtaaccatcgcgaggccaagacaaccgcaagcggtgccaaactgcccgcttgcggttgtctgagacatctctccgcacaacaaaaaggggagcccctaaagaactccccagcacggcacggcacggcaccgaaattcctaacctctatcctgctcgccagaaatctcctcgcagtcctcctgctcgaactccgcctcggcgctcttcgcatcgcagatctcatcgagcgactcgccggcctcctgtgattccgcattgccgaccgcccagccatagacctcgcaaattgcaggcacgatgtcctgcaaatgaccttgcttttccgcaagggctacgattacatcactgatcgcggtcttcgtgctgaacccgttttcgctgtagagattgtccacctcatcgccactgagattttcgatctcgtttacgaaattcgcatcgacgagcttgacgatatggtcttccatcgcgccgacgtatcccacggactcgcttacgatcaattctccgtccttgaccgacaactcgatagtgtctccgttcatctttttatagagagcctcaatcagatcgccggcgtcgttgatagctccaattatttgatatgggttgtactcatcgagaaatctgtacccatcgtcaccgtctttgatgagagggatggacttatgtatatcgatacctgaaaggttcgcaacctcgcagtctcgccagtcggaattgtcctcatagactcgctcgtccaactcgtcatagaaccgctcatcgatgatattttcgatgttctccttctgggcgaactcgcgataggcctcgacgaaattgatggttttctcatcgcgactgactgccttttcgatggcggcatcgatggccgcctctttgacggcgccaacaaggctcgatggaacccaagtctcattcgagtcgcccaaaccgagtttagcgcggacctcattgatccagtcacccttaatgtacttcttctcgctttctcgagtcgaagaatcgttcgtccagatgacgtgcttgtcttttcccatggcgcctcctaaagctgtcttgcctgcctatcagtttgtcgggcagacggctcgcgaagagaccgtgggacagaaatagaattggccgagcatgttgaccgctcaatggcaggacgctcagtatcctgccgaaacatagactagaagatagactgatagtttgcgaagatggctaatcgaatgctactatcaggttgtgccgcgaaacccgctcctcaggtagtcacactttcggaacgcgggcaacgcaggtgcagtcgaattgatagctcggtgccagccgggctatctctttctcccttcgccatccgagcacatttttttgagaagatataccctggccggataggatgcgtactgctggctcgatgcccgactgaaccgcctaaggggtatagaaatatagacccgatcccgctccctaggttttttcaggaatatccgaaaaaacctccaaaagaaaagggggccgacgcatcagccccctccaggtgtcgcccaaaggcttccaccgcaattgatttcattctaggctcgttatgaatcgagtcaatacccgaaagcgggggaggggcatccgcaccccccccaaaaaaccgaatgagggccgatttaagccctctttcctgtgtctgcttccacagaatcggccagcaataaaatcgtccctcattcacggctaaggcaagccaggtgcgtattcgcaacgaccttgcttactccttgggaagctcgatggggtagtaggccgctaggctgcggtactttcggtagaaccccgacagcaagctcaccacgaggtggctgcaccactcgatggaaacgttggagtgcttgcatgagagccgcaccaccgagtagaattctggttgaaagaagcggaccccgcgcaggtggctaaccgattacgcgggcgatgcggatttcaacttgcaaaggccgggctgcaaccccggccttatttttggctcggattgaacggttgacgcctgtggagcggcagccgttatagttcaaagctcgacggaaaccatcgaaaacaggacgatatagccgaaagcgacactcccgtactctcgatacaacatacggaagcgccgctttcatttggcatcatatcttacgaattccaacttcggcaaccgaatcaagaagagcatattgccgccccgtcatcactagaacagcatcgccaaaagaaagctcgtgcggggaggtacgggcttaacagctgggattagaagcaccaggcggggcagacattgatgacgtccggagcgccgccaaaggacgatggctgaccgttgtcatggacaaagagaaaggacgtggaaagggtgttaggaaccaccgaacgctcccaccaattgctaccaatcttcagggattcattggccgaatagttattcgtcaccttgcccttgaacgcctcgtactgggtaccctcggaggaagtccagggatagctggatgcccagtaggaggtggggaccatctcggagtagctgagcaggaacagcttgtcggaggtcgccgtgacggcggcattcttttcggcaccgccgacattgttcgtgagcttggtgacggactttaccttcgactggaggtcggacggcatgagtttccaaatctcgccggagttcatcttctggcgaagctccgacttctcccagccgccggcgtttgtgctcgtggcgttcatacgggagctgatggtcgtcgaggtagtgaggaacgtcaggcccgccttgccgctaccgtcggccaagtcatcgtggttgatgccgatgatgcgatattgcatcatcttgccgttcgtcagcttcatcgaaaacttagtgccggcatccatggcggccttggccttggcgtagaccacagaagaagtgccgttcttggcgatgtcggtggccgcggccttctgctcgtcgagcgtccagtccttggcttctttctgggcaacagtcttcatcgcctcgcggtaggccttttcctccgcgctcatgaagctgtccccgtcggcgccggagtcgaccgtgttggtgacttggttgaattggtttctgatggcgccggagacctgcggccccgcgaacacgataaccaggccgatgagggcgataatcagtacgtactcgataatcgattggcctcggagacgggtattcctaggagataccccccccccgaaggttaattgccgctgcatgcatacgcgacactcccttcgtatgggaattgatattgcacgcaggagcgtacgatgcagcgggccaatcagctctcaacgtgccgcagcggcatcccaaaacacgcagctaatacttcccgaacggcaagcgggacgccttccttggcgtcccgcagtacggctagttgttattattctcatcctccttttcatccctctcatccggcgctcatgcgtcgaacctaacccccccccgctattcctcaaaatcgaaattttctcaattttgaggaatagcccttatgccctgtctttcccgctgcggaggatccgttctccccgattgagcctcaaagcccagccgtcccctcgctccgccaattgtcgccactttatgaatcgtagattcccattacgcatatgtggaatcacgcctattatgtaaaacaccgaacgagtaggggattctagcaccccaatgaatggcactctgtttgggtaagaggattcatcccataggatggatcactcgcggagtatatcctctcggttggttttgaacgccaaccgggaggtgatctcctttttcaaatcgcaattccaaaaacaaaatccccagacgctttcagtgaaagcgtcttttttgtattacaattactggtgacctcctttcggtgcgccgttattccttttttggattaacggcgcattatctttctgttatacttaatatcgaccaaggcgtaccccaagcgccttgtagaacaggaagatgacaacatgccccagaatcaatacggttcgcgtgcatcccgtttccaaaatggtgcgcgtcatgccgactgaaaccgaagaaactaaagcccaaacggcaagctccatcattgccccgcagcaggagacgattgtcctgacggcctgcatgcgatcgaaggacgttcgcgaggacgttctcccgatgctgctcgaggatgatttcgtcaagtctgaccatcgtgcgctgttccgcgccatccgcgccatgcacgaggcgaactacccgattgacgacgtatccctgctcgactacctgagatccaaccgtgagctggatgccgcgggcggggagcagaccgtcgggcgtatgttcgagtccgacatgccactgctgtcctggcagaccgcatatgaccgcctcatcgatgcctcgaggcgaaggtcgctcgtgacggcgatgaacgagattgaggccgaggcctacgagaccccgaccgatatgaaggcattcgtctcgaaggtcgagggctcgatcgcgcaggtggccgagcgccgcgatatgcgcccctatcggggcacatctcatcgttcctcaccgcagccgtggacgaggccagaaacctcgatagcgtccccttggactccaccgtcgtgaacacgggctttgcaaccctggacgagatgctggcagggctgcgagcaggccagctgatcgtagtcggcgcgaggccggccgtcggtaagacctcattcgctctcaccctcgcgctcaatgccgcccgccagggtgtgaaggtcggcatcttctcgctcgaaatgtcaggcaaggaacttgcccagagaatcatctgcgctgagtcaggcgtctcgatttcccatttccgcatgggaaccattcccaaggcttcatgggatgccatcgcggccgcctgctgcgatatccccggcaacgacatcgagatcgaggacaaggcgagcgtcacgataggggacatccgcgcgaccgccgcccgcatgatgcgcggcgcagagcgcgggctgattgtgatcgattacctccagctcatctcgtccgtatcagatggcaccaagtaccaaaaccgtgcagtcgaggtcggcgaaataagccgccgcctgaaagtgctcgccaaggagctgggcgtccccgtggtcacgctggcgcagttgagccgccaggccgaagcccacccgggcctgccgcgcctatcggatcttcgcgagtcgggatccatcgagcaggacgcggacacggtcctattcctgtcacgcgacccggacgaaatcacggacgaaaaatcgggttcaaggcaggtcatcctgtcggtcgcgaaaaaccgcagcggccccacaggcgagatcgacatgctgttcgtccccacgagcacgaaattttacgaggtgggacccagaaaggaggcccatgatgagtaagaagaagaccaagcgcaactcgaacaagatcatcggtcgctgccttgaatcggatgcccatgcacagaccatcgacgagggctttgcatttctcgaccgtccgattctcaaaccgcgcgaggctctcgcgtatcagtgggcgctgcgcaacatcgcgcttcagaacctgcgaatcaaatcggaaagcactcgcgatgcgatagacaacggaacgagctatttttccgacggtgcgattaaggtgaaggcccatatcttgagcggcatcgccaccgacgtccgcttcgccaccgatgacccggatgcccccatcgaccggatcatgatgtcgttcgtaaaggtttacaacgaacagcagcatagatggtgtcccgtggattcccatctctggctattcgcagacaagctgaccgtgcgcccaggagagggctgggaagagcgagaggatggcgagggcttcggagtagcattaggcgaccgcgtcgtattcctcgccgaggataggctttatgacggaccgaaaggcatgcgccgacatggggcaggggaatggtcggtgttgtcgtcccagctgatgtacgggacgaacaacaagaggaaagcccgcatctgcgaggttccccgcaaagtggtaaccgatggctacctgatgtttctcacgaaacgaggcgagcaggtcggtatcgcgctcatgaataacgaggaatgggcggaatgtcaggagcgctgtcaagcggcggcaatgaaagagccttggagtctcgttgcctacctcgagcaggccaaacgccccctaataatataaaggagatacatgatgattcaaaagaaaacgccgcgctgttcccgagtggtcctagtcgaaccgacgaggaccatctatgggcacatggttttcaagttcacgggtaacgccgagcgggtaaccaccggtttcatcgagagggagaatcgggacgatggttccgttgtgtggcgtccgtatatccgctcaacgacgcgctccgggtattggaatgccggaccgatgaaagagttcgttgacgggtacaagtcggaggaggatgccatgacggcgcttctggacgaggctcaggaggttctttggagtagctaatggtcgagattgaacccaaccggctgcacaggcgcttgaaacgcgccttgacggccaaaggcatctctcagcgcgagctgggcagaaggattggggcgacgcaggcgagtgtctcgcactatgtgaagggaaagcgcctgccgggaacggtcgtcctatacaaaatctgtaaggaactggatgtctcagcggattggctgctggggctgaagcgaaaggaatcggacatgaacgatggcaattggattgatgacgggattgtgccctaccgcacggcggatgattgctcccttgtcgcccgcatcgagcaggcggaagacggctcattcgaattgggaatcctcgagggcgacaccgcctgcgagctgttcgcccagcggttcgactcgatggacgcggccaagaagtacggcgatggcattcttgaccagaagctgcaaagggacaaggcgatcacgcttatcgaggacgaactggacggcgtactgagtcccaacctgtcggacgaggactacctcgcaagcgcgtcgctcgatcgcgacacgatgcgcacgctggtggtaaacgccgtcccgatttgcacgggtcccaccaatcaggaggttgccgtggcgttctccatttcaggccccgacggcatcgagctggagacggagcaggagcaggctgccttcgacctcgcgaccgagcgagccgtgttcctctccggtatctggtcggtctacgcaacgccggcggctgcgattgaagccgtgaaggggctcatcgccaaacttgaaaaagtctatccatccctgaaccgatagaaaaaac

SEQ ID NO: 1698 - DNA, 22352 bp, synthetic construct
  misc_feature 1..22352: note = Synthetic
  source 1..22352: mol_type = other DNA
gctgatgcgatcgagtaccgaaccgccgaacttctcgaaagcaaacccaatccgatgccgtatcatcctatgacccgtctcgggacccttttgaaacaggagcgtatcgacaaccttgcagccctggctgcctccaagcaactcatggccgacggcaagaccgttgtagatttcgcatacgtctaagacaggcgtgtgggctgaaacagttgcaacccaatggctagacccagcacgaagcatgccgcggcatcgcttctattggatgatgaatggaaagtgacctatcaatgaccataagcgatggaatgatcagagcagaatggcgctccctggaacaagccgaaaatgccaaacgaaaatgcgcggactgcctctattgcacttgcaacggaaacgttcgggacgatttgcaccgtcccgaagatacgaaagttgagtacatatgccaccgcagggacggccatgagttcgagacagcccattcgaaccgatgcaattactggaataaacgcgacgaaagctgatcagagcgctactttttcacatcggtccgcggtttgttctcgtcaatcccacgcaggtcgaactgtttgtttccgcgtttaagtacgagctgccagccgcacgcatcgcagatcttgacaaactcatcgatggtgaatcgcgtattgttgtgcagtcgcgttgacaaactgcctttctgcttgccggttttaatcgatgcatcctgcagtgtcataccgcaatcctgcaccatatagcgaatagcgtcggacgaaccgattcgttcaagcactggatacctctttcagatatacgatagtctatcccgattatagccattctagctatttcctagacgcgacaatgcgatcggccgatgcccgatcactgccaacagcaccgaaaacagtactgaaagcactactgaatcgcccctcgatagccctcggttcgctcatgggattgccgctgcggcaaatcacactggatatatcaaccctgtcccaagatgtaagaactaattcccacattaggaggacagatggataacgatgcccaattcgacccggcaaccattcgtatggcgtatttcgccttgctcttgagcggcaggaagggcgagaacctagaactcgccgttgcccaggaaatgctaaagctggaacgtctcacagccgagcgctcgttgccctccataattggccgttcggtacgaatcgcggcaacgattaactcgattgagttcgaggaatcttcgaagcgttacctgatcaagttccaagcggacaacggagaaaaggaggagaagatccgttccgagcgcgttgattccaaccataagagcgcggtaaagaagatttgggaacgcgatctggtcggtcatcgtgtcctcctcttcaaatacaaagacagggtcggaacaaaagaggcgcccaacggctatcgaatcgccccatactgcatcgacctcggcaaggtggagtagcaacagatgaagcgcaagaaactggttgatttggatttaaaggcgatagtcgaaaccgaactcgagaaccgtaactgcgacggactctattctccatgcaagcgctgtgagtgtggctgttcccgaacgaaactcttttcctgcgctaaggcctgcgcagattgtcgccccggtttacaacaccccggcacgagcgacctaaagatcgtctcacatgatgaatattgcgaaattatcgatcgaatcaaagctgaacacaagcgcaacgaggagaagctccgagccgaggcaattgagaaaagaaaggccgaacgactcggagcaaagcagattaaagaggaaaacgccctcaaaaagaaacaggttcgaaccgagaagaaacagcggcgagctgataaacgaaagcagttcattgatagcatccatgcaaaacttgagaagctggtcgaagatatttcagccgcgatacgcacgagtattctttgcaaacttctcagtggcgtatcgatcggatcgattgtcttctcgattgcatctatcatcttctttgaggttatcaagcgtgaatggatggcttcggcggcaaaggcagaagcgcttgcagccgtctatctattccaaaagctgtttatgtttgaggcaatctacgtattcgttatcgtagcgtttacgattggcttgattatcgtccgcgtcgttcgcggcgattggaaggttgatttcgagcttgaagaacagtctgaaaaggaagaaaaggacgatcagttcttcctttaggattatccgtaccctcctccttatatattcccagcctcatattattgggtcaattcattttggattgacccaatttctttcttcaaaagcagtcttgatagctgatttgatgttcatccgctcgttgcacaagagcctggcaggactttattcgaccgatagttttttaatttcgcggccgaggtgcgacatttttttgccgcctgtttcatgcatgaataggttgagcatcttcacaggcttttagacgatgatttagatgtactttgctatttgatttcaactcaccgtcctaaagattttcaattaccgatgcactgcttttgcttcaaaacaaccgcgaacatgtattcagcagggttgagattcttatagggcagaccgaattccagttctaaattgcagtccagaaaccaaccaaataacaactagagactaattgaaaggcatgcggagtgccttgaatggcgctccgcggcatcgctgtttgttattattcatattcttataattccatcgaaatgccgatgcatttgaattgcgcagcctatttgggattgtattctgcgtatttttgcccgtttgctttttaggaatcaaacggaatctatctacccgctcgttaggattgccattgcatcccatcaaatatggcagaagctaatgcctgactgacacgcaaaggcgagaacggaaacctatcagctcacccatgtccatatgtttctaccgctcttttattttcttcagcaattacttccgtcctttacgcacgctgatttcagtttgtaatttatggttacgggtactattctgcgtgtgatttaaagcaatttgcaaaccaagcggagtgccttgaatggcactccgcagtatcactatttgttattattctttttatccaaaggcgaaaatagcttcgcaaacgacttgaataccccatattgctgtgcaataaaaacttccagcagtttttgatttcctttatatcgaataacgttttcagtttcagaactacaaccagttttaatttacggcgtgcatcaatcggtacgcgaagcgctttccttttctatttcagctatccgcccttcaataatacgcagtcaatttgcgtttctaaattgaaagaacttgctttctgtttgccagcaatcatcaaacacgaagcgatcgcaccatcgttttgcgttgcacgaaacccatttaccgacttccaagtttatacaaaagcatttgcaaatgtcgatttcggtaccgaacaacaaccagatcagcgttcaaatctgattgctagaacccattcaaccttacaaatagtttgttgtcgactactcccgccctcgttcaaatcggaacccgtatataacttactaattgccgcacacacatcagaactcgatcccagactactgaaccactcagcaagtaggggagtgcgccacctgatccgaatcgcagattactacgttcgccttccaagcgcatcttcagaacacacctactttcatcgcccgtgacctctttgctagacctattccccatctgtttcattgtcggacatatatcacgaatcttatgccctgtcagacatttaagctccccgtctgtaggattgtcagacatttaccgggcaagtgatagcaacctgtcagacatttcccaacgtcccgaccacgggccacgggatagcagaattcgccccaagcaggggccgatcaccccgcggcgcggccgcctgccctgcggtcaggcggcaggtgcaaaacggccttgccaattgtggatgccgctgcggcaacacctgagccaacctaaaaacgtgccccaaactacccataaggccattttgcacgccagctgcgttcaacgtcagacattaggaatgtcagacattgaacctgcggcaaagccgcagctggggccgctagcggcctgtaatcgcttcgcttcgctcgctcccgtcaagcgaaatgtccgacaggctgtcagacatttagatccgcttgacgtgcggcttgctcgcgaagctcaccatcggccgtatgtaaggagatccgaaatgtcagacatttcgacagatgaaaatgaactccagaccacctcacccaatttgtccggcattagccccgacgcaccccaaatgtctgacattttgcaaccccaaacgccgagctccatgtcgacccaagcgcagcaaggccagtcacacgaatcgcttacggccagcttgtccgacattttgccgcctccaaatgcctcacagtccgctacccgccgcgtcacggtccgcctcccgaccgcagacctgacagccctcgacgcccgagccgacaccctcaacgccagccgaagcgactacctccgcactctcgtcgccctccctgtcacgctcgacctgacttccattcgccgcgccacaccgggcaccgaatcgctcacccgccccctcggcccagacctcgccctcatgcagtccgacagccaaacgagtaatttggctgtccaggcaattaccgatagcatgctcgaatccatctccagtgaggtccgcgctattggagtcaattacaaccaagctgtaagagcactaaaccgcatcataaagaagtacggaacccatcgcgccttatcgcaagatgagcggacggaaatcgctgagctctacgagcgcttggcaaagcaaaacaaggctatctatgaacgcctcaaggttctcgcatccgatgtcgaggccctgtctgccaaaccgaccgtcaacctgaccgccgtcggtctcgcccaatctgaggcccctatcaataaatgcgaacccaagcgccgtcatcgtgtccgtggtaaaaagcatggctcgccgcgtcctgaccaaagtgaggaagaaggcaacgcatgacctatatgaagattctctctggacatagttctgccaagtggattcgctactacctcttcaaaaacgaccgcgccatcggcaaagactttctcaatctgactgatcgcgactggaaggggagggactgggcgaaggtcatggacaggacccgagaaattttcggcaacgacgttcccgtcaaaaaggacaccaaggtccgcacctacgaacacttcatcatctcgttggacgaaagggatgacggcgttgaactcgatgacttccgcgacttcgtgaacgagtgggcatccaaatggtttgactcgcgcggtccggaaggacagggcatcggccgcttcgaggtggcgattgcctatcacgatgacaataaagctcgtggggtccaaggcaagcagggcatcctgcatgcccatctcgtcatcaacaacaccgagctcgagacgaaacgacgcatctccggtctgcgtacgacaaaggtcgtccaggcgatgcgggctgatttgcagacgatgtcactcgagcgcgggtggcacgcattcgctaccgatggcaagtcctacacccaggccgagatggatgcgaaggggctacaagtatcccgcggcaagagacttgatcgtgcaatggcggcactcgacaacgttctcgcaaacgaggcgaggggcgcccaaatcgatgactacggcgaagcgatgcagaaacagctggatgagcgtcgtccagtcgagaaattgattcccgagacatacatcgatggcacaaaagccgaacggcaaccaaatgacggtaagcccgacccattcaattctaatcaggtcactggcctttcgtacacaaccatgaggaccgatgacggccgcgccatgcgtcttgtcgtcccacgtggattcggagactccgataccatggcggagcggcaaatcgaaacccgtgaaggctggtcttggaaggatgatatccgagaccgcgtggacgtcgcgatgcgcgtttccaaaggccctgtcgatttcgcatcgaagctcgccgagctcggcatcaaggtcaactacaaccgtaacggtgacatcgtctatcaccatccgagtgatcccacgtccagaaaggtcaaaggctcaacgttgggcaagcagtattctgcgatatcgatagagcagacgatggcagaaaaatacgctagccaacgtcagaaggctcaaggactcgtcagtcgcgagcgctggatgaacgaggacgagcgctccgctgcgatggccatcgccaaggcggcaacgccctgcacccgtgagggagcggaacttatgggacgcctgaaaacgaccattgagcaaaatgatgccgctccgcacgaccgcacagttcgcggttctaacgttgagtatccgtcttcccttgccagctcgctcggcatcgagtatcccaggtcttctgcgaccggtgatggccgtcgcaagaagatgaccgaggaggagatccttgatgcgatggcggatgtacgcgacgaaaagggctacggcggtctcgctgcaaacaatccgacgagcacttcctccaattccggcaattctcagcatcaggaagatgcgaccgagattcagaaaactaaacatcactaaggagtaggcatgattattgctatcgagtacaagaacggacgcatgaaggagttcgacacgagcgccttcaccgccaccaacgcaatgagtgcgggcgacaaggcggcccgaaacgtcatgaccgagctcgacctacggctcgacctcgtagacgaggttggtctgagacttgatttctattggtatgacgcaacgccccagggacagcgcgtcgatattccgggtctcacggattcgaaaggggaccccgtcagcctcacctctgcatcgaggcgcttggggacctccgtgctcctctgctcccgcgaaggcatcaaacagatttcccgcatcatcgtacagcgtgcgaacgggacggtggatgccctttggcggcaggggacgggcgattggctcatcaacggggcgcggttcgaggctcagcgcgtgctttcctacacggacagcaacgtcacttcgatgaattcccaagcggtgttcgtcttcaagtatatgaagaaggctaaccccttgatgagcgaagaagagatttgcgaccttattggctacccgctcgaagcatacaaggagattcagctggacgaggcgaagaacgccgagggaatagtcggtgcagaacttatcgaatcggatgatggagaggagtcggaatatccttccgattccgtcacctccgaaccttccgattcaacctctaattcctccctcggaaagcatttcgccgtggacgacgacgatgacggtgccttcgaagatgatgaggactctctgttcgatgtctgacatttgccacagccgtcgtgttcatgatattttgaatgtgttggcgtaaccccaagcgccatgaaacaggagagacgaatataccgcccgaccgtgcgaggcacggctatctattccaatttgattacgcttgactgactcggtatgactcgaaccgtctctccgcacgttctgacaggagatgacaggtttgcggaagcgtaacgacatccagacgaaaaaccagatgagcgcctggtcgaggtggtctcgatgaaagcgacggtcaaggtaagcgaggctatctctcggcttcgcaggcaggtcgacacgacggagctcgaggaagccgtcgatgatttcctcgcggcttacggagagctccgcagccagtactactacgaggactccgaggcgaaggcgaacgcaaagaccgcctcgacgcttctggaagccgttgaccgcgggttgattgagctgccccagaccgacgatggaatcgtgattgtcccagacatgaagctgcgcctccccgacggggcgaagctctacgtcaactcaatcgaaatagaatcgaccgcgaccggccgcgccccgatagtccgcttcgaggatggctcatctatccgctgtcgtcgcggctcgggcgtgcagattgtcagaatgcccctggaggaggagcaggatgccgactgaacgtgacacccagctcgccctgccgttccgcatccccgttctgcgtgtcttcctgctgcctttcgtgcaagacgggaagcgcgaccgcctgttcctcattctgcttgcctgcgtcatgtccactgcaggctttctcatgcagggaaacggatcgtatgactccgatggctggttcctgctcgcgacgggaaagcaaatcgtcgaacatggcatcccgtacgccaacccctggtccctttcgtcgtacaggccgattgtcgtccagcagtggctccatgatgtgctgctctacggttcgtataccctggcaggctacgccggcacggtactctatcaggctctcctggccgtcctcgtcgccttctccatcgcctttgcaatccaaggatttggcgataaacgcctgactttgccccgcctgctgttctgcatcggcctagcccttttcggcgcgggaatctacatttccgtccgtcctacggcatggtcgatggcatgcatgtgcctgaccgttggtgtctgcacccgttggcggcgaaccggtgactggcgctatctcatcgccttacccgcgattacggtactgcatgtgaacatgcagtcggccatgtggctcctagatgtcttcctcgccggctgtttcctgcttccccgcgacctatccgaattcaaatccaccacccccgatgagacgctggcagagatcttcccgttaaccatcgccctgcctgcgatgcttcttgccgccttcgtgaacccgtacggcgtcgatggcgtccgctatgtgatcgactcgatgggtgcggcatcttacggcaacgtgatttccgagatgaagcccgccttcgaggcaaccaagggcttctgcgttgtcttcttcgctgtcggcttcattcccaccgcgctggccgccgccatcgggcgcaagcgggtcgatgtcccgctgctgatcatcctcattgccgccttggtcgcaacgatgctccactggcgaaacatctggatttactcgggtgcatctgccctcgccttcgcgagcctgctgacgggaaccgaagaccctaccgcatctaaatcgcatcacgcggcaaaaactgctgccttgattgccctccttgccgcgatcggcccgcttgttgcgaactgctgtgtctgcgctgcgaacggcggcccgtcctgctggcagacctccgagaactcggccggagcttgataaagcaaattaaagacgcaggcatctacgaccccgtcgtatacgccgaggatcccgtcatatacaactacctggagtgggaggggatgaaagttcccttcgacctgcgacccgagctctgggacgataagggtgcggcgggagtcgtctccccataccgtgactacgtggacggcatgcaatccaagaaagcaaggctgtcctacctcgccaccaataacttcgactactacatcgtctcgcccgaatcggccaattggtacaccgcgaaattgaacctggaactcgttgactccaccgacaccctgactctgctgaaggatgtggggtagggaagtgaagatcaaagtctggacttactcggagggcgatgaatttccgattcgcaggtcctctttttcccgcaggcattggaaagcatttccgattgctttcgtggcgattatcctcgccgctgcggcgtggtcatctattgcggcgctgcgcggcgaggaagaaacacatccgcgagattctgatggctcacggcgtcattcccgaggcgcgaccgctgaatggttctccatacgcaagggcgaacaggacaacatccagctgcgcgtcaagggcctgagcgagattctcagcggccgcgagctcgctcgcattctctacggcttcgctcccgccgcggctatatcgattatggcaaggccgacaacgacaaggatgccggcaaggtgaagaaggccttgaaggcgaacgccgaggttatggaggcgaatggctacgagacgttcgcccaatatctcataacgcagtccaggatccgcaaccgccaagcgactacacccattgtgtggatatcgacatggtggtggacgaggttcataccattttccgccatcagcgcgagctgggaaacgaacttgccaccgaatcgcttgaaggggagtatctcgccgccctgcgttggcttacagatacgacaagcgcgaccggatcatctactccaaagtgggccactgtacctatctcggcgagcccgtcaaacgcgccccgaaatcgtccatctcctccgagatgtccgtgcctaccagacgctcgcgaacgtcaagattgaacatatcggcggctctgctacccagattgcgcctgcggtgcgcaaccagatcgtccacgagctgttcaaggtctccaagaacccgaaaccgctgaagtggtcccagctgcgcaagaagctcgacctcgccgacaccgccacgttcgccggtatccgccaatcggatgagaagaacgatgcctgcgtgacagctcccgcatggaacgcactctgctcgacgctccgcgacttgaatccgacccttctcaatcgcctccatgatgacatcgacctcgccgacgcagtatgtgccgccgccacgttcgcatcctcatcggaggccttcgcctcgagaattgccgaacttaccgatgggctctcaaaggaggacgtggaggcgcttctcgagctgccatatggctcgaagctcttcacgggatacggctcgacgagccttaaggcgctccagatgctccgcaatgcattcgaggacacgaagatcgagcgtctttacgatgccgaggtcgcaacgggtctgtatgacgcacgtgaggcgctcgcagccaagcgcaacgcgcccgataatggtttcctgaaaccctattcgagctattccccgatctgtaccaacccggttgtcctgcgttcctgcgcccagctgcgccgaatcatcaactcgattatcaggcattatggtctacccgatacgattcgtgtagaggtggcgaacgacctgaagcacacgaagcgagagaagaagctcatcacgagtggcaatatctataaccgcaaggtaaacgagaaggcaaaagacgatatcgtagaatttctcggccttgccaatgctgaccgcgtgaggggacgagaccttgagaaggtacggctctacaacgagcagggcggaaaggacccctacacggggcgggggattgatttcggtcgcatgctgacggaaaagagctatgtcgaggtcgatcacatccttcctttctcccgttcctgcgacaactcgaagactaataaggtcctcgtcttgacgaaatcgaaccgcgacaaggcgaatcgaacgccctacgagtggatgacctcgggcgagccgaccgcgccgaactgggacgagttctgcatccgcatggatgtctgggccagcggcaaggagccgaagcactactattcctcgaagctcgcgaaattgaaagaagacaacttcacgaataacatcgactccttcatcagccgaaacctgaacgacacccgctacatgtccaaggatgtcgcgaaatggctcgccgactgccttccgttcccaaaggacggacgcaggcacgtattctgcgtctccggcgcagccacaggtctcatgcgtcgagtttggcgtatcggaatcctcgacgagaatggtaagaaggatcgagaggatgatcgccaccatgctgtcgatgccgcggtgattgccgcctgcacgccctcggtcgtcaagagcattgccctcatcagcgaggaacatgccacgcaccgcgatccccatcgtctactgaaccgctcactgccctatcccgagttcaaagatcaggtcgatgcgtggattccgtgcatcgtgcctacctattcaccgactcgtaatgccacaggagcgttattcaaggagaacgcctattcctacaagggaattgatgagaagggcaaagacctcatcaagaagaaaaagggcgaggcagggccgtgtaccaccgcttggaaggacggcaaggggactgccagggcttacgatggcagtacggcttgcttgccgtttataacgaatcgacctcacgttggcttctagaccccctttactacatcgatgtacaaaggcgaaaggctgaaaaaccgttcatcaggaagttctcgaaagacctctcaatcgactactgggagaagattccactgactggagacgaacagacactatttttgaagccgggagacgttttggcacaggacggcctggtgggtcgtttgcattcttacgacatttccgtcaacacagtaaagatgtattacgcaagaggggaaatttccttccagaaaactggcccgctcgcggccgagaggttcccgaccctgtcaaagtggaatgacggctgaagattatgcaagaggattgcttaggcctctgctggctcgaattcctcaccgatcgagcggccagttgctagccgataacagacagccttaagaaggggagtgcgctgaagcgccttccccttcttgctaaaacgtcaagaagagctgcattccgggtgtctcattgccaccggagttcgaggctccggtattgacaaggatttccctgtcaacgtactgcttctcggtgaactgcatcgccacgacatgaccgccggcgggaggtttttcctaagctgctccgtatgggtctcagcagatgccctgctgaggagattccgcgagtagatgctgttctgctccctgatatagccatcatcttccagaaaacgcctgaacttgatgtaggcatccttgttggatttcgtcttcgtggggagatcgaacatcaccaagagtctcatgattctcatagcctgcctctcgttctcagactgtccggtgtagccatttccaaaccgataagtgtgggcagcaggagctgatccgaatccttcagctcgaccgcccttctcagggattcacaatagacgtcgatagccatctgaatgggcaactccttaccgtccaccaagacgataaccgacgtgaccttcgtcagggtttccttgttcatcctcgatagagacccaagatgttctccttgaccaccagaagatcgacggcggctcggaacggttcgataaggtcatcaaccagattgaaagcgttttcggcattgtggtgatggataccgcgcgaaacgagccaaccgtgtgataccgcgcactgcgcgataccagatctcaaaattgcatagccgaaatccagcggcgcggtcatggggccttccctgcgcgttccatagggaagtagtttggggaagtatgcacccgcagcggcgctctccatttgggtcttgtcgttgctttgaacatccctggcatatccgaggagtcttttgacatcagattgatccccaccgcataactcaagacaacgcgcctgattctcaattttcctgcggacgatttttgtccagagctggtttctgagcggtttcgagatggtgagctgatgctccacgatttccgcatgccttgaatgtgcgcctatcgggagtgccagaccgttgggcatatggttggagccgcagaaaagaatgccaataccttcatcattgacttgccccataagagaagccgtgatcgaacttgggggttatcgattatgatgacccagatgtcggatagaggtattttatcgaggactttatcctcatggcgttccttgatgacaaggctattgtcctgaacgcaaaggtactttggagtgctgatcgtaaccgtcaataacataggtggctccgttttctggtatcttatgagatatggacggggtctttacgtatgtagacaactaatcgataatgttattgccgaattggcaggttttattcaccaatgcaccatatttgattgagtatttttccaaaaacagggaaggaaggccggagcggaatggcgattatcatccgaaaaaacgataattcgaagctgtattccgctgatatttccctgaaaaacggccttcttgaaaggcatttatgggtgccaaataccgttttacaaaatttgaaaatgaaaaagcccctgctaaaggggctttttcggcagagggtattctagcatctcaatgaatggcactctgctagggctttgagaagcgcggaatcctcgatgaaatcattctagcatctcaatgaatggcactctgctagggcttttcctcttctttggccataaaaatggagattctagcatctcaatgaatggcactctgctagggccgcgaagcccccgacaacgaacaagacaagattctagcatctcaatgaatggcactctgctagggctcctggcggcgcaggctatcggatcttatcattctagcatctcaatgaatggcactctgtttgggtaagaggattcgttccgtaggatggatcactcgcggagtatatcctccggttggttttgaacgccaaccgggaggtgatctccttttcaaatcgcaattccaaaatcaaaatccccaagcgctttcaccgaaagcgcttttttgtattacactatccataacctcctttcggtgcgccgttattccttttttggattaacggcgcattaactttctgttatacttaagttatcgatagggcgtaccccaagcgccttgtagaacaggaagatgacaacatgccccagaatctaaacggttcgcgtgcatcccgtttccaaaatggtgcgcgtcatgccgactgaactgaaaatcgcagaaacccaatccgcaagcacgatcgtcgcacctcagcaggaaacgattgtcctgactgcctgcatgcgttcgaaggacgttcgcgaggatgtccttccaatgctgctcgaagaagatttcgtcaaatccgaccatcgaacgctgtttagcgccatccgagccatgcacgaggcggactatccgatcgatgaggtttccctgctcgactacctgaaatccagccgtaagctggatgcagccgggggagagaaggccgtccttcgaatgttcgagtccgatatgccgctgctgtcctggcagaccgcatatgaccggcttatcgatgcctcgaggcgcaggtcgctcgtcatggccatgaacgaaatcgaggcgaaggcctacgagaccccgaccgatatgaaggcgttcgtctcgaagatcgagaactcggtcgcgcaggtgaccgagcgccgcgacatgcggccctaccgccatatctcgtcattcctcgccacggccgtggacgaggtccgccacctcgatgaggtccccctcgattccacagtagtgaacacgggctttgcgaccctggacgagatgctggccggcctccgtgcaggccagctcatcgtggtgggagccagaccggcggtcggaaagacttccttcgccctcacgctcgcgttgaatgcggcccgtcagggcgtgaaggtcggcatcttctcgcttgagatgtccggcaaggaactcgcccagaggatcatctgcgcggagtcgggcgtatcgatttcccacttccgcaggggaaccatccccaagacctcatgggacgccatcgcggcggcctgctgcgacataccgggcaacgacatcgagatcgaggacaaggcgagcgtgacgatgggggacatccgcgcgaccgccgcccgcatgatgcgcggcgcggatcgcggcctgatcgtcatcgactatctccagctcatttcatcggcatccgatggcaccaggtttcagaaccgagcggtcgaggtcggcgagataagccgccggctcaaggtgcttgccaaggaactcggcgtccccgtcgtgactttggcgcagctgagccgtgcagccgaatttcacccgggcgcacctcgcctgtccgaccttcgcgagtccggatcgatcgagcaggacgcggacacggtcctgttcctgtcacgcgacccggatgaggtggccgacgagaagtcgggctcgaggcaggtcgtcctgtcggtcgcgaagaaccgcagcggccccacgggcgatatcgacatgctatttgtcccgacgagcacgaaattctacgaggtgggacctaggaaggagacccgcgatgactaagaagaagactcggcgaaaatccaacaagattgtcggccgctgccttgaatcggacgcccacgcccagacgattgacgagggctttgctttcctcagccgcccaatcctcatgccgcgcgaggcgcttgcataccaatgggcgctgcgcaatatcgcgctcgacaacatgcggattaagtcggagagcacgcgcgaggcggtggacgatgggacgagctatttctccgacggctcgatcaaggtgaaggcacacatcctgagcggcatcgccacggacgttcacttcgcctccgatgaccccgatgcgaccatcgaccgcatcatgctgtcgttcgtcaaggtctacaacgagcagacccgcagatggtgtccggtcgactcccatctctggttgttcattgaccggctgaccgttcggcagggcgagggctgggaagagcgaaaggacggcgagggtttcggggtcgcgctcggcgaccatgtcatcatcctcgccgaggacaggatctatgacggcccgaagggcatgcgccgccacggggtgggcgagtggtcggtcctgtcatcaaggcttatgtacggaacgaacggcaagaagaggcttcgcatctgcgaggttccccgcaaggtggtcaccgatggctatctgatgttctttacgaagcgcggagaacagcaggtcggcaccacgctcatgaataacggggagtgggccggatgccaggagcgctgccgcgaggccgcgatgaaagagccttggagcctcgttgcctacctggagcaaaacaagcacccgatgtacagatagtggagaagatttatggaagacgtaaagtaccctgcccgctgttcccgagtggttctggtagaaccgaccaggactgaggggcacactgttttcaagttctcgatcgatgccgatcgtgcaactaccggctttatcgagaggagcgaaatggacgataacaccattgtctggcgcccgtatatccgctcctcgacgcaatccggttactggaacgccggtccgatgaaacggttcgtcgaggggtataagtccgaggaagatgccttgacggcacttctcgatgaggcgcaggaggtactgtggggtaattgatggatgagactgaactcaatcgactgcacaggcgcctgaaacgggcgctaacggttaagaacatctcccagcgcgagctgggtaggaggattggggcgacgcaggcgagcgtgtcgcattatgtgaacgggaagcgcttgccggggcctgttgccctgttcaagatttgccgggaattggatatctcggcagactggcttttgggactgaaacgaaaggaattggacatggatcagaattactggacatctgaaggggcgtggcgttccgctcggtagatgattgctccttggtggcacgcatcgaaaaggtcgaggacgggtcgttcgaactggggattctcgagggcgacacctgctgcgagctcttcgcccgccggttcgagaccatggacgaggcgaaggggtatgcggacggagtctcgatcagacactgcagagggacaaggccgtaacgtctatcgagaacggtcttgacggcgtgctgagccccaacatctcggacgaggacttcctcgccagcgcctcgctcgatcgcgatacgatgcgcgaactggtcgtgcgggcgctccccatctgcacgggtcccaactcccaggaggtggccgtcacgttttccattgcgggaccggacggcatcgagatggagacggatcaggagtcggccgccctgaagctggcgaccgaacgggccgtattcctctctgggatctggtcggtctacgccgcgccgggcgacgcggttgcggccgtgaaaggcttatctcctcgctcgcaaagacctatccctcgctgaatcgataggtacctctggactacctgtcaggatgttcactatcgggggtctcccttgatgcggtgttcgccgccgcgagggagacctcctctttcttgtcactcatcatctcatcgagagattcctcattctccttattattcttattattttccttctcatccttttcaagaatcgagtcagacttctcgcggagcgatttggcgaactcgccgattttatcccggccgattgtcacgtaggtcttgctgtcgccgtcatcgcgggtcagcttgaggttgtacctgctgttgaacctaatctggagcgaaccctcgtcggcggcgctgtcgagatacttatccacaacgaccaccttggtggtgaacccgtcaaggttgtatccgctgaccttcaggccctcgggtagcgagacggtgactgaattgagtacctgcccgtactggttggtttttaccttgccgtccttatcggacatgggttcgcttccgaggatgttgccatagggaatgaccactttcgggttatcgaacttgacgtccttggccagattctttgtcccgatgaactgtccatcgaggggtctcttttcattggaagcacccttcttgccagatgcaggggttggtcgtaccttctcggcgttcggtcggacggtgctttcgcggcttttatccgccgccgccacctgaccgccgcgttttgccgtcgggacacccattcccgcgggcatgttgatgagctcctcgcagcacttctcgaggttcccaacgaaattgccgattttatcctgacccacggtcagctcgatggcgtgtccgtccttgaagccgctgagcttcagggggcgcgaatcattgaaggaggcctgcaggatacccgtcttctccgcacgctcgagatacttgtcggggttgacgatttcgaccctgaggccgtccatgctgtagccgtcgagttccatcttgcggggcaggcgtatgacgatacgggacatatcttgcccaaagcggctcttcacgggggagccgtctcggcgcagggccgccgtggaggagatgacgctcgaataggggatactgatgaccatcttctcgacctcatcgcttcggtctctcgatgcgatgccgatgacctgacccttctggacgggcgtaagatcgggttcgacggggtcgatatgcttcacgcggcccagccctagcttcttcaggaagtcgaatccgccgagcgtcttggcattctggctattgcttttcggcatggcgtctccttatatcgcgaatctgtttatgagggtatctgcggcctgttcggatgcactcaacgggacgaaaggagaaatacggcacggcgataatccttatgttgcttgacggcgtgatatacttttgttatcattagggtcgtaaccaatagatagatgcgcttccccaaggcgcatcggacgggagtttgacgatgtcggatttcactaagccgaagatccgtttgcatacggtcaacattcgcgagcagttcgtggcgccgctgatggacggcaggctcaaggcgataacgcgcctgaacgggcgcggctacaacacgggggactaccttcgcttcagcgtactgccgatgcagtcctcggatgtccagttctccatgaccacggatggcgagcgcgatttgctacattatcgcttctacgagattacgtttgcaatgtacggtaagggcctgaaggagggctatgtgacgctctccttggaacttgtccgtgaccagagaacgttggatgccattcgatccgaaatcgaaaggacagccaagaatgggcagaaattcgcagatccgctcgatgcctacgcagatctcttcgacaccgctatccccagggctatgattcccagtatatgaaacgtcacgcgcagcccagtctggacagtatcgccgaggtggcaaccgaggcggcgtccgacgcgaaccgaccgcgcagttgctgacttcaaggagtgcagcatgcaggccatcgtcctctttctctccgacccctataacgtggccggtatcatcctgctcacctacatctatttcgtcgtctgcaagcgcatgctccacttccgtgcgttcaacgtctggaacatcaagacgaacccgaacgcctggtggcgcctcgaccgcggctccatcaagtacgtctacaggcacgctcgccgccatgtccccaagaagatcgaggacttctgcatcatggtgaaccgcgtgatgtaccgccgcgagattctggtgaagctctacggggaagacggcaacgacctccacatgcccaccgtctggatgaagagatccgacctgactcggaaggagcgcctgaccaagacgatcaagtgcgtccccgtcagctcgcctgataagcgcggcttcgcattccttacggagaaccacgcatacgtcagtgccgtcgagacacttgcgggaagctcccgtgccggcggcaagccctgcgagtacgtctccctgtatcactacgagatgatccagatgccgcaggagctgttcatggaggacgaggtcgtgaaggcccgcgtcgagcgcctgaaggaggaccacgccttcatcgtccgccattacaagcgtgcagccctgtcgtaccgcctggcctatggccgctgcctgccgctcaagtacttcctaccccattaccagtacagccccatcagccacgacatggccatcatctagaccctgtccgcacagccttctataatcacccgatatccgatccagataggaaactgacatgaataccgatatgaatcccgagaacgtcaaccccgacaacccagaagatttcaacgccgatgccgagaaaacccagctcatggatacccccgacatccataccggtgccgacgttaccgccgagctcccgagcgcctgcgatctggaggaggccgtggcgcccgactcaaccgattcggcttccgatgccgtccaaagcccgaaacgtccccgcagcctgaagcgcaagctggtcgccggcggcgttgccctcgccatcgtggcggcgctcggcatcggcctgtccctgaaccacgagcccgtgaacatccccgacaacgcccccgtcgcatccctcgtcggcggcaaggaggacgcgaaaacctattccgcctcagtcaccctcgaggcggacggctggaacgatggggacggcgagttctcctacgaggtcgtggacgcggacggcaaggctgccgctaagggcgatatcgtccccggcaaggaggcgtccgtcgacctgcccaagggagcctacgcgctgaacgtcacctctatccccaccgccaaggacggcaagaccacctggctggtgccggacgcggtcgatttcgtcgttgagggcaagggagcctcggtcaaggtgagcctcaccaaggtcgacatgaccgacgatgcggcagtggacgcggcgatcgaaaatctccccgaggaggagcgtgccgcggcaaagaagctcatcgaggcgaagcgcgagaacccgaacgccaccgccgtctccgtacccgtatccaagcccagcagctccactgtccaccaggctgccacggccaacggatcttccaataaatccgactcgaagccggcatccaagcctccggctccggctcgaacaagaacgactccaagccgtcttccggttccggctccagttccaacaagcctgcatccaatccctccggctcgggttcgagcaaggacgacaagcccgcatccaagccctcgaactcgggtaattccggttcaaactccggctccgattccggcagctccaagccctccaagcccgccgagcccgagaaggtctgggccgtcgtgacccccgcatgggacgagcagatctaccaccccgccgccacccacgtcgagaagcggaaggtcggtgtccagtacatggctgacgacggaaagctgttccttgatgaaaacgagtgctctgattactgctgggaaaacggtctccaatatagctgcctgccgcgctatgaggatgtcaccgtgaccgaccaggaggcatggaccgagaccgtccaccacg

SEQ ID NO: 1699 - DNA, 16806 bp, synthetic construct
  misc_feature 1..16806: note = Synthetic
  source 1..16806: mol_type = other DNA
tgagcagcgactatttgaaaaagaagttatgggaagcgagaagattgtaagtaattcccggtattgcctatacaggctgaaatgaggtctgggtttgattgcattatatggtagtaccgtggtatgattgattttgtaaatcatacataatgcaaaagggaggtagggaaatatgatctggtttactagcgatacccatttcgggcatgagaacgtgctgaagttcaccgaccgcccgtgggagacgatttggcagatgaacgacgccatcgttgacagcatcaacggcagggttgccgtggacgacgagctctacatcctgggggatttctcattcaagatgaccgcccaggacgcctatgccctgcgcaagcggatcgcctgcaggcgcatccacctcatcccgggaaaccacgacaaggactggacccagccggcggtcgctggcgccttcaccgtggagccgccgatctgtgtgctcaagatcgacgggcagaagatcgtcctgagccattaccccatggccgactggcagggtatgggccatggatcgtggcacctccacggacacatccacagcggcggcggcgcgtacaacgagttcaaccgcaagcagggccttctgcgctacgacgtcggttgcgatgccaacgggcactccccggtgagcctcgacgagctgagggaatggttcgccggagtcgacgagccgtgcgaccgggtgaaatggccctggtgggtcaacgagaccggcgacaggcaggtcgagcgcgagctggcggcgtacaagcggaaagagcaatcgtaatagacagaaagaagccccggtagacaaccggggctttgtcaaaggattccgctgcgcgggttacaccatgtaatgtgagggggtatttgcgataaaccaaattccgcagcggtgaaaaaatgtctgtacagaatgccagacccattacagatcggaatgaaaaagagaagaaatttaccgatctcgcaaacaaacacgatctggataagagatatgcaaagaattgccgtaactcttttctaattgtgtacttttaggggtatcgacagggtgattcgcaagcgcttgcgaatttagaggaaagagagagtagtgacgacgataaaggaaagtgatcttgaccgactgctaaatttgatggtcaagattaagatcattgaacaccgcggctctgatgcgagcacagaacgccggtggttgcgctaccaaatcgttgaaagctgtcaggcgaattgctgcacgagagacgagttgatgaaacaggttcgggatacatatgacatacgttacccggatggactttttgtcagccgcacaacccaataggtacacgaaaacaagccttaaagtttttcagcaagaatcggatcaagtttgttcttgatacaggtgattgacagatcgtatttaccgttcagatgcgaaacaacaggcagcgacatcagatgtggaactttcactccgctgatgcatgcggcctgtagtttctgaaaaacggtttcggattcaaccattagacaccattcctttaatcctggtcttctgattacatcttgttttcgaacgccttgatgaacttttcgatgtcatcaggtgagacagacgaatcgacatgagcgttccggggcggtgaggagtgcccgaagaaaagcaccttgagtccgtggaagactgccatgatcccacggatgatgagcatgatgatgcaaccgacgagcccgagcacacagcagatcaaatcgaagatcgcaccgacgaagcccggaccgtaccgaacgatgaagatcaagatccttaagatcagagtgagaatcggcggaccgagtataaaaagtaaaagccatttcatttgaattcctccaatacaattaagtctagttctatacacttatattatagcactttggtattagaaaagaaagtcaaccagaaattcaaagatcatacagaaaggaataggcggcctacgcgaaaccgcgcaagccgcctattccctgtgctgcaaaacgttctggatagggaaggaacgtagaataaattatagcactcttctacaggagaggtgtgcctagtcgtcttgctcgctgacctgatcgttgcgcaattggtcgcgtttcatggtctcaaggacggtcggaggcaggcccatccagccggcaatgatctcatcgggcagctccggattggcatttttgatgaattggctgatcttgcaggcacgctccgtgattgacgcgctgcgtccgttactgaaatacagcagctcttggctgaagaacttgacgccgttgacgagctcaccgccctggcgccattcgacaagctcgccgtcaagggtgattttcgccacgtcctcgagttccctcttggaaatcaggcggatgcgggtgctcgccttgaggagtgcgttgttgagcgtggcgttcttcttctcgtcgagcgatgtcacggcattgtccttgtcatggatcttcgcatcgtaccaatagacgtcgacgacaaggccctcattcgagttcttgtcttcaagcaggtcgaagcggattgcgaattccgtgatcaggttcataccgtccctcttgaagggatcggtcgccgtgaaggtggcggtgtcgaacacatcgatcttgccggtctgataataggttataagtttcataggtcactttcctttcttccatagcgtaaatcattataaatcagcgagcatgacgaggggatcataggcgtgcttgcacgccgcacaaaaagcggcctgccatccgaatggaacgacagaccgcatgtctgattgcactaaatcgatgacaacctaatgctcaagattgtccttagcgggcgcggcctggctttgaccgtccagcttttcggacgcgccgcgggcagatgcggcctttgcgccgagactcttgccctgctcgcgctcggcatccttgcgctcgaagaaagcctcgcgggcggccttgttcgccttggacgcggcgaagggatttacgggaatggtgcgtgcttccttagattcgtggttgtagaaattgacctcgatcttaccgtccttgagctgagtgctcggaagtccgacattgatctgctcatcgttagctttctgctcagcagccttgaaatactgcttctcggtgaggaacacggtcatatggccggagatgccgttctgatcgccgagatcgatgccgtttgcgacagaacccggcatgaagcggcaatctgccagatacatctgacggtcgtccttctcgatgaccttgagtttgacctggttgttgaagaacttgaagttcgtccaggtcgtctcttccttgacattggtgttcttattctcgttggacatagcaagactcctttcattagtcatgtccttgtttacatcatcgggaaacatcagttcatggatcgggactccaagctggtcctcgatgtcatgccagatgtcttcccgaaatgtcccgatagggtagccgtagaattccgaatcgatacattcattatcgtctatgcagacatctccgagttcatcccaaatcctttttgcggcgatttcctttgtatccggtccgttcgcatccgtgatgacgtagcagttgttgaaattgacgatttcgccttcagcgaggtcttcggctgcgcaggcatacgggctgaacccttctcgaaatccgccgttgcactggtcgacgagacgtgaggcgtattcgatattaccgtgtgccgcctggtagaaatcgcgccaacaaagtgtttcatattcatcatgcgtatattcgacgcgcaggtaatctggatcgattgctccgctgtggagctgggatgcatagctaatcgctgtgcggagcgaatcgaattcgacatcgtcatggaaacaggctccatcgccgtaactgtagacgatgaaaggatgatccctatggcttggttggctctggatgaccattgcgacgccattgggaagttgccgtttgagtcgggtccgcctcaccaatatcgatgacatgctcgaaattcatccacctgggtagatcatgaccgtattcatcatgcttgccatcataagcgttcaatatggttgagttttcgttcatgtttagttcctgctttcgtgtgctcctggaagtccatgttcatatgcttccttcgttttgaaacgataggatcggtcttgataggaggatacccggtttccttttccctgcctacacccgctgacggaacgtgctttctgcaccttcggcaggctttcttcgagtttctttggagaatagttatgggtggactgttcaccttcgaactggactgggattacgccgccctttatatatttaagcttcatcccgatatggataggggagttctggttttggtccttgacggccttatcgtactgccattttgcaagatgcagggtaaatgagcagtttcgcccggcgacttcggacgtcacatcggcacgataatccgttctcgccgtatctgggtcgatggattttgaaaggtcgaccaggtccgggaagaagcgaaaattcacccattcgttcccgtcaaaggattgttccgtggcaccgcgatactcctcgggacttttgggcagtgggttggtttttcggacattgatatcggcggcaaggtcttcaagtgcgaccatctcgccgtcgatttcgactccatctggatacctggcggttttcaagccgagactgaccggtttaccggccttttgttgagcgtcggcgcgtgcgtactgcctctcactcagcaggattttaaatttgccacctggcttgattgaagattcctcaccgagagtgcaatcggcacgataccatggtctgtctgtcttccttgagacacctgtgaggagaattacactgtccggaggaacttcaaggttcgtccagaccggcttcttcggttgtgtgggatggtttttgggctctcgaatggaagaatcttccatctcggcgacgggaggcttttccttggaaacgcctgcgttttgttctacctcgatacgctctggttcttcagggacatcgattctgtttagatggccattttcgactttacctacgtcgtcaatcgccgcactgatatcctccaggctcgtaccgagagggaaaccatggtaatacccggtgatatgtccatttccgtcagtcgggaccctatcgagttcgatgcgcaagatctccgcgctgttcagacgatttttctggccggcatctccggtcatgatgtactcgctgccgaattcggcaatgactccgttgatcaagtcttcccttgcgcattggcgcggatccatgccatcgcggtcaccggcttggcaatcgaaaaggagcttgttggcatattccaggttgccgtgagccgcattgaatagatcgctccatccggcgaagccgccacccggcatggctttaaatcccggcactttatacatgatgaaactcgagtgcagctggatgtcggaaatgaaaccggaacggacgtcctcacagtaacaaagcgcctcgtcgagatcatcgaataggatattcgatttccattccgtctcgtagtcgtcgaaaaaagagtggatgttgtcgacctcgccgacaacaaggagatcttcacggcgggcggactgcttgagaaacatctttttttctgttttcggcacggtgaagccgtaccaatctaccaattgcatccccggtgcttgaggctttcgcttgatgtcttgatgcggctcaagccagggatgggatgtcaccgcgtcctgaagcttttcctgccacatgttccctcctaagaaagtaatccgtcagcgagcgttgcgagcggatcataggtgccgaaggcgccgcatttaacgctcttcgtaagtcttctcgttattcgtctcgcaatcgtctcgcgctacggcacgattgcccttcaacagcccgcgcatcttggaaagggatagatcgctcttccgatcggccttgattgtctcgacgtatcgctttctcaaaatgaactcgagcgtcttgccctgcgggatacactcggttccatcgataagcctttgggcattgttgacgacttcacggtatgcgttctcgttcagcatactcccgagcttcgtcccgagtacggcggtagcgataatgtcctgtccgatatatgggtcgacgattgcctttgcaagcctgaggtcgcgttcgctgatcattttgcctcgatttggatcggcttctcgattccccgctcacgttgttcagattcagcgatcttgctgcaggcagatttggcggtttcggctttatcggaaagcctcgtgtgttcacggcagggcttcccaccgttggaaacacctccgaccggttcgttttcgataatatcgatgatgtctgacgagctgacgagtgaatttggatcatggaacagctggtcgagatcgcctatgaactcattgctttccgggcgaccttcaaaggagaacttttccgtcacggcatgggcattggaaaaatcaagttggtgaaaggtgagcagctggtccacatactcgccttcacgatagaatccggtatgggcgagcatggcaaggtgctcgcggttttcatcgcagccaaagtcgataccgctcttgaaatcgtccataaaccactcggtgaaatcggcaaggtcctcaccggaagtgggaccgagaggaagaagctcatattcgggttcaccgatttgtttcgtgccggagaaattgaccttttgcacgacgaaggcggtgtcctgtccctcggcaaatttagagatcaaaccgaagatatggtcattctcttcggcatggtcaaactgatccggttcggggacatcggccttgatctgattcaggtagataaagttttcaattgagacatcatcggcttttggtcggattcgtccctgcagatcgtcgatcttatccacgaggccggaaaatgccgaaaggatatagtccggcttggaatcgggattccattcattgatttcgagaacgtcagtcaatccatatttttgtgcaaaagagtccagttcattaagttgttctttagtgaacccccatgaggccagatcttcaggatcgtcgataaagaccattcccgcatagctgtctcggacgttctccgtaatagcgttcagcatttctggaaatttcgatgggtctactttcggaaccattgcataagtcctttctttgaatatcttttgtaagattctaccacttcgcattaaaaaaatgaccccgtccataagaagagatcgagactgttgatggtatatgacgactacgcggatattggtatatttgcaaaatgggtgatggatgcgcccgagattggggagcgggcacatccatcggtgggaagaagatgtccctgcacgagaaaggggatcaaactcgtgctcttaaccataatagcgatttctcagcccgttttcgtgtggactttccaaattcgcaaacgtttgcgaatttcacttccgaaatttgtcgaagaggccttttagccttccgagaatcccgtgcggtttcgtcggcgtttcaaaaccggtatctttggtctgctttatttgtcggccggcgggtgcgctgtttttataggaagggcatctggaactgagtgaccttttcttcctcagtgcctcttcttgcttctcgacggtcgcttcggagatctcgcggagtgtgaggtcgatgttgtcccatgaggtctcacctgtcggtgcgccttttacggcatagaccgtgattgccggaagcggtgtctccagccttatgagatctgttcctttatggcggagcggtttagcggatggttctgcctcgatatgccagctacgcttgagaatctttttagctgcaggagagtagagccattcgcgaccggcgaaacgcgtcgcatggccggttcctgtaattcgttctgccaggctctttctggtatcctccgcatttgcgatgtcatctgtgatggatatttccatgaccgggaaatccacggtggcatatttccgcacgtcctcgatggttttcggatggctgacgcggaattcgatggcgacccagatctctgtatcggcatgcgacagcagtgcgaccgcatccggaatgagaccttcagagcacatcgcgccgcaatcgcgctccgttttgacatcctcgattttagtcatgcaaccggtaccgggaatgaacgatttgtatgtttcgggaccgaactttaggacagaagagccgggaacgggaaggactgtcagtttgccatacttcttgaattcgagtttgccggcgttccgatagcgtgacgtatgcgggacgctatcgatgagtgacaggttggggaggtagaaatcatggccgatgagcccttgaaggacggcttttgcctccaggtggagaagggactctggattcgactcgaccgcgcaccggctgttcgcctcgtgggccaaatagtggatgcctttctccgggtcgtccttcgaccatcggactgccttgagccgttttccgcaattcggatcgggacagacaagtccgcacttgaacccgttgcggtcgtaggggatttggtctgcccatacggcattgccgtgctcatcaagtccaaaaggaaccctcatttgtgaaccgtctttctgtcccatagcctggtgaggacgatcggctgtgtcttgtcttcattcaattcaaaaagatgcgcagcgcccccgaagcgagggcggctgcacgctgttttctttttatgggcgtcaaggagccgtttcaaggaattgacttttacccaaactgtttttccaaactccatacctcggggattctctgggattttaaccgattctaggacgtacgtagataccgtcgcttactttgccgttgcaaattgccttaggaacaaatgtcttgcttttcccgttgacggtcaaggtcacctcgcaattgatgtacgatccctgtaaacctgagagagacagagaggggctggagccgagttctttggcgacaagtccggcgccgcttccgagaccggcgcatttaaaccatctgtaggtgatattgccctgcgggatatcggaaagctcgttgtcgaagacgatagaggcgtaatccccttcacccagacttggaatctgagttgatgagtcatagggggcagtgcagcatgcgagcgagtttccattaaaacgtgggcgatagcttccggtgggatatttagaccaatcgaaaacatagactttgccgattgtctcgctgtaggcatctgggacttttcctttgctgctggatgtcgtcaccttgcagcgcagataatagtcctcgtcttcttccgagatttcgtaagaattcgtatttccaccgtatttgatatcactgaaagttccggttttcgtcgatgagtactgccattggtagctgacttgggttgcgcctgctggtaaatttgacactttagcggtgaccctctcaccgacgacgtccattcccgttaccgacacagtaggggcctggagctgtgagccactattctcatcccctttgttttcaccgccggcgttatttcctccgccggtgccgttcccgccagaagcattatctccggcgccgttcgccttgccgaaccatgagctgatgctgttgccggtttttccgatctgccctgagacctggtttccaaaacccatcagtccaccgccgatgacgacgacggccaatatcacgatgatgtactcgacggtctcgccaccaaattcgcgtcgggttcgatggcgatatttagacgcggttggaaatatttggcgtttcatgattggtctccaatggcagaagtggctaaatcggtctagattttaccgcatcgaattctgtctgctcgcggtggggaaaactaaaaatgacctgcttgtagtattattaaaccatctgatcatcaattaaaaggaaagtgagggtctatggtggagtacagcgatccacgtgatttcggattccgcccggagacggtcatgacggcgttgatgccttacgagcagttttcttccaaaacgcgcaggctcattctcggtatcgatatgggcattgcaagcgttggggtctgcctgatcgatatacgcaatcacgagatcgtccttatggcgagccacatcttcaaggcgcctgtcgagggcaagcagaaggatatttcggctcgccagagcggcgcgagcatacgacgtggctatcgctcggttcgccgcacgacaaaacgccggaagaaccgaaagaaggctgtccgcgatatcgaaaagaagtacattttgattccggacgatgcggacgggcagtggtttgcaatccggaagggcgagccggacgtccttcaccttcgcgggaaggcgctcctctataaactgaatgggcgcgagcttgcccggattctatacgcttttgccgacaggcgtggatacatcgatcacggcaagggagctaccgatgacgactccggtaaggttaaaaaggccctgtcggtaaaccgtaagattctggatgaaaacggctatgagacgattgcccagtatcttttgaagcagcctacttcccgtaacagggaaggtgactatcgctatatggtcgacatcgagatggtgacggacgaggtccataccatcttccggcaccaacgcgatcttggaagcgatatcgctaccgaggagctggaaggggagtacctttccgctcttcgctggcttaccgatacgagcgctcgcgatgaaaaaatctatagcagggtcggttactgcacctatctcggagccccggagaaacgtgccgcgagttcgttgatttcctttgagatggtgcgcgcgtatgagaagctatcgaatataaagattgagcatcagggtcgggaagcgacatacatctccccggagaagcggaatgagatcgttgagtccctgtttgccgtctcgaagaatcccaaaccgctcaaatggtcgcaacttcgtgaaaagctcggcatgcagtcatcagacagctttgacagccgcctgccggccgatgagaagagcgactgcatcaagatcccggcatggaatacactctgcatgggtcttttcacgtcgaacagggcgctccttgatcgatttcatgatgataccgatgtagccgatgccgtctgctccgcactgacatacgcctctgcaggtgaatcgcttcgaaacgcccttgaaaatctcagtctcgatctgtcggagcaggatatcgattctctgctcgatcttccctacgcctcgaagctcttttcgggatattgcagcacgggagttcgtgccctgcagatgctccgcgatgcatttaaggatccgcagattgagaaactgtacgatgcggagaaggcgaccggtctgtatgaggccaggcaggcattggcagcggaaaggaacgaaagtagggacggactgttatgcccctatctcgaattcgattcgacatgcacgaacccggtggtgcttcgcgcgaccgctcaggtgcgccgcatgatcaattcgattatcaggcattatggattgcccgatgtcattcgagtcgaggtggccaaggatctcaagcgctcgaagcatgagaaggcgattatcgcggcaacgaataaggccaataaggacagtaacgagcaggcgaaaaaagacctcgttgcgttctacggtcttccgaatgacgcccacgtgagcagcgccgattttgagaagatgtggctctaccgtgagcaattcggccaagacccttatacgggcaagggcatcaatctggagcgtatgctaaacgaccgtgattatgtcgagatcgaccacatcctcccgttctcgcgttcctgcgatgcggcggtgccgtcggtcgaattgttgtcgtaaacgtagacagacgcctcgggtagctcgcggcggaagtcatcgattaccttgccgatggtaagagcctcgttatagcagggaatgatgacggcaatcttgtctcgactcaatgcaggcttcctttcaatacaaacctccatataaggctaacgttgttaatgtgacagcgcaatagtgcgatagtacattacctattatgctatcataatatcatccgaccatctcaaatagaaagtcaccaccatgcaagttcttacttccgcgttctgccgcgagcttttcacgtcactcggtttcgcttacgacgatatacgccactgcgatctcgatgccctccagggctatatcgccatcgagtgcgccaggtctcaccgcgccgggatgaccccacacttcatgacgccacgtcggaagtctgacagcctgtgctgcaaaatgaagccggaaggtggtcttgagaaggcatatatcaagatcgactgtcttgaccagtggaacggtcgagaggcgataagcttcaacgctgacggtttcatcggcttctgtggatgggccgacacgcagaacagccaaccgtttctcaatgcttttcgacgttggctgactgaatacatgttagagcgttcgcgctgatttcaagtgacttattatggtgtcgtagtattgcggtacaatagattgcaacgataaataaaagtctggctgataggagtggctatgggcaaaaggaaagtaaccgataaagacatccgttcgattgagtttgcaattgatagcgtgtttcccggtgcatcgggagaggctgctaagcaagctttccatgttttggttgaacgggccgaagagaccgggaagctccaaaacgatttgaactctctgcgccacgagttcaatacgcttaaaggcgaatataaaaaggtttcccatcgctacagtaagttccgtaagctctgccacgcgatggcacgtaaggagattgtcgatgcgaacggggagcccatcttgttcggcgacattctgtatggtgaggatgggcgtgcatggactgttctcggaccgagtagcaaacgctggctatttgtcagcgggatgaatgtcgatggcgaaccggtcaaacaacttgtcatgacgaaatggttgactcgtacaccttgtaaggcagaagagaagtagtgcgatctcaaactgataggtctaaagagtcgtctttttcgggcgactcttttttaagtcagataaccggtgggctgtagactggttaaaggggaaggtcaactaaatggcaaagctaatcgtcggtcaaaatgacctagcgacagtcaatccggatttggcagcggagtggcatccgacgaagaataactgccttctaccgacgcaggtgactgccggatccaaccgaaaggtctggtggaaaggaacgtgcgggcatgaatgggaggctgtaatcggaaataggagcaggggaattggatgtccccattgttcaaagagacatgtcgtcgaaggcgttaacgacctcgccacggtgaatccaagtctggccgccgaatggcatcccacgaagaacggtaggcttcgcccgatgcagattgccggaaaatccaataagaaggcgtggtggctggggaagtgcggacatgagtgggaggctgccatatattcaagggcggcagggaaaggctgtccctattgctatggcaaaaaggaaaggtagtgcaaaatggaaaaagcggcgatcggtaccaatgatctcgggatgcatattgtcatcaggcctatttcaaaggtccttttctcgaaagacgaaaccgttggattggtagaataaatcaagaaacgcggagtgcgcctatcggcttgccagagccggcgccctatgtgggcagatacgcattgaggatcgcgcctcgcaacttgagccgtccttgcaggggcggctcaagtcatttaaagggtcagattaacgactcgggatgatatgcgcggttgccaaactctggatttatcgtaacagccgtaatgcaaaaaagaccccggattaaactccgaggtctttctttttaccggtaaattctcaccgctagtgtcgtagtactatggtacaatctatttaccgaatgtaagagaagaggaacaaatgtccattactcccagtgaccggcgacgtcgacaacccaatgctgtcccgtagcctgctgttcataatgtccctggtcctcagaggtggtatacgaatcatctacaacggatccaccgataccgccgttttcgccatcgttaataatccaagcgtaggcggcatcggatgaatcgaagggccctaccatagtaccaccatgattgacccagaaacgaggatgacgcgtgtataccacgttcggtacccagacctggctgtagtcggtttcccagtggccctgctcggcaacccatttcttctggctaccgctgttggaagaggaattattgctgccggaaccctgtgaattgccggaattctgcttcgagtcggaggagtttcccttgctgtcagacttcgacgagtcggaagacttgttatcctctttcttggagtcatcggacttctggtccttgtcgtcggattctttcttctcctcggacttggctccagtcgagataggggttccgtccggtttcttcacggtgccggcattctggtcatagccctggtcatgcacgccatcggtggaccagatgtcatcggcgatcacatgtccgccggacccattgatgatgtcggctgttgatccgcccgtcggcgccttcgtgacatcgtatgagacggcgaccttgatattgccgtccttgtcggtggcgatccacgtcacgtcgacggcgctgacacccttgaccttctttccgttaagtacggctgcgagcgctgcggagcggcgggcagtcgaatcgaccatctttacggcgtcgtcctcggaagcctgagtcacgaggatgcgaccgctcttggcatcgattcgtacctggtcagaagcgattgacaggtcggcgtcgtccagcttgagcgtcgcacatagctttgcgacatcggaagtcgacaggttgtccgtcttttcctcggagttgtccttgaccggtgtgacggtttgctcctgctcggtcggctgtgtgttcgctgtcttatgggagctcagcgcgaatgcgccgataccgagaccggctatgagtacgacgcctgcggcgatcgcgatgatcttcttgtgcttgtctcggtcatcggtcggtgtatctccatacaccggaagttcctcggtgaggccggcatcgttctcgccctcggtggggatgggatctgtcggttttatatcgccgctgtcgtaaacgggcggctcgttgttcatgttcatatcattcatttgcatatcctccttatgctgtctttggtgcttcatcctggacagatgaattcgggagcggagcgatctggacgatcggtttgcttcccttcaggacgacgaccggttttccagtcgtcgccacgtcttttgcgatgcgggagaagtcccgtttgacttgtgagattccaagcatcgatggaatatcgctgtccattgtatcgccttctaaaactgaacccgtacttatatctacagttcttataccacaatagcgctgtttttaacgctatttttggagttatctaatatatttttcagttaaatcatatgttctgtctgcttgcatggacaaatctagctgagacggtgaaatgccgtagtgcttgcaaaggcggcgatcaaattcagcaaggtcgatttcatcgttgcaatacctgcttgcttcctcaagaaagaaatcagaaactcttttaccttccaaggtgttcgtatatatagcttctgcaacaaactttgggcgatcgttttttttgatcattcttttgctcctttctaaaagtataatatcattataccatatctgtattatggtacaagtgtactacgcccttactgtgcgaaaatgagcagcgttctcgctcgaccgcccgtattcatcgaagagcaggtgacgagtgtgattgcgcgggttgcgtttgcaatcgtggcgtcgcagtcatcgctgacggcggtcgcgtcttttttcatatccgaaagccacgaccgtactttctctgcggaagtgaaatcgaacgtctggattggctggtatttcttatcgacagacatcgccatgacaggtttgagaacctgccgtcctttatcgggggtgaaccaatacatctcgccgatcttgtcgaattccgcttgcctgtaggtcgcgaaaataggggagaagatctgaccggtaaaccccatgtggtgtccgtatacgagtgcgtgcgcaccttctgctgtgcttcttgcatccaggtatgggcaacccgcgaacgacgggttgcggtcgaaatcgtggctcagatagaagtccgcggggtctcccttgcgcgtgtttacgacgggaaggtcgatagctgttccctcgaccctgagccatgccgcgatatcctggttacggccgcggagcatggaccagtcgattccgtctgcggtctgggtctcgacatccttggcgaggttatcgtattcccagccctctttaaccgtctctcctcccagcaggagggctgcggccgcggataggatgcagatgccgagcagtatccagttaacgatcttgcttatccttttccttttcgtcatgttcaattcctttcctttttagtgaaaaaggggccatcgggttgccccgaatagccccttcagtaggcgatggaagcccctcttaaaggttactccatcatatcgtcggcgtcatcgatttgatggcgcttgcggtagatatacgtaccgccc

SEQ ID NO: 1700 - DNA, 12618 bp, synthetic construct
  misc_feature 1..12618: note = Synthetic
  source 1..12618: mol_type = other DNA
gcgctccgctgcgatggccatcgccaaggcggcaacgccatgcacccgtgagggagcggaactcatgggacgcctgaaaacgaccattgagcaaaatgatgccgctccgcgcgaccgcacagttcgcggttctaacgttgagtatccgtcttcccttgccagctcgctcggcatcgagtaccccaagtcttccgcgaccggtgatggccgtcgcaagaagatgaccgaggaggagatccttgatgcgatggcggatgtacgcgacgcgaagggctacggcggtcttgccgcaaacaacccaacaggcacttcctccaattccggcaattctcagcatcaggaagatgcgaccgagattcagaaaaccaaacatcactaaggagtaggcatgattattgctatcgagtacaagaacggacgcatgaaggagttcgacacgagcgccttcaccgccaccaacgccatgagtgcgggcgacaagacagcccgaaacgtcatgaccgagcttgacctacggctcgacctcgtaaacgaggttggtctgagacttgatttctattggtatgacgcaacgccccagggacagcgcgtcgatattccaggtctcacggattcgaaaggggaccccgtcagcctcacctctgcatcgaggcgcttggggacctccgtgctcctctgctcccgcgaaggcatcaaacagatttcccgcatcatcgtgcagcgtgcgaacgggacggtggatgccctttggcggcagggtacgggcgattggctcatcaacggggcgaggttcgaggctcagcgcgtgctttcctacacggacagtaacgtcacttcgatgaattcccaggcggtgttcgtcttcaagtatatgaagaaggctaaccccttgatgagcgaagaagagatttgcgaccttattggctacccgctcgacgcatacaaggagattcagctggacgaggcgaagaacgccgagggaatagtcggtgcagaacttatcgaatcggatgatggagaggactcggaatatccttccgattccgccgcccccgaaccttccgattcaacctctaacccatccctcggtaagcatttcgccgtggacgaagacgatgacggattcgatgacgatgaggactctctgttcgatgtctgacatttgccacgaccgtcggattcatgatattttgagtgtgttggcgtaaccccaagcgccatgaaacaggagagacgaatataccgcccgaccgtgcgaggcacggctatctattccaatttgattacgcttgactgactcggtatgactcggaccgtctctccgcacgttctgacaggagatgacaggtttgcggaagcgtaacgacacccagacggaaaaccagatgagcgcctggtcgaggtggtctcgatgaaggcggccgtcaaggtaagcgaggccatctctcggcttcgcaggcaggtcgacactgcggagctcgaggaagccgtcgatgatttcctcgcggcctacggagagcttcgcagccagtactactacgaggactccgaggcgaaggcgaacgcaaagaccgcctcgacgcttctggaagccgttgaccgcgggttgattgagctgccccagaccgacgatggaatcgtgattgtcccagacatgaagctgcgcctccccgacggggcgaagctatacgtcaactcaatcgaaatcgaatcgaccgcgactggccgcgccccgatagtccgcttcgaggatggctcatctatccgctgtcgtcgcggctcgggcgtccagattgtccgaatgcccctggaggaggagcagaatgacaactgaaagtgaagccccgctcgcttggccgttccgcattcccgtcctgcgcgtcttcctgctgcctttcgtgcaaaacggaaagcgcgaccgcctgttcctcatcctgctcgcctgcgtcatgtccacggcaggctttctcatgcagggaaacggatcgtatgactccgatggctggttcctgctcgcaacgggaaagcaaatcgtcgagaacggcatcccgtacgccaacccctggtcactggcgtcctacaggccgattgtcgtccagcagtggctccatgatgtactgctttacggttcgtataccctggcaggatatgccggcacgatactctatcagatcctcctcgccgccgtcgttgccctcgcgctggcctttgcaatccaaggattcggcgataaacgcctgactttgccccgcctgttgttctgcatcggcctagcccttttcggggcgggaatctacatctcagtccgtcctacggcatggtcgatggcatgcatggcactgaccgtcggtgtctgcactcgttggaagcgtaccggcgactggcgctatctcatcgccctgcccgcgatcaccatactgcacgtaaacatgcagtcagccatgtggctcctagatgtcttcctcgctgggtgcttccttttgccccgtgacctatccgaattcaaaaccaccactcccgatgagatgctggccgagatcttcccgctaaccatcgccctgcctgcgatgcttctcgccgctttcgtgaacccgtacggcgtcgatggcgtccgctacgtgatcgactcgatgggtgctgcatcttacggaaatgtgatatcagagatgaagcccgccttcgaggcgacgaacgggttctgcgtcgttttcttcgcggtcggcttcattcccacagcacttgccgccgccatcgggcgcaaacggatcgatgccccgctgctggtcatcctcatcgccgccttggtcgcgacgatgctccattggcgaaacgtctggatcttctcggttgcatccgccctcgccttcgcgagcctgctgacgggaaccgaagacccttccgcatctaaatcgcaccatgcggcaaaaactgctgccttgattgccctccttgccgcaatcggcccgcttgttgcgaactgctgtgtctgtgccgcgaacggcggacagtcctgctggcagacctccgaacgctcggcaaattcccttgtgaaggagattgccgaaagcggcatctacgaccccgtcgtatacgccgaggatcccgtcatatacaactacctggagtggaagggaatgaaagtccccttcgacctgcgacctgagctctgggacgataagggtgcggcgggagtcgtctccccataccgtgactacgtggacggcatgcaatccaagaaagcaaggctgtcctacctcgcttccggcgatttcgactattacatcgtctcgactgaatcggcaccttggtacgcagccaaattaaacctggaactcgttgactccaccgacgccctgacactgctgaaggatgcgaggtagggaagtggagatcaaagtctggacttactcggagggcgatgaatttccgaatcgcaggccctcttttttccgcaggcattggaaagcatttctgattgctttcgtggcgattgccctcgccgctgcggcgtggtcatctattgcggcaaggtctgcgagccagccgtctttcacgcccgattcaccctatgtgtacgatggtgccgatgtcctggactcatccgttgccgacaccctgacgcagctaaacgagatgctggagagccaagcagatggcgcacagctctacgtagtgactatcgacagcctgccgctaggtcagactatcgaggactattcgattgagcaggcgcagcgtatcggcgcgggtgaatccgaaaaggacaacggcgtactctacacgttcgtgaaaaacacccgccaggataggcttgaggtcggatacggtctcgaggacaggctgacggattcggtctgcgcgaagattctcgacagcgcccacggctattaccgagaccgcgacatcaaagccggcgtgaaagacctcgcgcgggacgtggcaaacgcaattcaacccgacatcgatggcggtacctatttcaacgataacgcacaagatgaggaacagcccgatttggccgcgaccgtgattgcgtggatcctctttatcggcatcatcgtgttggcgattgcgatgccaaatccgcgcaactcgaattatgtcagcgattcctcctcccgcacagatcactcgcacagctcatcctcttatcgctcttcacactcttcccaccggtcaggcggcggccatttcggtggcggtggcgcttcgggtggctggtagtaatgcgtcctgcattgcaaccgtaatcgatagaacaggagacaccaaatggaatccaaagacaatcaacccggtacaccgaagctgaagccgtggatggtggcggcatttgccgtcgtcgtaatcctcttcttggggatggcaatcggcggcgggatgtataactccctgaatgcctcaaggcagacagtcgatgccgattgggcgcaagtcgagaacgtgatgcagcgccgcgcggacctcatcccgaacctcgtcgcatccgtgaaaggcgaaatgcaaaacgaacaggagatcttcaagtcgattgccgagagccgcaagcagttcgagacatccgacacccaagcgggaaggctggccgccgatgacgagctgaacgcgcagacgaccgtactcctgaacgctgtcaaggagagctaccccgaactcgcgtcctccgagcaggtgaagaccctgatgacgcaactcgagggttcggggaaccgaatctcggtcgagcgcaagcgctatatcgacgacgtggcgggctacaacaggaaagtgacctctttcccgatgaacctcatcgccaaacccctcggcttcgacagcgttacccaatacaaagctgcaccgtccgcggcaaacgtccccgtcgtcgatttcaattgatattcggccgtaaaaccttaccttgatatagccttccaccgttacggaaggctatactattattgatgtaccggcaagcgttccccaagcgcttcaagaagacaggaagtgaatatggcagcattcgaagacccccgcgagagcggattcgaccccgagctcgtcaagacggccctgatgtcgcgcgagcagttcacaagcaagccgcgcaaattgattctcggcatcgacatgggaatcgaaagtgtcggaatctgcctcatggacgagttgaatcacgagattgtcctcatggcatcgcatttatttgattgtccgtgggtcaagaaaaccaagacgagcctggcggcagcaaggcgtcaggcgaggtcgcagcgccgcaatatcgcccgtcgcgcagcgaggaaaaagcacatccgcaaaatcctcatggcgcacggcgtcattcccgagggcacggctgccgaatggttctccgtacgcaagggcgagcaggataacatccagctgcgcgtgaagggcttgggtgaggtcctcaccaaccgtgagctggcccgcgtcctctatgggttcgcttcccgccgcggttatatcgaccatggcaaggcggacaacgacaaggatgccggcaaggtgaagaaggccctgaaggcgaacgccgagatcgtgcaggccaacggctacgagacattcgcccagtacctcataacgcaaccaaggattcgcaaccgccaagacgactacgcccattgcgtggatatcgacatggtggtggacgagattcacatcattttccgtcatcaacgggaacttggaaacgggctagccaccgaatcgcttgaaggggagtatctcgccgccctgcgttggcttacagatacgaccaagcgcgaccggatcatctactccaaggtgggctactgcacctatctcggcgagccggtcaaacgcgctccgaaatcatctatctcctccgagatggtccgtgcctatcagacgctcgcgaacgtaaaaattgaacatatcggcggccctgctacccaaatcgcgcctgcggtgcgctaccaaatcgtccacgacctgttcaaggtctccaagaatccgaagccgatgaaatggtcccagctgcgcaagaagctcgacctcgccgacaccgccacgttcgccggcgtccgcctatcggacgagaaaaaagacatctgcgtggaggttcccgcatggaacgccctctgctcgacgctccataacctgaatccgaccctgctcgaccgcctacacgacgatgtcgaccttgctgatgcggtatgcgccgcagcgacgttcgcgtcctcatcggaggccttcgccacgaggcttgccgagctcaccgatgagctttcgaaggaagacgtggaggcacttctcgagcttccctatggctcgaagctcttcacgggatacggttcgacaagcctgaaggcgctccagatgcttcgcgatgcattcgaggacacgaagattgagtgcctgtatgatgccgaggtcgcgacggggctatacgatgcgcggaaagccctcgcggccgagcgcaacgtatccgacgatggcctgctgaagccctattcgaaatactcaccgatttgcaccaacccggtcgtcctacgctcttgcgctcagctacggcgagtcgttaactcgattatcaggcactacggtctgcctgacacgattcgcgtggacgttgccaaagagctgaagcgtacaaaacacgaaaagaagctcgttgatgacggcaacaagtacaacgagaaggtaaagaaaaaggccgcagacgatatcgttcaattcttcggtcttcccgattccgcccacgtgaagggcagggatttggagaaggttcgactctataacgagcagggcggaaaggatccctacacggggcaggggattgacttcaggcgcatgctgacggagaagggctacgtcgagattgaccacatccttccgtactcacgttcctgcgacaactcgagaatcaacaaggttctcgtcctgacgaaatcgaatcgcgacaaggcgaaccggacaccttacgagtggatgacctcgggcgagcctaccgcgccgaactgggatgaattctgcatccgcatggatgtctgggctagcggcaaggagccgaagcactactattcctcgaaactcgcgaagctgaaggaagataacttcacgaataacatcgattcctttatcagccgaaacctgaacgacacccgctacatgtccaaggatgtcgcgaaatggcttgccgattgcctcccgttccccgaggacggacgcaaacacgtcttctgcgtctccggtgcggcaacggctctcatgcgcggaatctggcgtatcggcatcctcgacgatgacggcaagaagaaccgagaggatgaccgccaccatgccgtcgatgccgcagcgattgccgcctgcacgccttcgattgtcaagagcattgccctcatcagcgaggaacacgccacgcaccgagatgccgaccaactgctgaacggctcgctgccctatcccgagtacagagatcaggtcaaggcatggattccctgcgtcgtgccgacctattcaccggctcgtaccgccacgggggcgttattcgaggcgaacacctattcctacaagggaatcaatgagaagggcaaggacctaatcaagaagaaaaaaggtgcgttgagtccctgtacaacagcatggaaggacggaaaaggtactgccaaggcttacgacaagcagtacggcctatttgccgtctatgatgaatcgatctcgcgttggctcatagaccccctctactacattgatgtccaaaagcgaaaaaccgaagagccgttcatgcggaaagtttcaaagggggtctctattgattactgggataaaattccattgaccggaaatgaacgtacgcttttattgaaaccaggcgatgttctgacacaagatgggttcgtaggtcgtttaaactccttcgacatatccaacaacagtgtcgaaatgtattactcgagagggaaaatctctttccaaaagaccggtccattggcgaatgaaaagtttcccaccttttccaagtggactgacgaattgagggtcatgcaggaggactgcttgggtctctgctggcttgagttcctcaccaatcgggcgaatcgctgttagtagatagcgggaactatgtgaaggggggagggtgcaacgccttcccccctttcgttttaaaaactcaggaagagttgcgttcccggtgtctcatttcctccagaacccgacgttccggtgttgacgagaatctccctgtcgacatattgcttctccgtgaactgcatcgccacgacatgtcctgccggtgggaggtttttcctcagctgctcggcatgggcttccgcagatgccctgctgaggaggttgcgagagtagatgctgttctgttccctgatgtacccatcatcttccagaaatcgcctgaacttggtataagcatccttgttcgatttcgttttcgtaggtaagtcgaacatcaccaagagtctcatgattctcatagccttcctctcgttctaaggctgtccggcgttgccatttccaaaccgatgagcgtgggcagcagaagctgatcggaatccttcaacacaactgctcttctcagggattcgcaatagacatcgatagcattttggatgggcatctccttaccgtccaacaggacgaggaccgatgtaattttcgccagggtttccttgttcaacctcgatagcggagccaagatgttctccttgaccactaagaggtctacggcggctcgaaatggctcgataaggtcatcaactagattgaatgcattctcggcgctgtggtggttgatgccgcgcgatacgagccatccatgcgagacggcgcattgcgcgatgcctgttcgaaggattgcatatccgaagttcagaggagcatccatggggccttttcttcgagacccataggggagcagtttagggaagtatgcacccgctgcagcgctctccatttgagtcttgtcgttgctctggacatccttggcatacccgaggatctttttaacatcggactggtctccaccgcatagctcaaggcaacgcgcctgattctcgattttcctgcgtatgattttcgcccacagttggtttctgagcggtttcgagatagcgagctgatgctctacgatttccgcatgccttgaatgtgcgcctattgggagtgccaggccgttgggcatatgattggaaccgcagaagagaacgcctatccctgagtcattgacttgtcccataagcgatgccgtgattgagacttgggggttgtcgattatgatgacccagatatcggacaggggtattttatcgaggactttatcctcatggcgttccttgatgacgagacagttgtcctggacacagaggtacttaggtgtgctgattgtgaccgtcaataacataggtggctccgtttcctggtatcttatgggatatggacggggtctttacgtatgtagacaactaatcgataatgttattgccaaaccggcaggttttattcaccaatgcaccatatttgatgaagcattttatgaaaaacagggaaggcaggccaaagcgagatggcgtttttcatccgaaaaaacgataaatcgaagctgtattccaccgatcttttcctgaaaaacagttttcttgagagacgaaaaagggtgccgattaacgttttacagaattttaaaataaaaaaagcccctgctagaggggcttttttggcggagggtattctagcatctcaatgaatggcactccgctagggcgcgaaacctttttacaagcctttcaagttaattctagcatctcaatgaatggcactccgctagggccctcgaggtacgcgctccaaaggtgatctgattctagcatctcaatgaatggcactccgctagggccaaggacgcggtggtgatggctgacgttgtattctagcatctcaatgaatggcactccgctagggcataagtgctgtgctcgagctgactgtagttattctagcatctcaatgaatggcactccgctagggctacagatgaacgcttcgaatcgtcccgctgattctagcatctcaatgaatggcactccgctagggcaggcccacggctcactcgccgacgcgctggattctagcatctcaatgaatggcactccgctagggcctgcgggttcggaatgtctcccctgggcccattctagcatctcaatgaatggcactccgctagggccaagccgcccgagtgggacggcgcggagcaattctagcatctcaatgaatggcactccgctagggctacagaagctaaaagaactgtttagctaagattctagcatctcaatgaatggcactccgctagggccttgtcgggcgcgaacagctccttggcgcaattctagcatctcaatgaatggcactccgctagggcaccacggttccgggacctcatatgctctgtattctagcatctcaatgaatggcactccgctagggcttaaatggctcaaaacagagcgagtgctcaattctagcatctcaatgaatggcactccgctagggcagcatcgaccatcgcgccgaactgcgccgtattctagcatctcaatgaatggcactccgctagggctgtaaaaatttcgtcacgcaccgtctcggaattctagcatctcaatgaatggcactccgctagggcacccttcggttcatcgctttatggctatgaattctagcatctcaatgaatggcactccgctagggcccagcccctcaccatcttcgtcgcctcgatattctagcatctcaatgaatggcactccgctagggcatgatttggagactcgctcattctaccaccccgacgaacaccctacatcctgcaaaacaaaaggggagcccctgaagagctccccgtcgcaccacgtctaggcagaaacatatcgcacggcaaaaaccctacccacgctcctgctctccgagaatatcctcgcagctcccgcggtcgaactccgcctcagcgcttttcgcatcgtagatctcatcgagcgactcgtcggcctcctgcgattccgcatttccgaccggccaaccgtagacctcgcaaattgcaggtacgatgtcctgcaaatagccctgcttctcggcaagcgcgacgatcacatcatcgagaacggcgttcttgtcgaacccgttgtcttgcaagaacttttccaactctccttcgacgagtctttcggtctcattgacgaaatccttatccacgagctttacgatatggtcatccatctctccgaagtaaccgacggattcgctcgcaaccaattcgccgcccttgactgacagctcgatagcgtctccgtccatcttcctgtagagggcttcaagcaggtcgccagcattgtagatgggattgcaggaggaataaagacggtagccctcgagaacgcaataaccgtcatcatctttgacgaagggaatggagccattaacgtcaatgtaggataagtttcccacctcatcgccgagccagttctttacgcccgtatcggcgcgttcggcaagctcgtcttcgaatcgatcgtcgatgattgccccaatgttctcctcatcagcgaagtcccgatacgcctcgacaaaattgatggtctcctcgtgattctccatggcgttagcgatggcatcatcgatagccgcttccttgacggcatcgaggagacccgaggggatcggaatatcgtttgattcgcaaaggccaaacgctgcctggacttcataaatccagtcttctttgatgcattcctcttggtcatcatgcgcgatggagtcgttattccagatgacatgcttgtcttttccatggtgcctcctaaagctgccttgcctgcttatcagcttgacagctaggcagcccgcaaagagaccgtgggacagatatagaagcagcctgccatgttgaccagtcaatggcagaacgccccgcgttctgctggaaaatagactaagagatagactgatagtttgcgaagatggctaatcgaatgctactatcaggttaggccgagaaacccgctcctcaggtagtcacactttcggaacgcgggcaacgcaggtgcattcgaattgatagcccggtgcccgccgggctattccttttttcatcgctacccgaacgcatatgttttgagaagatatatcctgaccgacaagccgtacgccttcggctcgatactcgactgaaccatctaaggggtatagaaacgatatagaccagatcccaccactgggtttttccggaatttccgaaaaaacctccaaaagaaaaggggaccgacgcatcagcccccttcaggtgtcgcccgaaggcttccaccgcgattggtttctttataggcccgtcatgaatcgagtcaatactcgagagcgggggaggggtatccgcacctcccactccaaaccgaatgaggaccgatttcagcccccttttttggcatctgccactccttatcgcaccaaggcaatatcgccccgtatttacgcctacggagagcttgacgcggccttagctaagccttgctacccctcgcgaatctcgatggagtagtgggctgtcaggtagcggtacttgcagtaggattccgacgtcta

SEQ ID NO: 1701 - DNA, 12119 bp, synthetic construct
  misc_feature 1..12119: note = Synthetic
  source 1..12119: mol_type = other DNA
ttgaagaacagtctgaaaaggaagaaaaggacgatcagttcttcctttaggattatccgtaccctcctccttatatattcccagcctcatattattggtcaattcattttggattgacccaatttctttcttcaaaagcagtcttgatagctgatttgatgttcatccgctcgttgcacaagagcctggcaggactttattcgaccgatagttttttaatttcgcggccgaggtgcgacatttttttgccgcctgtttcatgcatgaataggttgagcatcttcacaggcttttagacgatgatatagatgtactttgctatttgatttcaactcaccgtcctaaagattttcaattaccgatgcactgcttttgcttcaaaacaaccgcgaacatgtattcagcagggttgagattcttatagggcagaccgaatttcagttctaaattgcagtccagaaaccaaccaaataacaactagagactaattgaaaggcatgcggagtgccttgaatggcactccgcggcatcgctgtttgttattattcatattcttataattccatcgaaatgccgatgcttttgaattgcgcagcctatttgggattgtattctgcgtatttttgcccgtttgctttttaggaatcaaacggaatctatctacccgctcgttaggattgccattgcatcccatcaaatatggcagaagctaatgcctgactgacacgcaaaggcgagaacggaaacctatcagctcacccatgtccatatgtttctaccgctcttttattttcttcagcaattacttccgtcctttacgcacgctgatttcagtttgtaatttatggttacgggtactatcctgcgtgtgatttaaagcaatttgcaaaccaagcggagtgccttgaatggcactccgcagtatcactatttgttattattctttttatccaaaggcgaaaatagcttcgcaaacgacttgaataccccatattgctgtgcaataaaaacttccagcagtttttgatttcctttatatcgaataacgttttcagtttcagaactacaaccagttttaatttacggcgtgcatcaatcggtacgcgaagcgctttccttttctatttcagctatccgcccttcaataatacgcagtcaatttgcgtttctaaattgaaagaacttgctttctgtttgccagcaatcatcaaacacgaagcgatcgcaccatcgttttgcgttgcacgaaacccatttaccgactttccaagtttatacaaaagcatttgcaaatgtcgattcggtaccgaacaacaaccagatcagcgttcaaatctgattgctagaacccattcaaccttacaaatagtttgttgtcgactactcccgcccttgttcaaatcggaacccgtatataacttactaattgccgcacacacatcagaactcgatcccagactactgaaccactcagcaagtaggggagttcgccacctgatccgaatcgcagattactacgttcgccttccaagcgcatcttcagaacacacctactttcatcgcccgtaacctctttgctagacctattccctatctgtttcattgtcggacatatatcacgaatcttatgccctgtcagacatttaagctccccgtctgtaggattgtcagacatttaccgggcaagtgatagcaacctgtcagacatttcccaacgtcccgaccacgggccacgggatagcagaattcgccccaagcaggggccgatcaccccgcggcgcggccgctgccctgcggtcaggcggcaggtgcaaaacggccttgccaattgtgaatgccgctgcggcaacacctgagccaacctaaaaacgtgccccaaactacccataaggccattttgcacgccagcttcgttcaacgtcagacattaaaaatgtcagacattgaacctgcggcaaagccgcagctggggccgctagcggcctgtaatcgcgtcgctccgctcgctcccgtcaagcgaaatgtcagacaggctgtcagacatttagatccgcttgacggacggcctgctcgcgaagctcaccatcggccgtagttaaggagatacgaaatgtcagacatttcgacagatggagaaaccctagaaaccgtcagcccaaatttgtcagacattgcccccgccgccgtccaaatgccggtcgacacgtcaccctacgccccgccagttcggccgcaacccgaacggccgcacaccgaaatgtcagccatctcgccgaccccaaatgctgcccagcccgtaactcgccgcatcacagtccgcctaccgaccgcagacctgaccgccctcgacgcccgagccgatgccctcaacgccagccgaagcgactaccttcgcaccctagttgccctcccggtgaccctcgacctgacatccatccgccatgccactccaggctccgaatcgctcacccgtccgctcggcccaggcctagccctcgcgctctccggcaaccaaactgaaagtttggcaatccaagccattaccgacagcatgctcgaatcaatctccaacgaggtccgcgccatcggcgtcaactacaaccaggcagtccgtgccttaaatcgcatcatcaagaagtacggcaaccatcgcgccctctcgcaggatgagcgaacggagattgttgagctctatgagcgcctctcaaagcagaacaaggcgatctatgagcgcctcaagactctcgcatccgatgtcgaggccctgtccgccaaaccgtccgtcaacctgactgctatcggcttggttcaaaccgaggcccctgtcaataaaaccgaacccgagcgccgccgacgagttcgcggcaaaaaacacggcacaccccgacccgaccaatttgaggacggcgatgactcatgacctatatgaagcccctctccggtcatagctcagtcaaatggattcgctactatctattcaagaacgaccgcgccctggacaaggatttcctgaacctcaccgatcgcgactggaaaggccgcgactgggcgaaagtgatggaccgaacccgcgagattttcggcaacgacgtgccggtcaaaaaggacaccaaggttcgtacttacgagcacatgattatctcgctcgacgaaaaggacaatggcgtagagctcgatgacttccgcgacttcgtgaacgagtgggcttccaaatggttcgactcgcgcggccctgaaggggaggcatcgggcgcttcgaggtggccatcgcctatcacgatgacaacaccgcccgcgaggccgaaggaaaacagggcatcctgcacgcgcacatcgtcatcaacaacactgagctcgagaccaagcgccgcatctccggtcttcttacgactaaggttgtccaggcgatgcgagctgacttgcaaaccatgtcgcttgaacgaggctggtacgccttcgccaccgatggcaagtcatacactcaggctgaaatggacgaaaagggcttgaaagtttcccgcggcaagaggctcgaccgagccatggcggcgctcgataacgtccttgcaaacgaggcgaagggtgcccaagttgaagactttggcgaggccatgcagcagcagttggatgagcgtcgttcggtcgaaaaattgattcccgagacatatacggacagcttgaccgccagccgacggtcaagtgacggtaagcccgactcaaccaattccgacaagttcaccggtctttcgtacacaaccatgaggaccgatgacggccgcgccatgcgtcttgtcgtcccgcgtggattcggagactccgataccatggcggagcggcaaatcgaaactcgtgaaggctggtcttggaaggatgatatccgagaccgcgtggacgtcgcgatgcgcgtttccaaaggccctgtcgatttcgcatcgaagctcgccgaactcggcatcaaggtcaactacaaccgtaacggcgacatcgtctatcaccatccaagtgaccccgaatccagaaaagtcaaaggctcaacgttgggcaagcagtattccgcaatatcgatagagcagacgatggcagaaaaatacgctagccaacgtcaaaaagctcaaggactcgtcagtcgcgagcgctggatgaacgaggacgagcgctccgctgcgatggccatcgccaaggcggcaacgccatgcacccgtgagggagcggaactcatgggacgcctgaaaacgaccattgagcaaaatgatgccgctccgcgcgaccgcacagttcgcggttctaacgttgagtatccgtcttcccttgccagctcgctcggcatcgagtaccccaagtcttccgcgaccggtgatggccgtcgcaagaagatgaccgaggaggagatccttgatgcgatggcggatgtacgcgacgcgaagggctacggcggtcttgccgcaaacaacccaacaggcacttcctccaattccggcaattctcagcatcaggaagatgcgaccgagattcagaaaaccaaacatcactaaggagtaggcatgattattgctatcgagtacaagaacggacgcatgaaggagttcgacacgagcgccttcaccgccaccaacgccatgagtgcgggcgacaagacagcccgaaacgtcatgaccgagcttgacctacggctcgacctcgtaaacgaggttggtctgagacttgatttctattggtatgacgcaacgccccagggacagcgcgtcgatattccaggtctcacggattcgaaaggggaccccgtcagcctcacctctgcatcgaggcgcttggggacctccgtgctcctctgctcccgcgaaggcatcaaacagatttcccgcatcatcgtgcagcgtgcgaacgggacggtggatgccctttggcggcagggtacgggcgattggctcatcaacggggcgaggttcgaggctcagcgcgtgctttcctacacggacagtaacgtcacttcgatgaattcccaggcggtgttcgtcttcaagtatatgaagaaggctaaccccttgatgagcgaagaagagatttgcgaccttattgctacccgctcgacgcatacaaggagattcagctggacgaggcgaagaacgccgagggaatagtcggtgcagaacttatcgaatcggatgatggagaggactcggaatatccttccgattccgccgcccccgaaccttccgattcaacctctaacccatccctcgggaagcatttcgccgtggacgatgatggtgacggattcgatgacgatgaggactctctgttcgatgtctgacatttgccacagccgtcggattcatgatattttgaatgtgctggcgtaaccccaagcgccatgaaacaggagagacgaatataccgcccgaccgtgcgaggcacggctatctattccaatttgattacgcttgactgactcggtatgactcggaccgtctctccgcacgttctgacaggagatgacaggtttgcggaagcgtaacgacacccagacggaaaaccagatgagcgcctggtcgaggcggtctcgatgaaggcggcggtcaaggtaagcgaggccatctctcggcttcgcaggcagatcgacacgacggagctcgaggaagccgtcgatgatttcctcgcggcttacggagagctccgcagccagtactactacgaggactccgaggcgaaggcgaacgcaaagaccgcctcgacgcttctggaagccgttgaccgcgggttgattgagctgccccagaccgacgatggaatcgtgattgtcccagacatgaagctgcgtctccccgatggggcgaagctctacgtcaactcaatcgaaatcgaatcgaccgcgaccggccgcgccccgatagtccgcttcgaggatggctcgtctatccgctgtcgtcgcggctcgggcgtgcagattgtccgaatgcccctggaggaggagcagaatgacaactgaaagtgaagccccgctcgcttggccgttccgcattcccgttctgcgtgtcttcctgctgcctttcgtgcaagacgggaagcgcgaccgcctgttcctcattctgcttgcctgcgtcatgtctactgcaggctttctcatgcaggggaacggatcgtatgactccgatggctggttcctgctcgcaacgggaaagcaaatcgtcgagaacggcatcccgtacgccaatccctggtcactggcgtcctacaggccgattgtcgtccagcagtggctccatgatgtactgctttacggttcgtataccctggcaggatatgccggcacgatactctatcagatcctcctcgccgccgtcgttgcctcgcgctggcctttgcaatccaaggattcggcgataaacgcctgactttgccccgcctgttgttctgcatcggcctagcttttcggggcgggaatctacatctcagtccgtcctacggcatggtcgatggcatgcatggcactgaccgtcggtgtctgcacccgctggaagcataccggtggttggcgctatctcatcgccctgcccgcgatcacggtactgcacgtgaacatgcagtcagccatgtggctcctagatgtcttcctcgccggctgcttccttcttccccgcgacctatccgatttcaaaaccaccacccccgatgagatgctggctgagatcctcccgttaaccatcgccctgcctgcgatgcttctcgccgccttcgtgaacccgtacggcgtcgacggcgtccgctacgtaatcgactcgatgggtgctgcatcttacggaaatgtgatatcggagatgaagcccgccttcgaggcgacgaacggcttctgcgtcgttttcttcgcggtcggcttcattcccaccgcgctggccgccgccatcgggcgcaagcgggtcgatgccccgctgctggtcatcctcatcgtcgccttggtcgcgacgatgctccactggcgaaacgtctggatattctcggttgcatccgccctcgccttcgtgagctgctgacgggaaccgaagacccttccgcatctaaatcgcaccatgcggcaaaaactgctgccttgattgccttccttgccgcaatcggcccacttgttgcgaactgctgcgtctgtgccgcgaacgacggacagtcctgctggcagacctccgaacgctcggcaaattcccttgtgaaggagattgccgaaagcggcatctacgaccccgtcgtatacgccgaggatcccgtcatatacaactacctggagtggaagggaatgaaagtccccttcgacctgcgacctgagctctgggacgataagggtgcggcgggagtcgtctccccataccgtgactacgtggacggcatgcaatccaagaaagcaaggctgtcctacctcgcttccggcgatttcgactattacatcgtctcgactgaatcggcaccttggtacgcagccaaattgaacctgcaaactattgattccaccgacgccctgatactgctgaagaacgtggggtagggaagtggaaatcaaagtctggacttactcggagggcggtgaatttccgaatcgcaggccctcttttttccgcaggcattggaaagcatttctgattgctttcgtggcgattgccctcgccgctgcggcgtggtcatctattgcggcaaggtctgcgagccagccgtctttcacgcccgattcaccctatgtgtacgatggtgccgatgtcctggactcatccgttgccgacaccctgacgcagctaaacgagacgctggagagccaagcagatggcgcacagctctacgtagtgactatcgacagcctgccgctaggtcagactatcgaggactattcgattgagcaggcgcagcgtatcggcgcgggtgattccgaaaaggacaacggcgtactctacacgttcgtgaaaaacacccgccaggataggcttgaggtcggatacggtctcgaggacaggctgacggattcggtctgcgcgaagattctcgacagcgcccacggctattaccgagaccgcgacatcaaagccggcgtgaaaaacctcgcgcgggacgtggcaaacgcaattcaacccgacatcgatggcggtacctatttcaacgataacgcacaagatgaggaacagcccgatttggccgcgaccgtgattgcgtggatcctctttatcggcatcatcgtgttggcgattgcgatgccaaatccgcgcaactcgaattatgtcagcgattcctcctcccgcacagatcactcgcacagctcatcctcttatcgctcttcacactcttcccaccggtcaggcggcggccatttcggtggcgggggcgcttcgggcagctggtaacaatccgtccagcatcgcaacagtaattcacagaacaggagacacgaaatggaatccaaagacaatcgacccggtacaccgaagctgaaggcgtggatggtggcggcatttgccatcgtcgtaatcctcttcttggggatggcaatcggcggcgggatgtataactccctgaatgcctcacggcagaccgtcgatgccgactgggcgcaagtcgagaacgtgatgcagcgccgcgcggacctcatcccgaacctcgtcgcatccgtgaaaggcgaaatgcaaaacgaacaggagatcttcaagtcgattgccgagagccgtaagcagttcgagacatccgacacccaagcgggaaagctggtcgccgatgacgagctgaacgagcagacaacagtactcctgaatgccgtcaaggagagctaccccgaactcgcgtcctccgaacaggtaaagaccctgatgacgcagctcgagggctcggagaaccgaatctcggtcgagcgcaagcgctatatcgacgacgtggctggctacaacaggaaggtgacctctttcccgatgaatctcatcgccaaacccttcggcttcgacggcattgcccaatacaaagccgccccgtctgcggcaaacgtcccaattgtcgatttcaattgatgttcggccgtaaaaccttgccttgatatagccttccgccgttacgggaggctatactattattgatgtaccggtaagcgttccccaagcgcttcaagaagacaggaagtgaatatggcagcattcgcagacccccgcgagagcggattcgaccccgaactcgtcaagacggcctgatgccgcgcgagcaattcagctccaagcctcgcaaattagttctcggcatcgacatgggaatcgccgatatcggaatctgtctcatggatgagctgaaccgcgagatcgttcttatggcgacccatctgttcgattgcccgagaaatccgaaagaccagacgagtcttgcatctacgaggcgtcaggcgaggtcgcagcgccgaaacatcgcccgccgcgcggcgaggaagaagcatatccgcgagattctgatagcgcacggcgtcattcccgaggcgcggacgccgaatggttctccgtacgcaagggcgaacgggacaacatccaactgcgcgtgaagggcctgagtgaggttctctcctgccgcgagctcgcccgtatcctctacggcttcgcctcccgccgcggctatatcgatcatggcaaagcgacaacgacaaggatgccggcaaggtgaagaaggccctgaaagccaacgccgagattatggaagcgaacggctacgagacgttcgcccaatacctcataacgcagacgaaaatccgcaaccgccaaaatgactactcccataccatcgatatcgacatggtagtggacgaggttcatgcgattttccgtcaccagcgcaagctgggaaacggacttgccgctgaatcgctggagggggagtatctcgcctccctgcgctggcttacggatacgaccaaacgcgaccggattatctactccaaggtcggttactgcacctacctcgcgagccggtcaagcgcggaccgaaatcatccatctcgtccgagatggtccgtgcctaccaaacgctcgcgaacgtcaagattgagcatatcggcgcacccgccacgcagattgcgcctgcagtgcgcagccagatcgtccacgagctgttcaaggtctccaagaacccgaaaccgctgaagtggtcccagctgcgcaagaagctcgaccttgccgacactgacacgttcgccggcatccgccaatcggacgagggcaaggatgcctgcgtgaaactccccgcatggaacacgctttgctcgaccctacatgacctgaatcctgccctgctcaatcgcctgcacgatgatatcgacctcgcagatgcgatatgttccgctgccacgtttgcatcctcatcggaggcctttgccacgcgaattgccgagctcaccgatgggctctcgaaagaggacatggaatcactcctcgagctgccctatggctcgaagctcttcgcggggtacggctcgacgagcctgaaggcgctccagatgcttcgcggcgcattcgaggacacgaatatcaaacgtctctatgatgccgaggtcgcgacgggtctgtatgacgcgcgtaaggctctcgcagctaaacgcaatacacccgatgacggtctcctgaaaccctactcgaagtactctccgatctgcaccaacccagtcgtcttacgttcctgcgcccagcttcgcaggatcatcaactcggttatcaggcattacggtctacccgatacgattcgcgtagaggtggcgaatgaacttaaacacacgaagcgagagaagaaactcatcacgagcggtaacatctacaaccgcaaggtaaacgagaaggccaaagacgatatcgtagaatttctcggccttgccaatgcagaccgcgtgaggggacgagaccttgagaaggtacggctctacaacgagcagggcggcaaggacccctacacgggtcaggggattaatttcggtcgcatgctgacggaaaaggactatgtcgaggtcgatcacatccttcctttctcccgttcctgcgacaactcgaagactaataaggtcctcgtcttgacgaaatcgaaccgcgacaaggcgaatcgaacgccctacgagtggatgacctcgggcgagcccaccgcacccaactgggacgagttctgcatccgcatggatgtctgggccagcggcaaggagccgaagcactactattcctcgaagctcgcgaaactgaaagaagacaacttcacgaataacatcgactccttcatcagccgaaacctgaacgacacccgctacatgtccaaggatgtcgcgaaatggctcgccgactgccttccgttcccaaaggacggacgcaggcacgtattctgcgtctccggcgcagccacaggtctcatgcgtcgagtttggcgtatcggaatcctcgacgagaatggtaagaaggatcgagaggatgatcgccaccatgctgtcgatgccgcggtgattgccgcctgcacgccctcgctcgtcaaaatcatcgccctcatcagcgaggaacatgccacgcaccgcgatgccgatcgtctactgaaccgctcactgccctatcccgagttcaaagatcaggtcgatgcgtggattccgtgcatcgtgcctacctattcaccgactcgtaatgccacaggagcgttattcaaggagaacgcctattcctacaagggaattgatgagaagggcaaagacctcatcaagaagaaaaagggcgaggcagggccatgtacaccgcctggaaagacggcaaggggactgccagggcttacgatgggcagtacggcttgcttgccgtttataacgaatcgacctcacgttggcttctagaccccctttactacatcgatgtacaaaggcgaaaggctgaaaaaccgttcatcaggaagttctcgaaagacctctcaatcgactactgggagaagattccactgactggagacgaacagacactttttttgaagccgggagacgttttggcacaggacggcctggtgggtcgtttgcattcttacgacatttccgtcaacacagtaaagaatgtattacgcaagaggggatattccttccagaaaactggccgctcgtcgccgagaggttcccg

SEQ ID NO: 1702 - DNA, 7160 bp, synthetic construct
  misc_feature 1..7160: note = Synthetic
  source 1..7160: mol_type = other DNA
cgacgtatcgctttctcaaaatgaactcgagcgtcttgccctgcggaatacactcggtttcatcgataagcctttgggcagtgttgacgacttcacggtatgcgttctcgttcagcacgctcccgagcttcgtcccaagtacggcggtagcgataatgtcctgcccgatatatgggtcgacgattgcctttgcaagcctgaggtcacgttcgctgatcattttgcctcgatttgggtcggcttctcgattcccggttcacgttgttcagattcggcgatcttgctgcaggcagatttggcgagttcggctttatcggaaagcctcgtgtgttcatggtaaggcgctccgccgtcggaaacaccgccgaccggtccgttttcgataatatcgatgatgtctgacgagctgacgagtgaatttggatcatggaacagctggtcgagatcgcctatgaactcattgctttccggacgaccttcaaaggagaacttttccgtcacggtatgggcattggaaaaatcaagttggtggaaggtgagcagctgatccacatactcgccttcacgatagaatccggtatgggcgagcatggcaaggtgctcgcggttttcatcgcagccaaagtcgataccgctcttgaaatcgtccataaaccactcggtgaaatctgcaaggtcctcaccggaagtaggaccgagaggaagaagctcatattcgggatcgccgatttgttttgtgccggagaaattgaccttttgcacgacgaaggcggtgtcctgtccctcggcaaatttagagatcaaaccgaagatatggtcattctcttcagcatgggcaagctggtccgattcggggacatcggccttgatctgattcaggtagataaagttctcaatcgagacatcatcggcttttggtcggattcgtccctgcagatcgtcgatcttatccacgaggccggaaaatgccgaaaggatatagtccggcttggaatcgggattccattcattgatttcgagaacgtcagtcaatccatatttttgtgcaaaagagtccagttcatcaagttgttctttagtgaacccccatgaggccagatcttcaggatcgtcgataaagaccattcccgcatagctgtctcggacgttctccgtaatagcgttcagcatttctggaaatttcgatgggtctactttcggaaccattgcataagtcctttctttgaataccttttgtaagattctaccacttcgcattgaagaaaaggaccctgaccatgagaagagatcgagcccggcgatggtatatgacgactacgcggatattggtatatttgcaaaatgggtgatggatgcgcccgagattggggagcggacacatccatcggtgggaagatgtccatgcacgagaaaggggatcaaactcgtgctcttaatcataatagcaatttacagaccgttttcgtgtggactttccaaattcgcaaacgtttgcgaatttcacttccaaaatttgtcgaagagaccttttatccttccgagaatcccgtgcggtttcgtcggcgtttcaaaaccggtatcttcggtctgctttatttgtcggccggcgggtgcgctgtttttataggaagggcatctggaactgagtgaccttttcttcctcagtgcctcttcttgcttctcgacggtcgcttcggagatctcccggagtgtgaggtcgatgttgtcccatgaggtctcacctgtcggtgcgcctttcacggcatagaccgtgattgccggaagcggtgcctccagccttacgagatctgttcctttatggcggagcggtttatcggatggttctgcctcgatatgccagctacgcttgaaaatctttttagctgcaggagagtagagccattcgcgaccggcgaaacgcgtcgcatggccggttcctgtaattcgttctgccaggctctttctggtatcctccgcatttgcgatgtcatctgtgatggatatttccatgaccgggaaatccacggtggcatatttgcgcacatcctcgatggctttcggatggctgacgcggaattcgatggcgacccagatctctgtatcggcatgcgacagcagtgcgaccgcatccggaatgagaccttcagggcacatcgcgccgcaatcgcgctccgttttgacatcctcgattttagtcatgcaaccggtaccgggaatgaacgatttgtatgtttcgggaccgaactttaggacagaagagccgggaacgggaaggactgtcagtttgccatacttcttgaattcgagtttgccggcgttccgatagcgtgacgtatgcgggacgctatcgatgagtgacaggttggggaggtagaaatcatggccgatgagcccttgaaggacggcttttgcctccaggtggagaagggactctggattcgactcgaccgcgcaccggctgttcgcctcgtgggccaaatagtggatgcctttctccgggtcgtccttcgaccatcggactgccttgagccgttttccgcaattcggatcgggacagacaagtccgcacttgaacccgttgcggtcgtaggggatttggtctgcccatacggtattgccgtgctcatcaagtccaaaaggaaccctcatttatgaaccgtctttctgtcccatagcctggtgaggacgatcggctgtgtcttgtcttcattcaattcaaaaagatgcgcagcgcccccgaagcgagggcggctgcacgctgttttctttttatgggcgtcaaggagccgtttcaaggaattgacttttacccaaactgtttttccaaactccatacctcggggatcctctgggattttaaccgattctaggacgtacgtagataccgtcgcttactttgccgttgcaaattgccttaggaacaaatgtcttgcttttcccgttgacggtcaaggtcacctcgcaattgatgtacgatccctgtaaacctgagagagacagagaggggctggagccgagttctttggcgacaagtccggcgccgcttccgagaccggcgcatttaaaccatctgtaggtgatattgccctgcgggatatcggaaagctcgttgtcgaagacgatagaggcgtaatccccttcacccagacttggaatctgagttgatgagtcatagggggcagtgcagcatgcgagcgagtttccattaaaacgtgggcgatagcttccggtgggatatttagaccaatcgaaaacatagactttgccgattgtctcgctgtaggcatcggggacttttcctttgctgctggatgtcgtcaccttgcagcgcagataatagtcctcgtcttcttccgagatttcgtaagaattcgtatttccaccgtatttgatatcactgaaagttccggttttcgtcgatgagtactgccattggtagctgacttgggttgcgcctgctggtaaatttgacactttagcggtgaccctctcaccgacgacgtccattcccgttaccgacacagtaggggcctggagctgtgagccgctattctcatcccctttgttttcaccgccggcgttatttcctccgccggtgccgttcccgccagaagcattatctccggcgccgttcgccttgccgaaccatgagctgatgctgttgccggtttttccgatctgccctgagacctggtttccaaaacccatcagtccaccaccgatgacgacgacggccaatatcacgatgatgtactcgacggtctcgccaccaaattcgcgtcgggttcgatggcgatatttagacgcggttggaaatatttggcgtttcatgattggtctccaatggcagaagtggctaaatcggtctagattttaccgcatcgaattctgtctgctcgcggtggggaaaactaaaaatgacctgcttgtagtattattaaaccatctgatcatcaattaaaaggaaggtgagggtctatgatggaatacagcgatccacgtgatttcggattccgcccggagacggtcatgacggcgttgatgccttacgagcagttttcttccaaaacgcgcaggctcattctcggtatcgatatgggcattgcaagcgttggggtctgcctgatcgatatacgcaatcacgagatcgtccttatggcgagccacatcttcaaggcgcctgtcgagggcaagcagaaggatatttcggctcgccagagcggcgcgagcatacgacgtggctatcgctcggttcgccgcacgacaaaacgccggaagaaccgaaagaaggctgtccgcgatatcgaaaagaagtacattttgattccggacgatgcggacgggcagtggtttgcaatccggaagggcgagccggacgtccttcaccttcgcgggaaggcgctcctctataaactgaatgggcgcgagcttgcccggattctatacgcttttgccgacaggcgtggatacatcgatcacggcaagggagctaccgatgacgactccggtaaggttaaaaaggctctgtcggtaaaccgtaagattctggatgaaaacggctatgagacgattgcccagtatcttttaaagcagcctacttcccgtaacagggaaggtgactaccgctatatggtcgacatcgagatggtgacggacgaggttcataccatcttccggcaccaacgcgatcttgggagcgatatcgctaccgaggagctggaaggggagtacctttccgcacttcgctggcttaccgacacgagcgcccgcgataagaaaatttatagcagggtcggttactgcacctatctcggagccccggagaagcgtgctgcgagctcattgatttcctttgagatggtacgggcgtacgagaagctgtcgaacataaagattgagcatcagggtcgggaagcgacatacatttccccggagaagcggaatgagatcgttgcatccctgtttgccgtctcgaagaatcccaagccgctcaaatggtcgcaacttcgtgaaaagcttgatatgcagtcatccgacagctttgacagccgcctgccgacggacgagaaggacgattgtatcaagattccggcatggaatgccctctgcacgggtcttttcatgtcgaacagggcgcttctcgatcggtttcatgatgataccgacgcggccgatgccgtctgctcggcattgacatacgcctcttcaggcgaatcgctgcgaaacgcccttgaaaatcttagtctcgatctgtcagagcaggacatcgattctctgctcgatcttccctacgcctcgaagctcttttcgggatattgcagcgcgggagttcgtgccctgcagatgctccgcgatgcatttaaggatccgcagattgagaaactgtacaatgcggagaaggcgaccggactatatgaggctaggcaggctttggctgcggcaagggaaacaaatataaagagtaatgtcatgtcagctacgatttgaaattatctatcttggagacgtatgaattattccaaggggcattgacgccagacaagattgtctacatagacaaaaaaacagggtcaaaaaacttgagcgtctggccgaacgccaattgttcgggaactactcaagccttgaacctaattgcattatacatcagccccaatgcatttacaagctaaaagaaatggagagcattgatagggcgaggtcattaaccaacaaagcccttgaaacaagagactcgtgtgaatcgctggctaatcagcgcaatgtagtagagcatgattcacatgaggaacgaatttagcaaattaagcagcactacgagaaccgaaaagaaggattctctaaatggcaaagttaatcgtcggtcaaaatgatctggctacagtgaatcccaatctcgcggcagagtggcatccatccaaaaacggctcgcttttgccgtcgcagacaactgccggatccaacaagaaggtatggtggcttggtaagtgcggtcacgagtgggaggcaactatctgttcgagaacagcgggaaatggctgtccgttttgttctaacaagcgcgtgttgcctggatttaatgacttggcgacagcttatccggagattgcagaagaatggaactataagcggaatggcgccctgtcgccagaggattttacttacgggtcggaacggaaagtgtggtgggtttgcccggtctgcggcgggagcttcttaaaatcggtcaataccaggaccgcaacgcgaacgagaaacttgcagcattgcccttattgtccaacccgtaagggcgaggcaagcagaaagcctgttatttgcctggagactggaaagacctatccatctgctgaagctgcggcagcagaggtgtctagaacaggaggggctatttcggctgcatgtagggagggtacaaaaagcgccggctttcattggaaatatgccagcgaatatgataactgagcattggatgttctgaacgataggagacaggaaaatgatatcaacaagcataacagccgaattattgcattcacgagttaaaggcatctccgccaggagaaacaaggagaacaattgcccctacattgagaaatatcactcgttctcagcctgacggtatacgcgcagctcccattgcttgcgctcgactttcgccacggcatccagaatgaatccagtagccagagagagggcggcaatgaacatgaacgccacggctaagatggctgtcgggagtctgggcacgaggccggtggcaaggtactcactcactacaggcatgccgacacataggcccccgatgcagaacgccaaagcgatcagcgagaagaactttaacgggcggtagtccttgaacagcgtgccgatcatggcgatcaccttcagaccgtcactcaccgtattcaatttagagaccgagcctttggggcggtcgcggtagtcaatcggaatgttcaggatgcgccaacgatgatcgacggcgtgtatcgagagctcggtctcgatttggaaaccctcggaaaggacggggaacgtcttgataaagggcttggacatggcccgataccccgtcatgacatcggaataggcatagccgtagatccacttaatcatgaagcgaaccaaatcgtttccgaagccatgaaacgcgcggg

SEQ ID NO: 1703 - DNA, 23720 bp, synthetic construct
  source 1..23720: mol_type = other DNA
  misc_feature 1..23720: note = Synthetic
ggaaaccggaggccgaacagctcatcaaagaggccgaggagtttttggacaggcacaattccttctgaaggatacccgatagctccacgacactctgacgaaggccgttccgttcaccggcaagtcgcactttctgccatcgatttatctgcggggcgaagacatgacgggaaccggcgcaatcctcctgattttcaagtccattctcagcacgacctgaaaacgactttagaaacattgaacacaaagtcggatatgcgaagcgaacccctgtggggggcgcttcgcatatccgacccgaatcatatcgaactcatctcccctgattacacccccaaggacagggctgcactcggtgccgcaggtatgattccggccagcagcaataccgccaccagcaccgcgagcgcgatgcggtacacggcaaagaccttataggagaatgtggaaacgaacttcagaaaaccgataatgacgatgtagcccacgaaaaaactcaccaacgtggccgcaatcgtggctccccatccaggaaacatcggatcgctcttataatccgtgaacgccttgaacgcttccaacaagccagaaccgaagaccgccggtatcgccatgatgaagctgacgcgcaccgcagattctcgggtataacccatagcacgtccaaaggtgattgtgccgcctgaacgagaaacccccgggatgagggccagcatctgaccaaccccgtagagaagcgcctccttggcgttcatctccttgattgtcttcttttgagggaagcggctgtccacccaccaaaggatgacgccgaaaagcagcaacaccgttacagtgatccataggttgcgtaaggtgctttcaatggtgtgctggaacaacaggccgacgatcagaatcggcatggtaccgatgatgatataccaaccgaatgtggcatcctggtcacccctgcccaatcggtccctccaatcggtgccgttatgtccgaacaggcaggagaaccaatgggacaggatacggatgatgtcgtgccggaaatacagtataaccgccagctcggtacccaactggatgatggccgtaaacgctgcgccaggatcgttatgaagcatcaactcccctacgatgcggatatgggcgcttgacgagacgggaaggtactcggttagcgcttggacaagcccgaggacgatggcctggaagaaattcattgactccccttttctaaaacacttgctgacacgaaacagaccgatctgcccacaccgacaacatgcgggtattccgttgtgggcttttagaatactacggaccggcaacgttgcccaatcagcgtcgcgggacttgccacggtgcgtcagaacgtatacgaaccgcattgaaagcatccggaactcgcgcttgcacattccgagcgatgacaacggaaccatgcgcggctgcgaggggcgggcaacgtccgtcaccacctccacacgcgtgttccggtttgcttgtctgctgcggcaagcacaatgaagtccaagattaggacagtgagttccgcagctgaactgcctgcccgtaatgtacgaggaagtgaggggaagatggcagtatatcgaaaacagagggcgttcgccccagaaggttttttcgaatgtgagggacgcgggctgcagtggctcggcgaagcgcaggctaacggcgggccccgcgttgtggacgtgtacgaatggggaaagggatatcttgacatcgaacgagttaattccgcttcacctacgccggccgccgctcgcaatttcggagcggcgttgagccgcatgcacgacgccggtgccccgttcttcggttcggcgcccgcaggatacgacgggacatgctatttcggtcctttggatgaccctgttgcgatggatacgggagagtggaccgacccggccgcgtattacgggcaaggaaggttgctgcccatggtgaagctgggcattcaacgcggagaactcgatgacgccgaccttgcgatgacccaggaaatcgtggattccctgccggagctcatcggccctgccatgaacgacaaacccgcccgcgtgcacggcgatttatggagcggcaacgtcatgtggacacaggagggagaagatcacggaacacgcgccgttctcatagatcccgcggcccacggaggacatcgcgaagaagatctggccatgctccacttgttcggcatgccctatctcggtgagatcatggatggctaccaatcgacacacccgctcaagaaggggttcgaccaacgtgtcacactctggcagctctaccccatcgccggtcattgcgtcttcttcggaggcggatatgtaagccagtaccgatcgatgtgccgctccctgcttgtctgacaaaggccatacctcgccatccggcagggatctccattcaccgatcagaatcaaccgacataaggatgcgcgaaggcactggcggacggccggcgcctagtcgatggacaccccatcgacccacaaacaaaaaccgtcacaactttcagctcaaggcatccttgagcttgctgaagaaccccttgcgcgagttcgccggcttggaggtttgcccaactgatttggcgttggcatcgtgcaactgtgagaactgactgataagctcggtctcacgctcgttgagcttcgtgggaatctgcaccgtgatatgcgccaccagatcgccacgctcctcaggcttgcgcagtttcgcaacgcccaggcccttcagggaaatcgtgtcttcaggctggcatccctgcggcaccgtcaatgttttgtcgccgtcgaaggtgttgatgtcgagttcatgaccaagcaccgcccagctcatcggtatctggatccaacaatgaaggtcgtccccttcacgcgtgaattgacggtcatgcttgatgtggacatcaacatacaaatcaccggccggaccaccaccctcgccgacttcgccctgattctgaagcctgatgcgcgttccgtccgcaatgccggccgggatggcgactccgatggtccgtgtgatggacacccgcccatgaccttggcattgcgcacaagggttgtcgatgatcgttccatgaccttcacagcgttcgcagggcgccgtcgtcatcatctgcccgagcatggtgcgcacgaccttctgtcgtttacctgcgccatggcagtccggacatgtgacgggctgcttgccgtccgcagtgcctgagccgccgcacttggggcagacaccgaaggtgttgaccttgacctgctcggtgccgccaaagaccgcggtcctgagatctataccaacgctggaaagtgcgtcgcgtccgggctgtgttcgtggggtgggacctgatccgccaccgaacgcgttgccgaagaactgaccgaagatgtcacccatatcaccgaagccggaagcatcgaagcccgcagcggcattggggtcattcggatcgattccctggtcgaacatccgccgtttgtctggatcgctcagcacctcataggcgctgttgacttccttgaatttatcctcgtactgcggaccggcgatgtcgggatgatatttacggctcatcttgcgataggcctttttgatctcatcctcgctcgccgatctgtcaacaccgagcacttcgtagtaatccgccactgccgttccttgattccttgcaatcgtttgtctgtctgtatatcgagcatgcgctgcgggtcattcgtccttcgcctccccgcatgtggcgatggagttcggagcaacgaccccggaagcaattgtgccacaagggttcgtcaccatgcatggcaacctcccgcactttggttcgaacctcttgcaacacattgaccgtttggccggaggagctcaagcatcatcgactccctgattcgacacgaaccgcgtaagataacgggccaccgcccgcaccgccgttatagtggcggcgtaatccatatgcgtcggcccgatggaacccacgaacgccaccggtgtcgaatccatgtcccccatccggctttcgccggtttcccgagattcgccggcacgccgtccatacccgctcgtgaccacggaagccttgagcaatcccggcgtatgtgtctcggaaccgatggccacgttgacttcgctctgttcctcgctcatgtcactcataagatggatgagaaccacctgttcctcaagagcatcaaacaacggacctaaatccgcggacgcgttgcggtgcgccagctgcgaagtgccagccatgtaaagctcctcacctgcctcctcatcggctgacatgctctcgagcgtacgggcgagctcgtcaacgaagaccctgccttgggaggtctgcgaggccgaagccagcgatcggatatgctccgccgattcgcgaaggggcatgccaaagcactgcctgttgatcagcacgctcagctgattcacttcatcggccgccggcatggaatggacgtggaacgtatgctgtgccacactacctgcgtccgtgatgaccactgcgaggaaaatggatgaagcgagcggcactatctctatgtggcgcatccgcgaccgtgccaaagcgggtgaggagaccacagcgacttgaccggtgatggcggccaggagacgcgccgcacgtcgtagggcgtcctgaagactgaccgaacgcgaaagaaacgtagcaatgcccgtccgctgcgcccgcgacaacggaacaagccgcgaaagctggtcgacgaaatagcggtagccgcggtcggtgggaatacgacccgccgaagtgtggggttgttcgaggtaaccttcactttccagcaccgccatgtcgttacgtatcgtcgcggggctgacaccaaaatggtgctgttgcgccaaggtcgtggaccccaccggttcctgcgaacgtatgtagtcctcgaccacggcgcgcaacaccagcatgcgtctcggctgacccataggcctcctcccttcagcatcaaaaccccaagctcatggccatgcacgctcacaattcccatagcggcatgcgcacaccgtaggaatcggcatcggtgaaccacatccaggcctgaacctgaaaacggaagaaccgaagacgaacttcataagctcatggttctgtattagcactcctcggaaccgagtgctaatgatgttcgtcatcagaggagtacaatgtggaaacccatatacgctgtgagcgttaacaaagagaatgcctcgcaaacacgccaattccttgaatatctcgtcgcccgtgatagttacgattgatacgtaatgtgagcgagcaaggtttggctcagccactcctccgccacttcaacaatattggaaggaaagaagcaagttatgaccgatttcacctggtcggatttggatgagcgcgccgtcaagatggcgaaggccctctctgcggacgcagtggagaaggccggcagcggacaccccggttccccgatttccttggctccgattgcttacacactgtatcagcgttacatcaagcacgatccaaacgaccccaaatgggaaggccgtgaccgcttcattctctccggcgggcatgcctccctcacgcaatacgtccagctgtatttctccggttatggcctgaccatcgacgatctgaagtacttcaggggcggtgcggacacccgcaccccaggccatcctgaagtgggcttgacccccggcatcgagatgacgactggaccccttgggcaaggtctttcctccgctgtcggcttcgcttatggccagcgtttcgagcgcgggctgctggatccgaacgcccctgcgggcacctctccgttcgaccacaaggtatgggtcatctgtggcgaaggcgacgtcgaggaaggcgtctcctcggaagccagctctttggccggcaaccagcaactgggcaacctgacggtcattttcgacgcgaaccacatccaaatcgaaggcgacaccaaactcaccttctccgaggacatcctcaagcgctatgaggcctacgggtggtacacggacgaagtgagcttcatccagcccgacggaacgtacaaggaggatgttgcggctttggccgcggcactcgacaaggccgaacaggtcaccgaccgcccgaagttcattaaggtggacacactcatcgcatggccgacgccaggcaaaaccaatgacgaatcctcgcacggctcagcgctgggagccgaagccgtggccggactcaagaaggaactcggctacgatccctccgtggacttctttgtcgacgaagaggccttggcacatgctcgcgaggtggccgaccgcggtcttgccgctcacaaggaatgggatgagcgctacaatgcttggcgccaagccaacccggacaaggctgcgctatatgaccgcatccatgcaggaaagcttcccgaaggattcgacgaggccatcgacaaggccatcgccgcattcaaggccggagacaaggtcgccacccgcaaggcttctggccaagttctcaacgccatcgcggaagtcatgccggaactgtggggcggctccgccgatcttggtggttccaacaacaccaatctcaagggggcgacttcgttcggaccgtcccatgacgccactcgtacatggcccgaaagcaacgaatacggccgtcagctgcacttcggcgtacgcgaattcgccatgggtgccattaccaatggaatcctgctcggcagcgacacccgcccgttcggaggcactttcttccagttctccgattatgagcgtccggccgtccgtctggctgcgcttatgcagattccgaacctgtacgtatggagccacgactccgtcgctctgggcgaggatggcccgacacatcagccaatcgagcatttggctgccttccgcgccatgcccgacgtcgaagtcgttcggcctgcggatgagttcgagactgccgaagcgtatcgtgctttcttcgagaagaagaacaccttgccaacagccatgatcctgactcgtcagggtgtcccggcactagctgagaccgccgataaggcgcgtgaaggcgtacgcaagggtggttatgtgcttgtcgacaccgaaggcgagcccgacgtaatcatcatggcttccggatccgaagtgcagtgggccgtgactgcggcgaagactttggcagacaagggcatcaaggctcgcgtggtctccatggtctccatggagtggttcgaggagcaggatgcggactatcgcgaatccgtcctccctgcttccgtcaaagcccgcgtctccgtggaagccggtatcgcgatgcttggtacaagtacctcggcagctgcggcaagcccgtatccatcgagacctttggtctccaaggcgacggcgcacagaacatggttgacctcggcatcaccgcggaacacgtggttgaagccgccgaagcttccatcaccgaagcgaaggcctgagactcatggtggatgctttagctggcatccacccatcaccaacggcggtgatatggaacggatcaccgccgatcgaaattaagatgtattccaaagactggaataaaggagaataaatatgactgctgctacacagcgcacaagtgattcaggtgtttcgatctggctggacgatctgagccgtacccgtattgagtcgggctcgcttcaagagctcatcaaagacaagaacgtagttggcgtgaccaccaatccgtccattttccagaaggccttgagccaagtcggtccttacgacgcacagcttaaagaacttggccgcgtggacgtggaaaccgcggtccgcgagctgaccactacggacgtgcgcaatgccacggatatcttcaaggaagtagccgaaaagagcgattacgttaacggtcgcgtttccatcgaggtcgacccccgcctggctcacgacacagccaacaccgagaagcaagccgaagagctttgggccaaagtgaaccgccccaatgccatgatcaagattccggcaacgctcgagggactgccggccattaccgctaccctctccaaaggcatttccgtaaacgtaacactcatcttctctctagagcgttacgagcaggtcatcgatgcctacatcgagggcatggtccaggccgataagaacggtcacgatctgagcaagatggcttccgtggcgtccttcttcgtctcccgcgtggatacggccgtcgacaaactgctggaagccaatggctccgctgaagcgaaggctcttgaaggcaaggccgctgtagccaatgcccgtctggcatatcagctcttcgaaaagaagttcgcatccgatcctcgctgggctgaccttgaagccaagggtgccaagaggcagcgtcctctgtgggcttccactggcaccaagaacgccgcatactccgattgcaagtatgttgacgagctcgtagctcccgatgttgtcaacaccatgcctgagaagacgcttgatgcccttgccgaccacggcgacggcaagccgagcatccagggtacgtatgaggaaagccaagccgtgatggacaagctcgccgaccttggcatcaacatcaaggatgttaccgacaagctcgaggccgatggcgtagctgcgttcatcaagtcctgggactcggtgctttccgacacgcaggccggcatcgaccgcgtgaacggctgagcaaacacttagaggtttttggatgacgtttgttccctaaatatcattcaaaaccgacttagtggaactggcttagtggagcagattccatcgcaacgccctccagagcatatcaggcatcgcaaacgaaagaatggcgaatacttgaaattggctttggagggcgttttctatccaagaacgcgattctatccaaaatacgagtgataagtctcagctcctgcgattcccgaggatatcacggatacggattgaagtatgatgaggagccgtcgcactggctcgatcgggtcatcaatgacgcggtacgaaattgaaccgctagattcggtcattcacagactcggtgtgaaattgaccgaccactttacgtggattcagcatcagcaatgctccgaagcaacgattcagtgtggaatcacaattgtctgaatagtgcccataaccgaccggataccgaacctctcccaaggcggttactcgctttgacagttgataattcctggcatgctctagagcttggaattgaatctgaagcgccaacctgagtattgacatatggaacgcaatgacttgaccgcaatgacttgctacccagcttaccgtctgtcaacggtttggcatcgacggacgtattgaccgtattgactgaaaagaattactacggccgaatcgctcgggatgctgcgcaaacgtctgcaattatgcgctatacaatcgtcagattagcttcgttgatctggctacttgacatcacctattttttttgtatgcttagaacaatacggatttgtcaataggcatttgcccatcaagatgccgacactgtatagaaggtatgcggtatccgatgacaggctatggtatgaatattcggatgccagcattgatggtaaatggtttttaaaggaggcagcagtgagtccttggtattttatcatcttgtttgtcatccttcgcgcactgcatagattacagaagtgatcaggtcaaggactttgccttttgctacctcggcataaactacccattgccgagattattccattttaagcattcaacttgctatccatctgtcttgacctgtagatcatttgtcattatcgtcacaggacgatcttcttcaccgattttccccttttgcctaattaaaaatatgtgctatacttattattgaatttgaaataaggctgttccttcgttagttcagtcgattgctcctccggtattgcttttgcatgccggagttttttattccataatatgaattataattatcataaatgtcatattcgtttatggaaggattgttatgtctcagcacaggcgctatcgaatcggcatcgatgtaggattgaattccgttggtttggcggccgtcgagattgatgccaatcacgataatccattggatgagattcctatcagcattctgaatgcgcagtcagtgatccatgatggaggggtggatccagatgaggcaaaaagcgctacatcgcggagagcaagcgcaggagtcgcgcgtcgaacccgaaggttgcataaaagcaaacgtcaacgtctcgcaaaactcgacgaagtcctgaacgaactcggataccctgtcgaagacgagtcgcaattccctgccggatcaaacccctacatcgcttggcaggtgcgtgcgaagctcgcggagacattcattcccgatgttgaaactcgcaaaaggatgatatccatcgcaatacgccatatcgcccgacatcgtggttggcgaaacccgtacagctcagtagccgatgcggaacgtatgtcacatactccctcaccgttcatggtcgagtatgccaaaaaacttgatttcgaaataaatgacagaagaaccaatggcttttaccattctccttggcaaagtgtggatgaggaaggcaaaaggctatccaaatcagaattggaaaaacaaccaaaaatcgaagattggaacgacaatccaatcaatggaaagaccatagcccaattggtcgtctcttcgctagaaccgcaaaccaagatacgcagggacctgacacacggacttcaaactgaatcgacgttgaatattcagaccgagaaactgcatcagtcagactatattcacgaattagagaccattttcgagcgccagcacgttgatcagacgacgcaagaacaattactggaggccactttccataccaaaaatccaaaggcagttggagctgctgcaaaattggtaggaaaagatgcccttgactctcggtactatcgagccagtcgagcaactcccgctttcgaggaataccgggtcatggctgccatcgacaccttaagaatacgtgaacatggaacagaacgtcaactcacaacagacgaacgccgaaaactgtttgacttcatcaagggactgccttccaaaaaaacgaagaacgaaccttcaattagctctcttacttggggtgatgttgctgactttctcggaatacaacgaatcgacttgcgcgggttaggctctcttaaagacggagaaccggtgtcggcaaaacagccgccagtcatcgaaaccaacgacatcatgcagaaggcccctgaccctattgcagcttggtggtcacaggcgaacactaaagaacgagaccgtttcgtcgagttcatgtcaaacgcgggcgcaataaaagatacatcagatgaagttcgtaacatcgatgcggagatttcacaactgttggaagaactaacgggctcagagctcgaatccctcgacaagattacccttacttcaggaagagcagcatacagctctcagacgttacgcaacatcaccaactacatgtacgaaaccggctgtgatttaacaaccgcacgccaagagctctatcatgtcggcaagaactgggctcccccagctcccccaatctatgagcataccggcaatccatcggttgacagaacgttcagcatcattcatcgctggctatgcaatatgagagaccagtatggtgaaccagaaaccgtgaacatcgagtatgttcgagatggtttctccagcacgtccacacagctggctgaacagagggaacgcgataggaggtatgccgataaccttaagatgttgtctaactacgaaggagcaagttcacgctcagacgtccgccgcatcaaggcacttcaacgccagaattgccaatgcatttattgcggacgtaccataacgttcgagacctgccaaatggatcacgtattgcccagaaagggccctggatccgattccaagttcgaaaatctagttgccacatgcggcgaatgcaataaaagcaaaagcgataccctctacatgaattgggcgaaaacgtacccaaatactaatttgcaagacgtcctgagacgaattcaggagtggagcaaagatggttggatgaccgacaagcgctggagacaatataaggaagcgctgattctgagattggaagcaacggagaagcaagagccactggacaacagatccatggaatccgtctcatacatggcaagggaactgcgcaatcgcatttacggtttctacggttggcacgatcaagatgacgcactcaaacaaggcaggcaacgggtattcgtttcatcaggctcgatgaccgcagccgcacgaagaacgccatttgaaagccctctgatcaaaggcgcagacgaagagacgtatgaatcatcattgccctggcttgacggtatgaagggcaagacccgtctcgataggcgtcatcatgccgtcgatgcgagcatcatcgcgatgatgcgccctcagattgtaaaaatactgacagaagcacaggagattcgttctgagcagcacgacaagtacaggaaaggtcagacgccggactacgtgtgcaagcgtcgcgattattggcgcaattggagaggcacgccagacacgagagacgaagaggtcttcaactattgggctggcgagcagctaagaacgcttacggatcttgtgagccagaaaatggcggatgatgaaatacccgtcatctatccaacaaggctccgactgggcaatggaagcgcacacaaagataccgtcgtctccatgatgacaagaaaggtcggagacgaattaagcatcacggccattaataaagccgaatccggtgcgttgtacaccgcgctgacacgggattctgatttcgattggaagacgggtttgtcggcaaacccgaaccgtcgcatcagagttcacgataagtggtttgaagctgatgacaccatcaagttcctggaaccggctgttgaagtggtgctcaagaataacacgagagccagaatcgacccggaagcgcttgataaagttcacagtacgctttatgttccagtccgcggtggcatcgcagaggcaggaaattcaattcaccatgtacgcttctataaaattccaaaattgaattctaaaggcaaacaaacaggtagcatttatgccatgcttagggtgctgaccatcgatcttgctatgaaccagtacgataaagaaaccggcaaaaaacaagatctattcacacttccactcccggaatcctcattaagcagaagattcagcgagccgaagctacgtcaggcgttgattgacggcactgccgaatacttgggttgggctgttgtggatgatgaacttgaaatccctgcattcgcaaacgccaggataaccgaagaacaggccattaacggcagcttcacagataggttgctccattccttcccaggaacccataagttcagattcgctgggttcagtcgaaacacagaaatagcaatcagaccggttcagctggcatcagaaggattaatcgaaacagacgaaaaccgcaaaaggcaacaactacgactcactcaacccaatacagaatatagcaacagtattaaaaatgtcctaaagagtggcttacacttgaaagtcaacacgttattccaaaccgggattctcgttacccgtgccaactctcagggtaagcaaagtattcgattctcaacagtagaagaataaaatacaaagacattacagttaagccgtttcaaatcacattcatgtagtttgaaacggcttaactgcgtaaaagcagatttgcatttcattaattgtcttgttatatttacattacaaggagtgataatttatctataaggatccttccaggagggtcaatatgtacgcaactcagtggagagtcatcgactgcacggagtcaaatggctcaattcgcatcaaacgtgggaatcttgtaatcagcacggaaaacgtggactcaaccttgattcctttttccgactgcgatctattgttcgtagggccgaacatgtcggtcggcgcctctgtaatacaacaatgcgcaagatacgatgtctcgttgttgctatgcgactggcgcggcatacctgtagccgggctttatccttgggaaaaccagcacaatcgtatcggtgcccgtcaaagcgctcaggccaacatctccgaaccaaaacgaaagaacgcctggggccgcatcgtaaagtcgaagatattcgggcaggctcagacattgaaacgttatgatgcgtctgcagcgcgtttccttacggaattgtcaaaacacgttgccagcggagacccgcagaactgtgaagcccaggcggccagagtatattggagtagcctacctaacggaaaagggtttcaccgaatacctggcaatggagacacccgcaacggccaatacgactatgcatacacgattttacgaggccgaacaatccgtgctgttctcggggcaggactgtgtacctccttaggtttctttcataggaaccatagcaatttcttcgcactcgccgatgacattatcgagccattccgacctgccgttgattcggccgtactgacactcacgcatgatcaacctttggacgctaaaaccaaagcgatgcttgtaaaagcgtcaaatcgtgtctttgatgaggagggtgagacaataccgaccgtgatgaaccgatttgcgcaacaaataggaagatactgcgaaggagacatcgataggctcaatgttccaaaatggaaggctttggacgatgagatttgacgaggaggatcaagtgtggtgtgtagtcatgttcgatttacctaccaacaccaaggatcaacgccgcgccgcaagcctgttccgcaataagctgcttgatgcaggatattccatgattcaattttccgtctatgcgaagtactcccctaccctggccaacaacaggcagaccgttcagttcgtaaaaaaggagcttccagactatggcgaggtcagaatcctacacatcaccgataggcagtggtcaatgatgcaacgattttacggacgaaccccgaaaaagactgagcaaaagccagaagagctcgcgcttttttgaacgcaattgcgccctttatcgttgaaataaagcccctttgatgctgtactccagtatatcagaggggctttagattgaatttgaaacaacctatcgtattgcatcaaactattatccagtatatcagaggggctttagattgaatttgaaacatacgcaacaagctgtgagtggttgttaccagtatatcagaggggctttagattgaatttgaaacccggccgacgcccacgtgcccggcatgaccagtatatcagaggggctttagattgaatttgaaacttgtttactgcatcagctggcgcacgcgccagtatatcagaggggctttagattgaatttgaaacagacctcggaaacggttggaccgttcgcccagtatatcagaggggctttagattgaatttgaaaccgagccctttgagtttggcttgtgcgttccagtatatcagaggggctttagattgaatttgaaacagttcgaagatggaatttccggagtcttccagtatatcagaggggctttagattgaatttgaaacccaggcagaagcatggttccctcaggaaccagtatatcagaggggctttagattgaatttgaaaccctgggcacttcaggcggcggcaagtcgccagtatatcagaggggctttagattgaatttgaaaccaggaaaatccagtgtgaccggcatctcccagtatatcagaggggctttagattgaatttgaaaccaagctccgcgtagtagtcgatgtcctcccagtatatcagaggggctttagattgaatttgaaaccagcgcaccctgacgaccaatgcggccaccagtatatcagaggggctttagattgaatttgaaacccctgcggctgcgcgatccgatagcgcgccagtatatcagaggggctttagattgaatttgaaaccgcgagttcggttatcttggacacaagtccagtatatcagaggggctttagattgaatttgaaaccatcggaatttgatggtgccgccgatggccagtatatcagaggggctttagattgaatttgaaactgacacgtgggatgagctcaccacaggaccagtatatcagaggggctttagattgaatttgaaaccccacgaccaggctcttgtaactccggtccagtatatcagaggggctttagattgaatttgaaacatcatcagcgcgcgcccgcgagggatgcccagtatatcagaggggctttagattgaatttgaaaccacagtatccgctcctgcaacaggccatccagtatatcagaggggctttagattgaatttgaaacgttgaaagacgagcatgaccagggcgaaccagtatatcagaggggctttagattgaatttgaaacacctcacggtgtagccacacgttgccgtccagtatatcagaggggctttagattgaatttgaaaccgtagggtggcctgattggcggtgcggtccagtatatcagaggggctttagattgaatttgaaactaacggtctgttgcatgtgaggctcgcaccagtatatcagaggggctttagattgaatttgaaacgcgaaaaactgaaggtgttcgcggtgagccagtatatcagaggggctttagatggaatttgaaacagttcatcgccgacatgatcgccacctcgacccggcttacgacgcagcgcaacgtccgcatcgaaccgacaaggccacgctgggtgagagtgccacgcgggtcgaagacctgcgcgttctgcgtgatgctggcgtcccgtggcttcgcctacctgtccgaggatttggccggcagacagatgcagtatcatccggactgcgactgcaatatcctgcccagctggggcagtcagattcttaaagactacgaccccgataaattcgccgagatgcaccagacagccaaagacgccgcttcatccggcgactaccggcaagtgctatggcagatgcgccaaatgtatccagatcaggtcaaggatggcacctagcctctttccgccctttggcacacggaagttaatccgcccacaaggacatggttaggatcacgtgttcgacggacatggacctggcaccagggcacccaataaaacgcatttccctgacgattggagtgagagtcgaatcaaatgggcggtaatggaatccatcgcaaacccggactatgtcagtgccgcgaaagacagcaaccgcgaaagacggcaaccgcgaatatctctccaaacttgtggacggccagcatattagagtatggttgcagaagagacgaaatacgcacggacgattcgcgttgcacaccgcttatccgatgaccgagcatgaatggaggaaaatatggcagatgaccaactaatcacacaatcagttgccgaaatgaaaccctatgtattccccctgctcaataagcaagacaggatagcctgcgatggcgcggtcctcgcgggggaaccctatgaggcccttgcctggttcttttccagcttcaccgtccaagacgcgcggaagattcccgacgatacgcttttctcagccttcaacctgcttgatgacgaggacagggaattgtacctgcatctgcttcttcaacgacaaaccgtcgccatctagcgccaactgatagattttcccaaccacccgcacgggtggttttttatgcccgaaacgggtccaaccgacaatgaaggaggaaccatgcaagagagcccaaccccaaacgagaccgaaaaggactcaaacgagggcagcaagaccattgactggcaggccaaatacgacgaggccatgaagcattcgcgttactgggagaagcgtgccaaggacaacaaagccgccgccgaagagctggaacagctcaaggccagccagatgaccgacgcacagaaggcccaagcccatatcaaggagctcgaaggcaagctcaccgcctacgagaccgaaaagcaacagacccagtggcgcgcccagatcgccaaggaaaccaacgtgcccgcagacctcatcagcggtgcaagccttgaggagatgcaggatttcgccaagcggctcgacggctatctccatccgaaaccaaaaggcgcagccgtacacaaccaaagcggcacaccaaaccacggtatcgacccggaacgggccgaaaagctcaactacatcaaccagatgttcggcaccaaataacaatcaacgaaaggaattccaatggcattggaaagcacaagtatatcagtgagactttagattgaatttgaaacagtacatcgcgcgactcttgggcggcgaccagcatatcagagggaatttagaatgaatttgaaatctactgcccaaaacactacgatattttttagcatatcagaggggccttagattgaattcgaaacccaatttggcgtgtcgcgcgttatgcaatcgctatatcagaggggctttagattgaatttgaagcacatggccgctgtcagattggcagttgccatggttgcctccgcttaccgccagtcctgctgggcataaaaagcctcccggaacttccgatctagatggcttataggattgtggttcttgggccgtgcgtgttatcgcatgggcggtgcgtgttatcacaaatctagacgttgagttggtctgcgtacacttcgatttcgtagtagtcggggtctttggcaagttctttcacttctggcgggaattgtgcaaacagttcaggcttgagcatggctgcgtccagagcgtcagcgatggcaatatcaggttctcccgcatcaagcgcgtcccgcccgagtccctctttgatgtcattcacacccgcgactagagcaagtgaggtctctgcgagagctgtcagcttctcgaaaccgatggtcatttctttcccttccacattggactagtacttaaacctgcctccactctaccagcaacgccattcttgaagaagcttttgatcgtccgacgtccctccatacggattttccgcatggggctgttctgattatgacacaaccgacacaacacacggcatacacgacacaagtcgaacatgccccatcaacggcccacccatcctacacagcccacaaaaacccggtacacagcccatgaaacatgaatcgcagcccctcaaaaccaatggttccgcagtggtagaattgaagcagaaccaagccgcgccagggaatggagtaaagagcacaggtgaagacacttgaagaactcatagcgcttgccaaccagtgcttggacgtggtgaaaggttccaaccctgaactcgaggaaagcacacgctaggatatattcgccggcgaacccgtcatggcgctcgaagggatgctgcaaatagcgtacattcatcccgagctgttcgccaaattcccccaacagatcaaggacatgtccgacggccccaatctgatggaactgtggccgtacagcgaccagctccatgaccgttaggatccaagatttttcaacctcgataagtcatccggagttcctgtggtctttcactgcatacctggcaagctcccgagcggcttctcactccacactcagcaagtcacgggcggaagacaggcgagccatagcaatcagcaataaagagaacactagaagctgtatggcgccgcttatgttcaccagctacctgaagcaccgcctccgccgaagtcacccccgccgaacgagtcccctccaaacgaatcgccgcctctgaacgagtctccccctccaagcacgctctcgccggtgaaggaatcatcatcgtcgaggaaatcgtcacgacgactcagcaattgcggaattccaagcaacagcagatcggcaccaccgtggcgaccacgccgcaccgaccgtgttatcttgaaccacaccaaaccgccgattagaataatcgcaagtatcagaacctgattcaaaaatgacggttgggattcgtcatcggtgtgaccgacaccacccccattccctgcgattttacgaccaacggacgtcacaacctcgcggacgccggcatcatagtttcctttgccgtattgctgctccccttggctgataatctgctcggcggtagcatcaggaatcacgtcctcaaggccataccccacctcaagcctgtccttgtgatctttgacagccagagcgtataccagccccgtatccttcttgccttcgcccggcctgtatttctcggcaagcgagatggtccacgattcgatactgccgcccgaaggaaccgaatccgctgtaaccaccataagctgagccttgtagtcactagcctccagcttcttgttgacgtcacgtatcagacgcttggtcgagtcagaaagcacatgcgcatcgtcctgcacataaatggaacccactgggtcgcgcggggcatccgcgggagcagctgcagccgttactgagaaaaacggcagaatgacaatgaacaatacagcaagcgcaccaaggaacaacgaaggcaacgacctacgagcaaagccggggctgaacgcggcggctctgccatcattcatggaacgtcaccttcggtgcattctcacttccaggctgggctttgtacaaatccatcttcgagaacccgaacaatccagcaaccattgaggcggggaagctcgtcaccttattgttgtactcgtttaccagacggatataccgctcacgctccacgctgatgcggttctcgctgccttcaagctgagtcatcagcgtctttaccgattccgaggatgccaactgtggatagttctcctgcactgcgttcacgaggacgttcgttttggagttcagctcgtcgttcgccttcaacttgtcgttcggagtggaagccgcggcatactgcctacgagcgtcggcgatatccttgaacaccttgctctcgtggtccatctgcccctgaaccgaggccacaaggttgggaatcaggtcggcgcgtcgctgcatgacgttctcgacctggctccactgtgcgtccacctcgttcttcttaccgttcatgccgttcctgagaccgatcagggatgtggcagccaagacgaccacgactatgacggcaatcagggtaattttgagcgaagtatgcgaacctgaaccatccgacgtattgttattatcctgcgtattcatcattttatattctccttaattattgatgcgagtatagcagataaacccaattgaagcattgattccgtcgacgacgaacacgacaggaaatgcgatatgtcgaccggtcagagcctcaacacagagacccttgaaccaggcaatacgacataggcaccatacctttgggtttcaaaaatcctgaatcactgcatcgtaagagataagcagcaactcagcaatctcatgcaaatagttcgacaacggactcaactcccctgcctacctcacccaatgagaccctgaatatgcaacctccatcatcaaaacttccatcgattacgctaccgtgaatagagaaccgctattctagtccacaattcatccatttaatcaacgaattgcaaccacactgatgtggcgtggagtgattgccaattctgtatgacctcgacaacctaaagaccacctctgtcaggccctggagctggattgacccgttgaacaatgggtttcagttcttcgaacgaaccggaccgcctggacaaagaaaaatccacaaaaacgtttatccttgggacagcaaggttgcaacctgaggttgcgcagttcatggttgctttttgcgaatgcaactgaaagctggtagcgccggcaggtcggttccgtcaaaatgatagctgacgacaaagaaaggacccttcaatgagtttccgcgacaatctgcaataccttcgcactaaacgtcacatgacgcaggaacagctagccatgcttctgggcgtctcacgccagtccatatccaaatgggaatcggagaaggcctacccggaaatggacaagcttctgacgatttgtgaccttttcggctgcacccttgatgacctggtattgggcgatgtaagtctcgccgtctcacagagtagcgaatctcttcctactgacgtatcccacatgcaagctcctatagaaacggattcaggcaccgcaaagccgcatccgggcatatcagggacaactggtgactcttctgaaaaaccaagacctgacatttatgactcaaacgctcttcccgccgacgtgccggttcctccctccagtccaggaatagatgtgaccgggtatgacgaccacttccgctcctttgccttatccatggcgctcggagtggcaagcatgattctaggactggctgctgcttccctgttcgacgatccggattccatcatcggcacaaacccattcaacgatttgtgggcctttactctgttgagtctgggagtcgtcatcggcttggctcttatcattccctcagccatggcacatacggacttcaaacgcagacacccctatgtcgaggacttctacacagacgacgaccgcgtgcgcgtctcccgccggatggccgggtatctggtcggaggaatcgctttcgttttcattggaatcgtagtaagtaagaacctgtcgctggtccgcagcgtaaaagcctggagttcaggggcattcttcttttttgtagcaggcgcagtggccttcttcatctatagctcgatacacctctcagcgctcaaggtgaacaggtataacgagagaatggaaaaaagacttggcagacaccgcttcggaatgcggcatcacctttgggacgaccgtttggatcggctcagttcagtggtaacagatgtaatcatgggtatcgctaccatcgtagccttcttccttctcttcgtcagccacaacagaatctgcgacgtgaccttccccttctggcttccctgggtgatcggcggcctcctttgcggtatcgcatcgagtatcatcagcatctacgacaagaatcggaaggactgaaccgcatgaagatctgagcggattggtatacgcacacgaagttgcagaacccatgactttgcgttgcgtgcattgcacgatgtacctctcccggcccagcccatgcgaagacctgaaggccattccatgaagcagaatcttataactatcatgggcgtgttccaatgaattcatagagtggttgtaccgactccattcagagcaataatttgttttatcatgcttgatcctgaggtattcagacagtcgaagtacatagttggagcattacgtcacgagtggagaaggatagcattttagatacatgaggatgcgtgatataaaatggaagataatgtagtaattagtgttgaatccttatcgaagggttataagactaaaacagttttgaatgatttgtctttctcagttagaaaggtgatttttatggtatcttggggaaaaatggtgccggtaaaagtactttaatcgagtgtctatatggtgctttgaaaccagacaaaggccgcgtatccgttttaggtctcacccccttcccgcgtaatcgcaaattactcgctgagataggtattcaagaacaacgaggcgcttttatatacagggctaccgttaaagagcatctt

SEQ ID NO: 1704 - DNA, 6044 bp, synthetic construct
  misc_feature 1..6044: note = Synthetic
  source 1..6044: mol_type = other DNA
aaaaaacttcaaaatatcgggctgatcagcccgattaatcattttcaagataaattcggtttgtgagttgtgtatataatgatacgctgcacatatatatgttagcgatattctctatgtttcaggcgcatagaaagccttgtatcaatatatgtaaactcacttcaattgtgagattaagcgggaattaattggacactgagtgagcggcgcagcaaccaaaagcaccatgacaggactcgtaaaacggcctttcacagtgacacatcagtgaatatttttgtggttttctgttttttctgtaaaattagattattgcgtaaaatctgttaaacataggcttgtgcatattttatattttttccattcacatttgaaatgtgaacggaaaaaattattctcaactttaaaagttggacattacaacttcgttgttcatcagcaaaagctgatgaattttgattttggacataactccacggaatgaattttatcagaatagttgaacttaagattaatttaaggagcagttctggtatgtcaaggagaaatccgtatttattgtaaattttttataagttttctttttatgtatacactgaattattggctatttaattgcagtctcatcagctatttctacgatattacttcgtttataacaaaaaaagattttcatttaagtgatgagcttgattattttatacatataattataatatgaaaatggacaaaatacttaatcaatgataaaatattaagtatgaattgcagattaccgagtacaaaatcttatggcttatttattttactttctcaagacctcaaacagattcggaaaacaaacaaagatatacaaatgtgccaaattggacagtttataaatagtaaaatagaaaggcggagccttaactccgcctcaaatcttgtgcagccctatgcttgttaacgataagaccgcattttccaatctgctataatttaaatataaactatacttatgttgtttgcaacatcttttttggaactggctataaataattagtatatgtttgatattttgcactgtataaaattgtatgtttttggaggctataatgaattacagattatctttggatttgggaacaaactctattggatgggcaatatacaaattaaatgaaaaagataaacctattagcataatcaatgcaggtgttcgtgtttttactgatagccgtgatccgcaaactggaacaagtcttgctgcagagagaagagaaaaaagaggtattaggaggaatcgggatcgttttttgaaaagaaaagagaggctaatgcagacattaataaaatataatttaatgcctgaaaataaagaggaaagaaaagctcttgaaaagcttaatccatatgaacttcggagtagagcattagatgaaaagcttgaacctcatgaaataggtagagcattgtttcatttaaaccaaaatagaggattcaaaagcaatagaaaaactgagacaaaagattctgatgctagtattataaagacttctattaatgaatttcaaaatatgatggaaaataataatgtcagaactccaggggagatgctttacaagttgtataaagagaataagcctgttaaagctaaaatttatggcaaaggcaaagatgcaaaatatgaaatttactgtgaccgtaacatgatagaagatgaattcgagcaaatttgtaaagcccaatcttcattgggcaataatattacagagaaagcttttgatgaaattaaggatattatctttttccaaagagatttattaccgaccaaaataggcaaatgttctgctattcccagtgaagacagagcgccaaaggctttacctatttcacaggaatacaggattttacaaacagtgacagatttaaggataattaagcctgatcaaactagtgtttttttaactccagagcaacaaaagttactattcgaagagctaaatagtaagaaacaaagagattttaatgagataagaaagctttttggactggattcttcttattcctttagtcatgagcatatgagcaaaatcaagggaaatgaaacatcttcagagttaagaagtacaaaaaggttcggcaaaaaatgggataaattttcaattgaagaacagacggaaattgtaaaattattacttgaagaacccgaagaaaatgctgttaaaaagactcttatcaacaaatgggatgttacagatgaacaagctgaaaatattgcaaacgcaaatcttcctgcagggtatatgagttattgtgaaaaagcactttatcaactgagcgagtctatgaaaaataataaatctttgactgaagctctccaagacaatggttataataaccttaaccctcaaatggatggttctatgagaaaacttccgtattatgcaaaagttctcgaaagatatatagggacaggttctggagatgaaaacgattctgaggaaatcagatatgggcgtatttctaatcctacagtccatagaggattaaatcagcttcagcgtctggttaacaaaataatagataagtatgggaagccaactcaaattgtaatagagcttggaagagaattaaaaatgagtcagcagaaaaagaaagaggttttgaccaaacagaaagataacgaaactttaaataaaaaatatgaggagatactttcagatattggtgagaggaatacaagaaaaaacagagatgctctcaggctttgggaagaattaggcaaaaatcccatgggtagatgttgtgtctattgtggtagaactatttctatcacagaacttatatcagctgaggtagaagctgaacatatacttcctttctcgcgcactttggataatagtcttgccaacaaaacagttggtcatagaagatgtaatagaaataaacacaataaaaccccttatgaggcttttggaaattttaaagagtgggagaatatccttgctcgggcaaaatatcttccagttaacaaaagatggagattcgcaaaagatgctatggaaaatttcgagaaagaaaattcatttattgatagacaattgacagatactcaatattattcaaaggtggctcgcatatttttaacggctgtttgtaaagatgtgtggtcagtaaatggtagacttacatcacttgtaagaagatggactggattaaatggtatcttatcggctacaaatgaaaaagatagaaacgatcatagacatcatgcaattgatgctatggctattgggcttatagatagatcgttcctgaatgctgtttcaaaaaaatctgcgaaaaatgaacttgaaaatattgatgctgttttgtcaaatagaatatcaatgataccctgggaaggtttttttgaagatgcaaagaaagctattttagaaataattgtttctcataaacaagagcatggcaagaataataaactttatgatgaaactgcacatggtataaaaacaaatgaagaaggtgacaaaaatcttgtcacaagaaaattaattgctgaaatgagcttaaaagaaatagaaaatatcagagacaataaaatcagacaaatgattttggaagctttatatggtactgataaaaaagaacacaaaaagatccttgaggaattttccaaaaatacaggaatatataaagcaagatataataaaacacaatacaactatgagataataaaacacggaaccaacagattttacaaagcatgcataaaagcagattaccatcatattgatgtatatgaaacacgcgaaggtaaagttagtggggaggcagttacttatcttgatgtcatgagaaacaaaatgcctgattggaaaaaaataaagccaaaaccaaaacttctgttacgtttgcataaaaaagatatattaaaaataaatgaaaatgggatggaaaaatattatgtgatattgcaactggagcctggtgaacccaataatagagttgttattgcagaaacaactgttgggggcaaaagaacagagataatgaaaagtaaggatttaaggaagtatattaattataataagataaaaaaattaaagcctaaaaaagtcaaagttaacgaaattggagagattaaagagcttaaatactaatggacaaacaggttgtggaaattacaaaatcaaagagacatctttgcgttcatcgtggctttatgatcgtaaaagatggaaaagaagaattagcaagattacccatagatatgattggtgtggttcttgcaaattcttatggcctaactgtgagtaataaacttttattatctcttggtgaaaataatataccgtttgtaatttgtggcaaatctcatttgcctgagagtgttatgtggccaatttctggtaattataggcatgcagcttgtacagacgctcaaataaagaaagcttctttaaataaacgtatatggaaagaaattattattaataaaataaagtgccaaagtgctgtattaaaatctttgaacattaacaatgcacgactagatgaacttgctcaaaaagtaaaatctgctgataataccaacaatgaaggtttagctgcaaaatactattggagtaggctctttggttcttcttttaaaagagataaagagcaagagggtataaattctctccttaattatggctacactatacttcggtcaatgactgccagatctataatgtgctgtggtttgaatcctttgttaggtataaagcatgttaataagcttaatccaatgcgtcttgctgatgatataatggagccatatagaccaatggtggaccaactggtcttttatcttgtaaaagagaacaaattagagattaacaaagagacaaaacgcgctttagcaggtatacaccttttgccaatgtatactaataacattagctcaactcttggtttttctttgcaaagtcttactcaatcaatatcaaaattatatttaggtgagacggataaacttgtttttccatctggaataataaataataaatatattatagagcatctgcggcattaagatgataaaaaaaataagtggatataggcttatgtggatgatggtaatgtttgacttgcctgttttaaccaaagaagaggttaaagaagccaacaattttagaaaacttttgttggggcttgggtttgaaatggcacaattctctgtctataccagatttgtagggcctaaagaaaaaagtggcaaatatataagaaaaataaaagaaaatcttcctcctgaaggcaaggtagatatagttttttttactgacaagcaatatgaaaacattatatctcttttaggaggaaatggaaaatctcggagaaaaacggaaaaatatcttcaattttagtctaaaacatacatttcaatggccgatttcctagatatttcctctttaatgactgcaagttaaacgatacctattatagcagataggaaaatacagtcaaaccgcaacaggctgtacaaccttgatatccttcgctttattatagcagataggaaaatacagtcaaaccgcaacaggataacctttgtcatcgtacaatactgtattatagcagataggaaaatacagtcaaaccgcaaccgcagcggtatgtgcacgtatttgccgctgattatagcagataggaaaatacagtcaaaccgcaaccaatatatgattatggtggttattttatttattatagcagataggaaaatacagtcaaaccgcaacgtagagatagcagagccttcaatcccagcaattatagcagataggaaaatacagtcaaaccgcaactagttacttgttctccaattctctcctgtaattatagcagataggaaaatacagtcaaaccgcaactaaacagcagggtgactatttgttgcatactaaaaatggacaaagttgcaagaggaattcccgaaagttgcaaacaggaattcccgaaatttgcaagaaataattgcaacaattttcacaagtgctaaaccctgtaagttg

SEQ ID NO: 1705 - DNA, 24155 bp, synthetic construct
  misc_feature 1..24155: note = Synthetic
  source 1..24155: mol_type = other DNA
aaacccacatgggcaaagggctgaggtgaaaaagttcatggtaacgtttttctgattcttctaattctttattggcttcagcaatattggcttccgctacttttctggaattaatatcttgtatgctgccataagccctgatgaatttcccatcaataatttctgtttgaccaattgatcttatccacttcaatttcccactgaaagcctttatttgaatttcttcatcccagttttccaaatcttcgagcacaatttttcctttatttaaatgattgttttttgagccaaagaaacgagaaattaacaataaatcaggcttaaaaccatcttttgcttcaataatttcgcatgcaatttccgaacaatatatcttttgggcttctgggtcaatttcccagcttccaataattgcaagattgtttgatttgaaaagcaagtcctcaagatttttgcgttcggtaatatcttttccaactataaagatcgaactttcttcgggtacataggttgcggtccacgatagccaaatagtttttccggatttagttaggcatctattttcaaaatgcgaaatgtcctcatccattgcaattttaattgcctctaaagttttttcgcgatcatcaggatgtacaaaatgagttgttggctcactaagtaattcattatccgaataacctaaaagttcgcaggctgcaagatttatcttcctgaaataacctttaaaattgagtactgcgataatatcgggcgcaaaattgaaaattttatctagctcgttttcaagttgcttccttttaatttcagcccctaaaattctagcaagttcttcaccaattatatcgaaagaaatggaatcgggcagtacattaccaattaaaattaatacgcctataaatgtaccattatgatttagtggcaatccaattgcggtttttaatccggctttttgtgcagcatgcctacgtgaaaagtcgccaaattctacaaaatcatcaagaacttgtaaatccattgtttcccatactttcccagccaaactttctcctttaggaatttttactatatttttagtgtcataatgaaattgaattgctttctcattttcggcagttttagcaaaaagtttcaggtttcgtttataggtatcaggcaaccaaatttcagaagcatcaaaaccggtattcttattgatgattttcaaaactaaagttaatacatctctaaggccgctgtttgagttaaaaacaccggatatatcgttaaacaattttttgcggttttcgctaatcttttccttagttatatctcgttggatggaaatccatatgtcaaactcacctttttcattttctacaggcgttacagaaaagctattccaaaattcatccccattttttttgtagtttaccatattggtatcacaagaatgaccttccaataaacatcgaataattctgtcaatttctaactgatcagtttttggcccttctaatattcgtggagatttacctacaacatcttcagcagaataaccggtcattaaagtaaaggcattgttaacgtagataatttttgagatcggtttgctgctgctagtatcaatttgggtaataacaactgaatcggtagtatttaatacaacggattctaagaggcgaattctttgttcctccactttctttgaagtaacatcatgcatagcgccaaccattcttaatgctttacctagttcatctctgatgaggaagcctttatcatgaacaattgcatactcgccgtttgcttttaaaaatctatattcagcagaccaaacggtttcctcagttagtataaccttatctagttttcggctaaactgctcaatatcttcaggatgaattttctctatccaggaatgtatatcagaattgagatcttgctcattatagccaaacaagattcgaaaattttcgccccaaattaaggtgcctttctgaatatcccaatcccatattgcatcacttgttgcttttacggcatacttgtaacgctcattacttatttcagctttaattctatcgtacatacgctcggttatatcgcgagaatttgcaacaaggccttgaatattaggatcagttaatttattgcttattatagtttccacccataaatattcaccctttacatttttaaacctgtaaggtttaagtaacattttttctacatgttgtgctttagaaaattgttctttaattctaggcacatcatctggatggataaactcaaaggcatttgcagaaagaaaatttttttgactaaatcctaaaattcccttcacagatgaacttaccttgaggtaattaccttggacatcaagtacagcaatcatttccagtccttccattaccaaagtatccaaaaccttttcatgaactaaacgagaaggggttaaagctatggagtgcaggaaatatcgaatattatgttcatcagcatcaataaggcgatgggttagcttataattgagcccggttttagaagttagttgtaaaggaatctgttcttcaggattcttaatatcaatactatcaataaagaaatcatcaaaagattcgaaatacttattgtagattttgtttaaatctgaaataccaaaacctgaaaattctttttttgttaggccaaaaaaaattaaccatgcattattggcagcagcaaatttaaaattgccagaagaaaagctaaccaaaatggaaggcatctcgatagcatttattaattgaaggcaaccgttttcggaaatcattgttattttaacctatcttttctataaaattttcagttcactttttatgggtcagctgcattcaaaattcaatttatgaaaatagattgaatcaaaaaatttttaaatttacgacaccttcatttataggagaaatattattaaaataataaataaaattccaaatatcatcaattaacaaaggctaatatattaatagaaggtatttttatcacttttataaattaaatggataaaatgaatattaatttttgttgcattcgttttattcgttttacagatgtaaataagctaccttccagttattaaactttaatttattttagcaaaaaagctttgattatataccttatgaaagcgggattgttatttcaaagtttgttccccatccctcttgcgatgtaatttccattttaccgtttaaactatttacgttttctgtaaccatgggtaaacccaaaccatatccccgctcaccacttgttccttcgctggattctaatgtgccgttcagaattttatctactgcttcctgactaaggccgtttccattatcagacacatcaatctttagtgttttttccttatctaaaacggctaaatcaagctttaccgttactgttccataatcagaactaaattttatagcattagaaattaaattccctgctatggttaacaatttgtatttagagaaattaacgttttggtttgcatttccaacaataactttaaagaaaatatttttagctttagcttgtggggcataaagtttttccaatctatctttaaatattataatgttaaaatcatcgctttttaatgttttttcttgatttagtatttcttcagttagggctaaaacacctttcgtactattttcaatcattttcatgtaatccaatacatccggaatttgattattaatatcacgtttacgaattatttctataatccctgttacaccagatagcggaccccgaatatcatgagccgccttacgctgattttttttggattcatcaagctcattttttaggttttgcgtaatttttaaatttatgagcttatcaacaacctcttttgcaagcaactttaataaatctattttatctttagttagtgttttagcggtattatccataacgcataatgcgccaatattatagccaccaggtgtttttaaaggcacgccaaaataatgacgtaaattgagcgggctttttacatagaaaaaatctttcgaacgttcatctgtggagaggtcagtgatttcgaggtactcatcacctgcaattgtgtattgacagatggactcttcgcggggcatttgctctatagttaatccataattagaaacagaccattgtgtaaaagaatcgataagattaaccaaagaaatattactatcagaaattcttgcagcaagcgctgtaaggttctcaaagttactttgcaaatcagtataatctgggtcaaaatcggcgagtacttttaatcgctcaacttcatttgctgatatcggaggggtgttttcgctgcttaattccatagttttattttaaattcgagcgctgtacaaagtatgacatttaaagcttattttaaaataaattttgctgaataaatataaattagcaattttttaaaaacaattttttttttagattttacaaaaaataaattaagataatatgcaacaacttaatttttaaaagaataacagcaaattaaaacaacttaatataaaaaaatcaaaataaaataggtaaataactaaaataaaatatattattttaatgattttacaaaatacactaataatttaatcgataaatcggtaaattattttaatatttgctataacaaccggcaaaacaattgaaatcaatatcgagaagagattttttgaataaaagtggtcttttagcgtctgcaacatacccagctatgcttgcacttggcttattaaaatcagctccggcacatgcttttaatcttgaaggcaaaggaaagggaaaaaaaataatcatacttggagccggtttggcaggtatggcttctgcgtatgaattaactaaactaggctatgattgtaccatcctcgaagcacgagaaagaacaggtggcagatgctggagtattaaaaatggtagccggcataatgaagtaaataagcagaccgttacagcaaattttgacgaaggattatattttaatgccggtccttctcgtattccccacaatcacgaacttacccttcattattgtaaagaattaggtgttccaattcaggtttataataacgtaaatgaaagtacttattattttgctgaggggaagggttctttatccaacaaaaaaataagagcacgtgaaatccataacgatgttcgtggctatatgacggaaatgctggctaaaactatggataacggcgaattagatagtcctttgaccaaagaagacagtcaaaaaattgttgaatatttaatggcagagggtggtttagatgctgataaattgtataaggcatctgccagacgtggttatatagaagcgccgggtgcaggcgataaaccaggaaaactttcagacccattaaagcttgcagaaattatacaatcgggtttgttagaccctgacttttataatgtagccgaatatacatacgaattacagatgactatgtttcaagcagtaggcggaatggataaaattgcacaagcatttgagaagaagctaaccccaatgctgaaattaaatgcagaagtaagtaacattcaaaacactgctgatggtgtaaaaattacttataaagataaagtaggaacccatgaattgagtggcgatttctgtatatgcaccatacctttaccggttttaagcaatatcaaaaataacttttcttctaatgtaagtcgtgctgttgattatataaattataatgaaacaggaaaaataggtcttcagtttaatcgccgcttttgggaagaagatgaacatatttacggaggcattacccacaccaacaatgagcttacgcaaatattttacccatcttatgactacttaagtaagaaaggaatactgattgggtattataattttaatgaaaaggcaaaacaagttggagagctaagttatgccgaacgcgagcagctggctttatataaaggaaaactgattcatcctcaatatgataaaacttttgaaaaatcactttccgttagctggcataaaacaaaatatagcatgggcggatgggcagtttacacatccgaaacccgaaaaaatgcatatcctgcgttattaaaacccgatggaaatatttacttcgcaggtgaacacttaacttacctaaatgcctggatggcaggcgcatttgaatctgcaagaagtgtggttgccgatttacatagcagaaatacagaaagcaggcaaacttacccaacacaaacaactaaaggataaacttaaaattttaaccatggccaatcaacttaatcgccgcagctggataaaatctactgcattgctggcaggagcagcaactttcttatccggaacacttgaaaaactggcagcaatgccaagaaatattcagcagaattttatgagtgatcgaatggccgatcaatacagtattttacgggcagatgaagccaggccagttattaaagccaggttatctgcaaatgaaaaccctttcggcccatctgcaggtgctaaaaaggcgatgaaaaaagcattaaaaagcagctatcaatatccgtttatgcacatgcgtgaactaaccgaacaaattgcgcaacatgaaggcattaaacaaaataacattatgatggatgcaggttcatcaccaatgttgcttggtgccgctttattttatgcaaagaatggtggcgaaattatttctgccgatccatcatataacgatttgccatcagatgctgaaagacatggcgctaagtggactaaagttcccttaacatcggaatataaaattgatttggatgaaatggaagcaaaaatcacagataaaacggcacttatatacatctgtaacccaaataatccaaccgcaacaattctcgatactgtaaagcttaaagatttttgcgaacgtgtaagcaaaaaagttcctgtatttgttgatgaagcttatatagactatttacctgatccgcaggctgccagcatgattgattgtgttaaaaaaggacaaaatattattgtcgcccgtactttttctaaactttatgggttcgcaggtttacggtgcggttacatcattgctcaaccagaaaccataaaaaatctatcaaaatattctacaggctctatgagcctttcagcacctacacttgccgcagcaattgttgcttacggggaaaaagattttttaacggatgcattaaagaaaacaatggcctcgaaagaatatttatattcggttttaaaagcagaaggttatgaatacatcccttcctcagcaaattttgtaatgtttccgttaaagatggacagtatgcgtttttctcaggagatgagcaaaagaggtgtaagcatccgcacctggcgtttcagcggaaaagaatggtgcagggtaagtattggtagaatggatgaaatgaaagcatttgcagatgcctttaaacaattatcataatcaaaaaaatatcatgcgtaaaattacgatagtcttgttattaattgttgcaacatcttttgcaagagcgcaacaaaaagttgttaatcctcgtcctttaaccatggcagaatacgataaagcccaaggttatactgttgcagatttagacaaggatacttatgtaaaattcaacaatacctacattttggatcgttatgaatccagaaaaccatactttataacgggagatgatggactaaaaaaacgaatcgacctttataaacttattgccaaagaaggcatgcaggaaattggcttgatggtattttacaccaacgaaaccggtaagttatttaaagctttggtacctgattttacggctgaaggtaaggtttgggaaaagtattttcaggatatagataacattaataaggaagaaaaaaactttgtacttaaactatcttacattttatctaaagaattagcctatcagcagtataaagcacttaatgctggtaaaaacttatcagaagaagctggcacttacggtagtgatatttgtttccctggtgatgaagttgtaacgatggcaaacggtggagaaaaacttttgaaagatattaaaccgggcgacgaagtaattactattgatccgaaaagcaaattacgctctgcagtgaaagttaaggaactgactattcatgaagcgaaaaattacgccattacttctgtggtattaattgccggtaaaagcattaatactttttcaggaacggaaataagcctaagcgccaaaatattaaaggccactcccaaccatccaatgactaccgtaaaaggtaaaatgaaaattggtgaggtaaaagaaggcgaagagatactatgcctaaacgaaaaaaccggaaaatatgaaacttatctggtgtggaaaaaagaagagagcgccggtggcaagcaaaatgtatataatattatagctgatgcaggaagcacatttatcatgaatggtgtgatggtgatgcaaaaataacgtctaagaggcttatcataaatcaattatatttaaccttggcacgttgagcctgtcgaaacgctctaaaaggcagtttttaaaagtccttcgacgaggctcagtattatatttcgtatttatgatacggccgcttaatttctactctataaattaatttcataaaaatttcagcgttaggataatcataaaactccccgcttaaacttactcttatttaaatggcttaaaaattgttcattgagctgatattcgattgatgttatgctgaaaactactgcaataatactgaatatgctattaaatatttaagtatgttgtgttctttaaagtatttgcttttaaaaaaatagtatttctatcagcactgattaccacattaaagcgtttcagcaagtcagagccaataatactcattttttgtcgccctaatgcaccctgaaagaaacccgaaggaacattatttagtttgtttttgccaatgataaaggaggttactatggcttttttggtcttaagtaagttgccgaaagaatctttcaagcttttttcaccagttattttaagcttttcatttagctggttatctgtggtgaattgatcatcaaaaagtatagcacccgaataacctgaatggataaggaattggtttttcagcaaatcatttccaattttacattcggcttcaacaaacatcatttcatctttataaattaaatttaatttattgtaagacttaatatctgaaggcaaattctgactaacagtgattgtttttttatcaaaatttaactcaagcactttgttattaaataattccaatccaaatttaccgccacttccgggccctgaatttaggttttcccaaagcggaatgttctcccaattatgattgcctatttgaagcatattgcttttactgtaacgtgaagagttttctgcaccgccccagcttttaaccgtatctgttctttcgaattgaaggctattcatttttccaatcgcatctttagttagggtaagcgcacttgccgcagtgtgaaacatgagcgatacagtatcctggttgttcaaagtggcttttatgatgatgttattttggctagtaagggtaaagggaattttataatctgacgttgattgtgccagtaaaaattgctgagcaatcgctatcatcgaaaaggtggcgagcaggctttttattatttgtcgaactgatttcatttaaccaagataggcgtttttttttacagctaatccggagcggttataaaaaaatcaggacataaaaaaagcgagttgccccgctttgaatgttttcacaacggaataatccttattgtgatttgctttcgaaaacaaatatagaatttaatttaatatcaaggatacgggaaaccgtaatgaattaaaaataaatgaatttaagtttgagtattcaaggtaaatattgagaatggttctgtgttgggtaagaattaaaaattaaatcggatattgttaaatatttaaataactgctcatgaaaaaaatattaggacttgacttaggaacaaatagtattggttgggcattgatagaagttgatgagcttaatgggccttttcaaattcttgcaatgggatcaagaataattccattggatgcagatgccagagaccaatttcaaaaagggcaagctatttctaaaaataaagatagaactactgctagaacccaaagaaaaggctatgatagaaaacagctaaaaaaatctgatgatttcaaatacagtctaaaaaagattttggaaaaactcaatatcttcccaacagatgaattattgaacttaccaagtttagatttatggaagctaagaagcaatgccgtttctaataatgaagaaatatctccaaaacaattgggaagaatactatatctactcaatcaaaaaagaggatataaatcgtcaagaagtgaagctaatgcagacaaaaaagataccgattatgttgtcgaagtaaaaggaagatataaattattgaaagaaaaaaaccaaactttagggcaatacttttatgatgaattatcttcagcaaaccaaaacaatacttattttagagttaaagaaaaagtctatcctagggaggcttatatcgaagaatttgatgccataattaatacccaaaaatctaaacattcatttttaactgatgatgttatccattcattaagaaatgaaatcatctattaccaacgtaagctaaaatcacaaaagggtttggtaagcatctgtgaatttgaaggttttgaaacttcttattttgataagaaaacccaacaagataaaaccatatttacagggcccaaagttgcacctagaacatctccattatttcagctttgtaaaatctgggaagtagttaacaatatctctataaaaattaaaaaccctgaaggaagcaagtacaaatgggatgatagaatacctactattgaagaaaagcaaacgatagtaaatcatcttttagaaaatgaaaacctaagttttgcagaattacttaaaatattagagctcaaaaaagaacaggtttatgctaataaacaaattttaaaaggtattcaaggcaatacaacctattcagctattcataaaattacaggcaatagtgaacatgtaaaatttgatactcatacaatcccatcaaaacattttgctgttctaattgataaaaaaaccggtgaaattttagacgaacgagatagtgtcgaattaaattcagctttagagcaagaacctttttatcaattatggcataccatttattctataaaagaattagatgaatgtaaaaatgccttaatgaaacgctttaatttcgaagaagaaattgcagaaaaactttccaaaattgattttaacaagcaagcatttggcaataaatctaataaagcaatgcgaaaaatgttgccttatttaatgctaggttacaaccaagcagatgctgaaagctttgcaggttataatcgcagattaactaaagaagaaaaatcaaagaatgtttcagatgagcccttgcagttactagctaaaaatagcttgcgacaaccagttgtagaaaaaattctcaaccaaatgataaatgtagtaaatgcaattattgagaaatatggaaaacctgaggaaattagagtagagcttgccagagaattaaaacaaagtaaagatgagcgtgaagatactgataagcaaaatggatttaataaaaaacttaatgaattggtagtaactaaacttagtgaacttggattacctactaccaaacgttatattcaaaagtacaaatttattttccctgccaaagataaaaattggaaagaagcacaagttgcaaatcaatgtatttattgtggcgaaacatttaatctaacagaggcattaagtggtgataacttcgatgttgaccacatagtaccaaaagccttattgttcgatgactcacagactaacaaggtattagtccatagaaattgtaactctactaaaactaacaatacagcttacgattatatctcaaaaaaaggtggcaacgccctaggcgaatatatattaagagtagatgaatggtttaaaagaggaataatttcttacgggaaaatgcaacgtttaaaagtttcatttgaagaatatcaagaacgtaaaaaagttggcaaagaaaccgaagcagataaaagaatatgggaaaactttattgataggcaattacgtgaaaccgcatacattgccagaaaagcaaaagaaattttaggaaaggtttgccataatgttaccagtactgaaggaaatgttactgctaaactccgtggactttggggatgggatgatgtattaatgaacttacaattgcctaaatataaggaaataggacaaacgcaaataaaagagtggacaagtgatcacggaaatcgtaaacaccaaaaagaagaaatagcaaattggactaaacgggatgaccatcgccatcatgcaatagacgcactcgtaatagcttgtacccagcaaggctttattcagagaataaacacattaagttcgagcgaaacgaaagatgaaatgcaaagagaaatcgatttcgcgaagaaaaaatatggcaacaactacgatgaaaaaatattaaatgaaaataatgaaatagttaaggggcaaaaagaaaaaaacaatcaactaaattcatatctgatttcacagaggccagaaaatttcacaacaaaatacattgagcaagaagctgataaaattttagtatcctttaaagcagggaaaaaagtagcaactataagtaagtttaaagctaccggaaagaataaagaaactggtgttattgttccaagaggagcattacatgaacagtttgtttacggtaaaattaaaactattgccaaagatttcaaaacagggttattaatcaaatatccaataaaatacttgttcgaaaacccagatttaattgctgaaccaatagttaaaactaaagttgaagaaaggttaaatgattttgggcgagatattaaaaagtgtattgaatccttaaaaaagtttcctatttatcttgatcttgctaagtctattgtacttatatcttcttattgctataaggatgaatttgtgattaaatataaaattacagatttaaaaaatgatgatgttaagtatattattgatgaaaaagtaatgcacctggttcaagagaggttagatgcacacaatggcaaggaaaaagaagcatttaaagacatactttggtttaatgaaaataaaagaatacccatactaactgttaggtgtttcacaggcctttcagctgttcaagctattaaaaaagatgagaatggtaaagaaattggatttgcaaaaacaggtaacaatcatcatatagctttatataaagataatactggaaagcatatacaacatttatgcaccttttggcatgcagtagagcgcaagaaattcaaaatcccttatatcatcaataatacaaatactctttggaatgatttgataaataaagagttacctcaatcctttttggataaacttcctactgataatttggacttacaacttagtatgcaacaaaatgaaatgtttgtattaggattatcgcaagaagaatttgatgaagccatacaacaaaataataaggcattattgagtaaaaatatctatttagtttggagtattggggataatcagtattggtttagacatcatttagagactaaaaactcagaattgaaagtaacaattggtgcaaaagaaagccgaaggttctacttatttaaaagtattggagcatttctatctaaaaacccaattaaagtacgtttgaaccatttaggagaaattactaaagtaggcgaaggccacacgaaagagcaaagatacataagctcagaagtcaatttattattactaaatgaacctacagctatttatcaaactcaaaaccgtttaaaaattttcaattcatttgaagaagccaaacaagacgaaatagactttatcattaaacaatctccaattgataggataaaacatacagtagatttaattttaaaggcttacggttttaatgaggaagacttaagaattagaaaacaaaataacacaataagaataatcaaagcagaatgaacctatttatagaaaaacatcaagagctaatcaataaactattgttacataaagttgattttatagtgataggcggatatgctgttatatttcatggctatgctagaacaaccggagacattgacatttggttaagtccaactaatgacaacaaagttaagttattagaagtatttaagacgatggacttctttgaagcagacctgcagccaattattgatatggattttactggttatttcgttttttctctatgggaagaacccgaaaaagttgattttattaccaaaattaaccttgtagaatttgaagaggcgagtaaaagaaaaataatagtagaagttgacggattaaaaatcccctttctacacctagatgatttagttttatccaaatttaatacaggacgattaaaagacaaagcagatatagaagaattacagcatattcaaagaaataagaagttttaaataatatcgctctcatgattaaaagaacgctccacttctctaatccagcttatttaagtttgcaacaaaatcaactcgctattgacttaccccatttaaaatcattaggagagaaagaatctaagaaaacgattccgatagaagatattggaattattatattggataatcagcaaatcaccattacccatggttgcattgctgcactattagaaaataatgcggccataattacctgcaaccagagccggcaccctacaggcatgatgctcccgattgacgggcataatacgcaaagcgaacgttttcgttatcaaattgatgcatcgcaacccctaaaaaagcaactttggcaacaaacagcacaagcaaaaattctaaaccaggctgctgtgctttttaaccgaaatattccttgcgaaaatatggttcattgggcaaaatcagttcgctcgggcgacccggataattacgaaggaagagctgccgcttattattggaaaaatgttttccctaaaaaaatagatttctttagaggccgggaaggcgaccccccaaataatttactcaattatggctatgcgattttaagggctattgtggctcgtggtttagtttgttctggtctgcttccaacattaggcatccatcatcgaaataaatacaacgcttattgtttagcggatgatattatggaaccttatcgcccctatgtagatgaaattgtgttggggataattgacagaggtgaaaattttttagaactgggtacttccattaaaacacaacttttgggtattgctactgttgatgtacaatttgaaaaaagtaaaagcccgttaatggtcggcttgcaaagcacaacatcatccctggccaaatgttatgagggtaccataagaagaatcaactacccaattatgaaaaattttgatgcaaagaggccaccaaaatttagcctggaagatgatttaattccgattacaacccgtgaaattcctgaaccagataatgatatgcaaagaggcgagttaccattttaattaatgcgtttaaatgaatatcgaattttgtgggtattagtttttttcgatttacctactgaaactaaaaaagaacgaagcattgcttcaaaatttcgtaaggaaattttacgggatggctttgctatgtttcagttttcaatttatttaaggcattgcagcagccgcgaaaatgccgatgtacatattaaccgggttaaaagattattgccggaaaaaggacatatcggtattatgacagttaccgataaacaatttgggatgatggaattattttatggtaaaaaggaaaaagaactaccagatacgccacaacaattagaactgttttagtatttctccgtcttctatgtctacagatacattaagataatgtcattcttaacctgattgggaatcttaaagctaaataagagaattataaactaatatcagctgttctttaatcattactttgcaattacaattaaataaacattagaataaaaatctggccgcaaaagcgaccagatttttttaattctaatttttgagataaatcaatgatatacagataaataaaccacggtatgttgttgtaaatatcagtatctcaaagaatgaaagcaaatcacaacccgaagcctgcggatatgttacttaatttagttgttgtaaatatcagtatctcaaagaatgaaagcaaatcacaacagtgcagaattaattttaatagttgatgatgttgttgtaaatatcagtatctcaaagaatgaaagcaaatcacaacttaaaaacagacgtaatgaattagaagctggttgttgtaaatatcagtatctcaaagaatgaaagcaaatcacaaccccatcagcaaccaagtattagtggcttttgttgttgtaaatatcagtatctcaaagaatgaaagcaaatcacaacagcatagcacccatctactataatgatttgttgttgtaaatatcagtatctcaaagaatgaaagcaaatcacaacagtggtgctgcaactttagctggaaatattgttgttgtaaatatcagtatctcaaagaatgaaagcaaatcacaacaaagaagctgcaagtaaagctaaagctgctgttgttgtaaatatcagtatctcaaagaatgaaagcaaatcacaacagtatgaccagtagctgaaaattttgcatcgttgttgtaaatatcagtatctcaaagaatgaaagcaaatcacaacggagttttatatacatgtgatgctgattgcgttgttgtaaatatcagtatctcaaagaatgaaagcaaatcacaacctgcggttgtgatttgctttcattctttttttgctcctacggcagttggaaactgcataagcgtctacagcaagggcttcaaaaccacccaaacattatcggctaaaattttatcaccttcagctgttggatgaatgccatctggctggtttagttttggaatgcctccaactctatcaagcaagaatgggattaaactcatattatttttctttgccaattcaggaaatatatttttaaaatccgccgcgtacttcgtacccatacttggtggcatttgcatgcctgccatcaccaattttacatcaggatatttcgttttaaccctatcaatgatattttgtaaattcttagtggtttcggctacaggtacaccgcgtaaaccatcattagaaccaagttccaatacaaaaacatctactttctgtttcaaaagccaatctatcctgcccttccctcctgccgatgtttcgccgctcaaacctccatttataaccttataaggcatttttagtgaatcaatcctattttgaattaaggcagggtaagcctccgttgggtcaagacctaaaccagccgttaaacttgttccgaaaaacaagatatttttaacaggttgtgaaacctctttcaccatattttttgctacatctgtaccatcagatttatctttattccctgaatttgagcaggcttgtaatattcctgtcaaaacaattagtgctattaagcgttttcgtaacatatctattttttctgtctcttaaaatcaaaaagccattacctttaacggaaaaaggcgcattatgttttgatgcgttccaaaccaaaatttaaaattttcagccattggaaagcatattgaacatccgaaatgtaagtaaaatttatcaaagcgcagggcgtgaacttactgttttaaacaacattaatttttcaattgatacaggttctactgttgcaataacagggccttcgggaagtggaaaaacaacattacttggtctttgtgcaggtttagacagagccagttcgggtagtgttgaactgagcggtgtggttttagataagctaactgaagatgaaagagcagcagttcgcaatcagtatgtgggttttatatttcaaaatttccagttgttgccaaccttaacagctttagaaaatgtaatggttccacttgagttaagaggtgctaaaaatataaaatcgcatgctttagaattactggataaggtagggcttgcagatagaggtcaccattatcccgtacaattatcaggcggtgaacaacagcgggtttctctagcccgggcattttcaaataggcctgcactgctttttgctgatgaacctacgggaaatcttgatgcagaaacgagtgaaaaaattataaaactcttgtttgatttgaataaagatgcaggaaccacacttgtgattgtaacgcacgaccctgatttagcagcaagaacaaaccgagtgattaaaatgaaaggtggcttaattatagccgacgaaaacccgaattatgtctaacaacccaattccaaaacaaaacgttccaatttcctggttatttaaaatggcctggagggatagtcgcaaaaaccgttcgcgtttatttctctttatatcttccataattttaggtattgctgctttagtggctgtttattcttttaaagataaccttcaaaatgatatcgacaggcaggcaaaagaattaacaggtgctgatttaattgtagaaagccgtaaagctgtaagtaagcaaacccagcaaatgcttaaaactatgggcgatgatcgggcagcagaaagcacttttgcatcgatggtttattttgtaaaaggtggtggaagcaggttggtacaaatgaaggctttagaggggaactatcctttctatggctcaatagaaactacaccagcaagtgcagctaaaagtttttttagtggtagagatgctcttgttgacaaaactttaatgctccagtttaatgcaaaaacaggcgattcgattaatgtaggcgatttgagttttaaaattgcaggtgttttggataaagctcctgggcaaacaggtatttcatcaagcgtagcgcctatcgtttatattccacttaaatacctcgataaaacaggtctagttaaaaccgggagtcgaattaattacaaatattattacaaatttaacagttcgaatgaactgacttcgataataaaacagctccagccaaaactagagaaagaaagcttagatttagataccgttgccgaaagaaaagagcaaaccggaagaagctttggagatttaaatcgctttttagcattaaccggatttattgctttattacttggatgcgttggtgtaggaagtgccattcatgtatatattcaggaaaaattatcagccattgcaaccttaagatgtatgggcttaaaagcctgggatgctttcttgatttatctcatccaggtttctttcattggtatcattgctgctataatcggatcggttctaggcaccttaatacagtttttattacccattgtactaaaagattttcttcctgtagaaattaccatgcaggtttcctggtcggcaattggccagggcttattgcttggtttagttatttctgttttatttgctttgccttcacttttatccgtaagaagaatttctccccttaacgcaattagggcaactttcgaaaacagtacatcgaaaaaaagagatttattaaagggttttgtttatttgttaatgatggccttcattgtgggtttcacctatttgcaaatgaaaacctggctgcaaaccatcgcatttactgcgggaattttaattgctttccttttattaatggccttttctggcattttgatgtttttggtgaagaaacttttgcctgcgtctttaagttatttatggcgacaaggctttgcaaatttatatcgaccaaacaatcaaacgttaatgctcactatgtctatcggattatcaacagcctttatttgtacgctttatttcgtacaaggtattttgataaacagagttaccctttcttcgggcgcttcgcaacctaatatggttttattcgatattcagaacacccaaaaaatagctgttactgatttggcaaaatcttacaaattacctttaatgaaccaggttccggtaattaccatgagaattgaagaaattaatggcaaaaaggcgggtgctgacagtacaaataaaagggctttcagaaatgaaatccgtgccacttatcaggatactttaactgctgcagaaaaaattattgatggaaaatggattgcacaagttaatagcccaaaagatgttgtttacatttctttggatcaaaattttgcccgaagtattaaagtcaaactaaatgataaaattgttttcaatgttcagggtatgctattgccaacggttgtaggcagtttaagagaagttaactggagcaggatgcaaaccaattttcgtgttgtatttccgtcgggagttttagagcaggcgccacaatttcatgtattaatgaccagggtgccaaacagcgaaacatcagcaagttttcagggtgccgtagttcgtaagtttccaaacatctctgtgattgatttgggtttagttttgaaactgctggatgaactgcttggcaaaataagttttgttattcagtttatggcaggttttagcatgataacaggatggattgttttaatatcagctgtgttaacgagtaaaaaccaacgcataaaagaaagcattctgctcagaaccatgggtgcaagcagaaaacaaattcttgctataaacgctatagaatattttttcttaggtttatttgccgcagccgcaggattaattcttgcattaagtggcagctgggcattggcaaagtttagtttcgatgcttcatttattccccctttattaccaacttttttactcttcagcagtgtgattttactggtagtaataacgggtgtattaagcagcagaagtatattaaataaaccaccgctgcaaattttacgaaatgaaggaaattaatgtaattgtttattagcgatgaactctgattggattataagcgataataaattcggaatctgaatgttgagcaccaaaagtattaattggatctttagcaaaaataggtgtttgattcaactcaattttaaccagctctgataacttttgcaaagattctgaagtgatttgagttgaaactgtaggataatatttttgctcaatttctaacttctcagctgcattcgctaaattaagtttccaaccttcatcttttttaaaaccatattcttttgtagcgctgtttattgcataagcgtacatttttgcctgaaattctatttctttattttccatatttttaattaatcaccagcatttgtttggagcaggtgcacttgtttaatccttatgtttaaagaaaatccggtattgaaaagtgattattaaccgctttagcagattttatttctcagtcgggagaacccaaccatctattgatttttccaaatttacttaaaataaacgggagcaggattttaattgagcattaataataaaactatgtttttagggcattcagaatgaaggtaattttataccttgcaacataaaaccaaccaaccttttaccttgcagaataccgccaaacaaaatacaattgctaaaccatttctaaaatgggcaggtggtaaaacacagttaattcctgtaattgagcagtatttacctaaagaaattgaaaagataaatgatttaacttatatcgagccatttattggtagtggtgctattttcttttggtttattcagaaatttaatatcaaaaaagctgtaataaacgatatcaataccgatttgataaatgtttacaaaacaataaaagccaagccagaagaactaatcacgattttgaatgcaattgaatcagattattatggcttaaattttgaagaagaaaaaaggaatttctttctaaacatcagaactaaatttaactttaaaactgatgatataactgaaaattcggcctttttcattttcctaaaccgaacttgctttaatggcttatatcgcgtaaacagtaaaaatttatttaatgttccatttggaaaatatgccagaccgaaaatctccgacccattaaatattttggcaatcagtaagcttttgcaagatattactatactaaacggcgattatactgaaacagtaaaatacattggaaaaaaaagctttttctatttcgatccaccatacaaacccattagtaaaacttcttcctttaatgcttatgccaaaggagaatttggtgatgaacaacaaaacagacttgctgattttacagaattactaacaaaaaaaaagcatttgtggcttttaagtaattctgacccaaaaaatttaaatcctgcagatttattttttgatgatctttatgataaaccatcaaatacaattttaagggttaaagccaagcgaatgataaactccaatgcgcagaaaagaggtgaaataaatgagattttgattatgaattaccaattaacataattaaaacccttgttctttcataaccatatccaactcttgccacttttttcctttcgaaaaatttgctgcatattctgggtttaaattttcaattaatacctgatacatacctagtcttttgattctttttttcaaaattgcgtattccttattttcttcagcaatcatgcctgcataaattacggtaaaccaaatattaatttcttctgtgtgttctgcgtaatcttctgcaattaaatcgataatctttaaaacatcggggttgatggttttatccgtaaacagatagacttttaagaaatcgttatatactttttgatttgaatattgtttgcctatttcctgaatacgcccaaaatattctgtatccaaaggtgcgtaccttttgagcccattttttgttacataaacgcaccaattatcaaagctccctttatcaaattcgataataatatgattatttattgttttaatacatgtggacattccatttaaattgaagtaaataaaaagggacgtaccataaatttaaggattttttttgagattgatagtattattaaccaccaccaccccccgccccctcataaattaggagcgaagtagttaatgcgatggcaaaatctgttttaatttttggattgaatgattttaggcatttcgcttaataagctttatagtattgtccagctacccccttttttcagggagggattagttaatgagtcaacaaaaaaattgttgattttttagagtaagtcgatttgtaaaattgaactgttttggggtggttgatatattactgccctctgctaaggaggatacaaagtgcagatagcgggtttgcaaagcaaaatgaaatactaaatacctctggttggcggtaatttacctccccaatccttccgaaggatgatataaagatagcaaggcagaaacagtaaaattataaatagaaatacctttttgagccatacaatataggtcatatatctccactcgcacatgaattaaaggtgtggtgggcaatagtaccaatttcaagaagggcaactactcttctcctaccaatagagcgtttaagaaaaaaaagagttatcgcgaaactttgtaattaattatataaaacatttctgaaatgatataaagtaagcgtaacatatcatcctaattttacatcattaaattgaaataccctttaaatcatgaagttaaaactaacactattaagtataattatttttgctgcaacgtataaatccaacgctcaacatgaaatgcatatgcctgctaagaaaaattctgttgttaaaagcatggattcgacaatgaagggtatgaaccacgatatgcataacatgaacatgactacaccaatgagccattcctattctttaaatcttccgatgagcagaaatggttctggtacctcatggctaccagatgcatcaccaatgtatgggttgatgattcactcaaagaaatggatgtatatgttacacggaaacatagctctgcgctacactaagcaggatgttggagataaaggaaatcgtggagatgataaatttgatgc

SEQ ID NO: 1706 - DNA, 24056 bp, synthetic construct
  misc_feature 1..24056: note = Synthetic
  source 1..24056: mol_type = other DNA
aatgatttatgaaaataaaattactcctgctatttataacatcaatactatttgtgggctgcgggccagaggcacccgatatttttaacagcatggttaaaaagtttgccaccagcgaaggttacatatcattaaacgagctctctgaactaaaaacatacattgagcaaaacccggatgagcctgatttcagcccttttctgactaatgaaaaggtagacgataataagctggctgcattcttaaaaaagcaaaaatataaactggaaaccccgtataaccctaaaaatgataccgtaaaaatttacatagaaaactcgctaagcatgctgggctatattagcaacaaaggcagcaattttaaaaccagtatacaggaattactttttactgcagatgagtttaaaggctatagcacaaactacataagcgatagcatataccccacatatcctgaaaaactaagtacagatgatataataaatattaaccgtgtttctttttctaaaaatggcgcttcaaacagtaaactcgaagccatatttaaacaggttttgtctgaagcagataaaaatacggtttctatactcgtgtcagactgtatttattctttacagaagggaggttcttcagaattactaaacagcttaaaaaccactacccggcaggcatttaaaaatggaggtgcaaagtataaaaatttcagcatcctgattttaaagctggattcagagttttcaggttcttattttgacagaagggatcacgaatataaaaatgtaaatacaccaaggcctttctacgtagttgtaatgggcgaagacgctgctgtatccaactttaaatcaactactaatataaaatatacaaattcttacaccattaatactaaccaatatgccccataccatactatagtaaataccaacacaggttcaggctttaaaccagaccgtgaatattctgataaaaattcgataaggggcatacaggatatagtagtaaatgaaagggttagcaaaacatttaccttttcggtagccgtagatatgagcagcgtgccggtcgatgaaaatattataaaagaccctaaaagctatagtattacggcaggcaactataaaataaccggtataacggcttataacgataaacaggttaagccggcatctgtaaacctcataaaaaagtcttctaccccacccacccatattgtgcattttgctgccacaaaaccggtatatactaatgtaacattcgggttaaaaagagaaattcccaactgggttacaaacacccatacggtaaacgacactatacccgcgcaattcagtaataatacaacttttggctttaaatacctggtagaaggtataaacgaggccattaacaaaaacacatctaacaattactttactataaccataacaattaactaataaacctatggccagtttttttgaaatgctttacgagggattccctccgttaaacctcttttatatcaatggattttccaatgatatgtttagtgccgatgcctatacgtctataggcctcatgatgctgttttcggcacttatcatggaaggtttatactattttgtattgtctaattacggcaaaatgcaccggcgcagtttttggtttttatggctgtttataattgcggtactaaactttgtactggcatacataaacagtatgtcgtcattaacaaaagtaggtacaggaagcgactataccttttcacaatacttttctttttctatggtaaatgtattatgggcagtagtttttagcttcatattttcggtaatcttcaaattctggagcgtttctgcttcaaggactcccttttaattatggcaaaattatacatattcggaataggcggcacaggctcaagggttatcaaggcccttaccatgctgctggcaacaggtgtagacataaacggctttgaagttgtacctgtaattattgaccctgatgaagcaaatggcgatgtatcgcgcactacagatatacttaaaaactaccagcacatacacaataacctgagctttacaggtgccgatgacaataaattttttaaaaccaaaataagtagtatttgccaaaactttaagttggtgttaagtgaggttaaaggcgaacgttttaaagactatatagaatataacagccttgatgaaaacaataaggcccttataagtcttttatttagcgaagataaccttgaggcagatatggaggtaggctttaaaggcaaccctaacataggcagcgtggtgctaaaccagtttaagcaatcgcaggactttaaggcgtttgcatcgtcttttgcgcaaaacgaccgcatatttattatcagttctatttttggcggaaccggcgcatcagggtttccgctactgcttaaaaacatccgtaatgccgatgcttcattaccttcggctgcgctgctgcgcgatgcccctgtgggtgcaattaccctcctgccctattttggcgtttcgccaagcgaagaaagtaaaatcgataagtcatcttttatttctaaaacaaaggctgcactgtcttattatgaagaaaacgtaagcggcaacagctcgcttaatgcattgtattatgccggagatgacattaccaaagaccaccctaaccatgagggggcagcatttcaaaaaaacgatgcccatttcttagaactggcagcagcactggctattatagatttttcggctatcccagcaacagcgctggttactacaggaggcaaagccgaaaatccggtttacaaagagtttggcataaaagataatgccccttccatcatatttgaaaaccttggttttacatcgcagttcatacttaaaaagccacttacacaatacctgttttttgcgctgtactgcaccagtaaaatgcaggattgtccggaaagagcctgggcaaaaaaaataaatcttcaggcatttttaacccaaccctttgtacacagttacctcaggacatttaaccagtattttttagaatggcttacagaaatgggtaataaccaacgtgggttttcgccctttaaccttaacgctaacgacaataacctttttgaaatagttaagggtataaaacctgatagcggcatatttgagctcaataaaaactacaataagtatgatcatatgcttgacaaagtagagaaaagcctaaagaataatgattctcagcagcagcgttttatgaaccttttttataacactaccgaaaccctggtttcagaaaagtataaattttaagcactatggcaaaagtatttagatttcatgacggaggcagtttagaagactggcaaacatctgcctcatacgggcaaactgctataaatgcaattaaagatccttcgggcgcatctgcacgcagggaaataacctctattcccagtccttttgcgcgcatagacctggttaaaaccgcgtttgaaaacataaccaacagcagtcagttaaacggtaccactatttttcataaaatggtatcagactgttttgatgtaggagagatttttttcaatatagataagctacaggataaagtaaatatcattgcctgggataaaaacaaagaccttgaggcactgctacagtcgccaaatgcgcgccacaggcttttaggagacactttaaaattatatttagagcaggatgcccgggcatataactttaacgaaaccgagcaaatttatctcttaaactacaaagccgggccacggcctataaacattatagggggcacatcgccggccagcctgttttttacaccggcaaataacttaaaatatgtaaacattccttttggaaccgattatgtgtttgatgacagctaccaacccctgtacaaacgcgatttttattaccagaagtttatttacggtttaaaaaagtttatacctgatttttcaagaaaattcagggcggttgataattatttagatgccagttttgagatgcttactgctcagcaaaaagaagaaataaataattatactacggcagattttgaatctgattttgaaaaacttaccgcaggcagtgccggcacacctgttgaaattttagggtatccgctacgcaaaaagaaagaagcagcccctaaagcaagcggttttataattggttctgcaaaatataagggcgaaaatccacctttagtgctgcccgtagatgcctatgccgaaaaaacgctgtacacgtctgattattgggacaggaacaacaaagccgattatatagataaccgccctttaaaagagcgaacattgccctttgatggcaagaaatatccgtatttaaccataagcgattttcttgaaccctacattatacgcacaatttatccgcttcaaaataagaagttttttgacggaagttttacaatggcatcgggtgaaatagccaagggctatctcttacctgtaaaaagagaatactttgactattttgatgtagataaacttaccaggggcatgccggacggtaaaaaagccattgaaataaaacaaatggtaagtggcggcgtggctgttacactaagggtacctatacaggataataagtatattacctatgaacggatgtattatccgcctgcaaacgaataccaaattgccgagccagaactgccccgcaaccgtggcgccgttatagaaaaccagtttggccttacagtatatccttttttaaaactcgctgccgacagtaacaaccattaccgtattgcactttttgaccgtgatatacaagaacataataaacataacagctacagcctgcagttttttaaaaaccaggacaatatacaggcaccacacaaagcactgaaacaaagaagtgaaaaggcggtagataacatagcttcatcttattatgtactggaagaagggtttgactatattgaaattaaaaacaactgggcccgtggcataatcataccgctttttgaaaccccggttcagggaacctctcaatttacatttgctgtagattttggtactacaaacactcatattgagtaccgtaaagataatggcaatgcaaggccttttgaaattaacagggaagatatacaaattgcaaccctgcacgataccgcaaattctgaaacccttaaatctataaatgcgctaagggctaacaaactgctggatgtaatacctcacgaattcgtacccgaaattatacagaaagagactgaaataagttttccgcaaagaaccgctatcagttctaaaaagggaacagatttgagcaataccgtatatgcattttctgatttcaatattccgtttctttatgaaaagcacattacgccacgcaatacagatataaaaacaaaccttaagtggtctggtatacaaacaaatgacggtttaaaagtagtagaagcttattttgaaaatctcttgttattaatgaggaataaagtgctgttaaacaacggcgacctgtctttaacaaaacttatatggctctacccatcgagcatgacagatgcccgccgtaataaaatagggcaaagctgggataagctttttaaaaaatatttcaattctgcacctgccccggaaaagctttctgaaagcgtggcaccgttttactatttcaataaaaaagaaggcattgttgccggcgaaaactcagttatatctattgatataggtggcgaaactacagataccgttatttatattaatgacaggccagagcttttaacatctttcaggtttgcggcaaattctatttttggagattacaccggcaggtcatcttcaattaacggttttgtaaacaaatacagccagataattgaagaaaaagggctgtctaactggttttcatttaaagatatcgaaaaatcagaagatattatatcatacctgttttcaattgaaaaaagcgaccgccttaaggcagaaggaaaagacttttcatttaacagcctcttgcttaatgaccatgatttcaggattgttttcatccttttttacagcgctgttatttaccatatagccatgttaatggtagcaaaaaatataaaagcccccggatgtataacattaagtggtactggctctaaaatggtagaccttgcagaaggcaatactaaacttaccgctattaaagagctaacagaactgatttttaagaaagtctacaaccttgaaaaaagcataaatattgacttgaaaaaagttgccaaccctaaagaaataagctgtataggtgcgctgcttgtggatgagaaagatatttctgtaaataacgtaactactttttcaggaactatagatcatccattttcattaaagtataatgatattacaccaaaccttgaaaagcaggtagccgacggttatttagaatttttaaactttttcttcgggcttaataatgaattcagctttaaaaataagctcgatattaatcctgcatttcttgcaaagtataaaggttttctggaagaaaaagtacttgataacataaaatcaggtattaaagaaaaaataaaagaactacagggaaacagtaatgaagaaatagaggaaacactgttcttttatcctttaaaaggggggctcaatcatttggcacataaaatttattctgaactaaataattccgaagcataatatgaatacactgtcatacgattttaatttttggtttattccgttatatattttcatcatcttgttttcaatagctgtgatcattttgtttaaaaggctttttgctttaatggatgaggtagacaagaatacagaatacagaaaaaataacacctcaaaaagcacatcacaaaaccccaacccggtaaaccttgaccccatattgcaacggctaaaccagctcgaagctactccccgtcaacctgttgcaaatacgcaatcagcaacaccttcggtttatgctgatgaaacaacgcacactgttaacctaaccgtcaataacccggttacagatgttgttttttatgtttcaacgcctaaccccgccggtttttttgatgcagaccaggtttctgattcctttaggcaaacggtatcgttgtataagtttacaataaacagccaggcccaaaacacggcagcttttgagttcttttcagaccagattggaacaaatgactcaataaacagcccaaaaacctttatagaaccggcctgttatgaaactaacgacgctttttccggagccagtaaaataataacactacagccgggcaccgccgaaaaaagggataataaatggataattacttctaaagctaaaattacatatcaatagtcatgcataataccataataatactggtaatacttatagtagttggtttccaggcttatgtagcctatactgcctggaaaaaaatagatttttatcagggcatcattccacagccggaaaattttcaaactataaaagtatatatacccgaaagccaggttaaaaacatcgatatcaattatgttttaaacaaccctgataagtttggcccgcctgctgtatttgccttaagcgaaaccattactgaacctgaaattatcaacgagccagccatagctattgtaactacagaaacaaaccaaacaggccatgaagaatatgtatgggtagctaaagataatgaggaaaagaaaattaagtatacacttttacaaagccatgaacaggccggctggaacagaatataacccacataatcatgcaggaaaaatacatagaagttacactcataaaaacagcactgtctaaccccgtattagataaaatgctaagttctgtaaatacatacctactgcgtaataaaggcgccgtaagcgattttaaccttattaaagatgttgtagaacgtaatacagatgcagtagacgaagaaattaattctctattgcccataccgctctatttagggcttatgggcactatgataggtatagttataggcctttttgccatgccgggcattagcgatactaattttgaaaatgctattgatatgctcatcggcggggtaaaaattgccatgatagccagttttatcggcttattgctaacagtagtgttgtcaggatataagtataaaggaacaaaactatatgccgaaggccttaaaaatgacttttttacctggatacaaacccaattactgcctgtactgtcacaaaacatatcttcaagtatttatgcattacaggcaaacctgctaaagtttaacgataccttctcggcaaacgtgggtagctttaatggcgtaatgaataaaatactgcattcttttgatagccagataaacctgatgaatgagcttaaggaagttgatgtagtgcagctggcaaaacttaatgtgcatgtatttcaggaactaagggtaagtacaaaagaatttgaaaaatttaaccagtatttaaaccagctcaatgtttttgttgacaatgcacataagctaaaccactctataaacaaccagttagacaggacgtatgatttagaaaaagttgccggagcaataggtacgggtatagaaacaaataagttacttataaatgttttacaatctgatttaaaagaaataagcgaccgtaaacaattaatgaaagatgccgtaatagatgtagacaaagcctttgaaaaaagccttgacgacttaaaaaggcatataaatgagcaaattacagccataaaaaatattacaataaaagaagaagacctgcttgaaaaattgcttaaagaagaccgtggcaacctgaacgaactaaaaaaactgggcgaactgaaaaccgggatgtcaatactggaaaaggaaacaaaatcgcaaaacgaaaagctggaacagttaaacaaaaccctcgagaatttagccggtatattagcaaaaccggcagctcctgtagtaaaagtgccggaagttataaaatatgcggcttatgtttttgtaggttcaggggctatacttggcgtaggctattgtttctggaccatctataaaatcctgtcatagccatgtctaaaaaaacaaattttttctgggccagttatgccgatttaatgaccagcctgttctttataatgcttgtactgtttgtactttcaatagccatgatgaaaaggcaacaggcagcaacagagcagcaattacgcaaaattatagaaatacaatcggccgtaaaagagcttccaaaagagtattttgcttatgatggtatttacaaacgtttttccctaaaacaaaatgttgagtttattattaatactgaccaatttaaaaatattcaggatgaaaattaccttataaaggtgggtaattctattaaaagccttaccgatacgttaaaaaagaaatataccggccaggatataaggtatgtagttttaatagaaggaatgtcgagcgctgatacttataaaaacaactacctgctaagctatgcccgtgcatgggcggtaaaaaagttatgggacaaaaataacattaaactcgacccttctgtttgcgaaatacaaatatcaggctcgggtaccggcggtgtgggcaggcttattaacgacaggagcaaccagcggattttaattcaggtaattcctaaaattggtactattgagtaatataatgtttaaatactgctattatgcttaagcacccggttatatgcttactggcactattatttttaagctgtacagatgcaccccaaagccctgacccggaaaataccgaagtatacctgtgcgacagccctgctgcctacagctatcactttaacccaaattgtaaggggctgcaacaatgtaaacacaatatttataaaacaagcctaaaaactgcaaaaaagcatggccgtagtttttgtggctgggaagctaatgatactatcgcccgttaatatgggcgatttttttttgcataaaaaaagggcgatcctttcgaaccaccctgaatgttttcacaacagaataatctttattgtgaatcgctttcaaaattgtattacaatattacaaaaaactttttgtctaaaaatgaggtttgccgcatttatgaaatatttttttgtagtattttaacatactttttaaaaaaatacaaccacgatatatttaagaaatcctcaaccatgaaaacaatacttggattagatttaggcgttacaagcataggctgggccgttatagttacagatgacgacaatacaccaataaaaatactgggtatgggcagccgcattataccactctctactgccgataaggaagaatttcaaaaaggccaggccatttctaaaaaccagtcgcgcaccatagcccgcacacaacgcaaaggttataaccgcaaacagctgcgcaaagaagaacttaaaaaaatactgggcgaacttggtataacgccttctaaagagttgcttaacctgccgtcaattgaattgtggaagctgcgtgccgatgcggcatcgggcaatgcaccgttatctgccgaacagttgggccgcattttttatatgcttaaccaaaagaggggttacaaatcggcccgcagcgaggccaaccaggataaaaaagatactgattatgtagctgccgtaaaaggcaggcaccagcaactaaaagaaaaagggcaaaccataggccagcatttttataccgaaatgctaacccttgaagaaaattcggggcattttcaggtaaaaaacaatgtgtatccccgcgaagcttatctggaagaatttaatgccataatcgccgcacaaaaaccacaacatgcattcctgacggacgatgtggtagacaggcttagggatgaggttatcttttatcagcgaaagctaaaatcgcaaaaaggccttgtaagcatttgcgaatttgaaggttttgaacgcactttttttgataacgttaaacaaaaggacaaaaccatctttaccgggccaaaggttgcgcctaagtcctctcccctattccagctttgtaaaatatgggaaacagtaaacaacataaacctgaaagttaaaaataccgatggttctaaaaacaaatgggcagactatgtaccaacgttagagcaaaagcaggaaattattgagcatttgtttaaaaatgcgggaataagtttagatgcgctccgtaaaatacttggctttaataaagatgagatttttgtaaacaagcagatagaaaaaggcctacagggcaatactacctatgccgaaattcataagatattgggcgacagtaaacctgaattattaggttttaacatcaatattgagccatctaagcatagtgccctgcttgtagataagcgtaccggagaaattttagccgaaaaagaagggcaacaggttagtgcagaaatagaaaaggaaaatttttatcagctatggcataccatttattctattaaagatcttgatgaatgtgcagcagcattgataaagcgctttaatattgacccaaatgtagcagcccagcttgctaaaatagactttagcaaaggggcttttggcaacaagagcaataaagccatgcgcaaaatattgccttaccttatgcaaggatataactatgccgatgcctgtagccttgcaggttataatcattctgacagccagactaaaaaagaaaaggaagaaaacgtagttgatgacaaactaaagctgttggaaaaaaacagcctcaggcaacctgtagttgaaaagataattaaccagatgattcatgtggttaatgctattatagataaatatggaaagcctgatgaaataagggtagaacttgcgcgtgaccttaaaaagagtaaagacgagcgcaatgaagccgaactgcaaaatgcttctaataaaaagcttaatgaagaagtagccaacaggctaaaagagctgggcttgcctgttacaaaacgatttgtgcaaaaatataagtttatattcccggtaagggatagaaaaattaaagaagcacagttggttaaccagtgtatttattgtggtgaaacatttaacgttaccgaagcattaagcggcgataattttgatgttgaccacattattccaaagtctatgttgtttgatgattctcaaaccaacaaagttttggtacaccgcaagtgtaatgccaaagacaaaagcaacaaaaccgcttatgactttattgccgccaaaggcgaaaatgaattagctatctatcttgaccgcgttgatgactggtttaaaagaggggtgttgtcttatggaaaaatgcagcgcctaaaggtatcttatgagcaatatgctgaacggaagcagctaaaaaaagaaacggaagctgatataaagttatgggaaaactttattgagcgtgatttgcgccaaacacaatacattgcaaaaaaatcaaaagacctgctgaagaaaatatgcaacaacgttacagtaactgaaggtaaaattacggctcagcttcgcaacttatgggggtgggatgatgtgctcatgaacctgcaattaccaaaatataaagcactaggccaaactgagattaaagaatggacaagtgagcatgggcgcaggctacacaaaaaagaagaaattacaaattggacaaaacgcgatgaccatcgccatcatgctatagatgcccttgtagttgcctgtaccaaacaaggttttatacaacgtatcaatacccttaattcgagcgatactaaagatgctatggatagggaaatcaaagctgccaaagaaaaatacaatgagctctacgacaaaaaattattaactgaaacaaacgaacaggttaaaaaccataccgaacgatttaataaactcgaaacgtacctgaaatctcaacagccacctttatttactacaaggtatgtagagcaggaggccgataaaatatttgtttcttttaaggcaggcaaaaaagccgctacatacggtatcaggaaaattaaaaaagacggtaaaaaggttgtggtacaagaaaagattgtggtaccaaggggtgcgctacacgagcaatcagtttacggtaaaataaaaacacaggagaaagacaaaccgttaaaatacctttttgaaaatcccgaaactattgttgataatcgaataaagatattagtaaaggaacgtttagataaatttgaaggagatgtaaaaaaagcattgacatcactaaaaaaagagcctttatttattgataatgaaaagaatactttattagaaaaggcagcatgctatactgatgccactgtcctaaaatataaattacaggcactcaaagccaatcaggtaaatgatattgttgatgaaggtgttaaacggatagtgaaagcccggttagcacagcataagaacgaaaaagaagcctttaaagacaccgtttggtttaaccaagaaaaacgcataccgatagtttcagtgcgtgtatttgcacgccctgacgcctctaagcttgcaataataaaaacagatgaaaacaataagccaataggttttgcccttacaggaaacaatcaccatatagctatttataaagataacacaggtaaattagtacaacatatatgtacattttggagtgctgttgagcgtaaaaaatttggtgtgcctacagttgtaaaaaataccggtacgctttggtctgaactattgcataaagacttacccggaacttttcttgataaattacctcaagatgggcttgaacttgaatacagccttcaacaaaatgaaatgtttgtattagggctacctaaagaatcttttgaagatgctattaaaaacaatgatttaccattattaagcaaacatttgtacctggtttggagtatttctgataatgattattggtttaggcatcatcttgaaacaaaaaatagtgaacttaaaagtaccaccggagctaaagagtctaaaagatattatagatttcaaagtgttggtactttcacaaaagaaaatcccataaaggtacagcttaatcatcttggtgaaataactaaaattggtgagccatgataaagcgcacgttgttttttggtaatcctgcttatctcaatacaaaaaatgagcagctggtggttagctttcccgaagaagacaaaccaccggttaccattccaattgaggacttgggttatatagttttagaacatcctcaaattacaataactaacggtttgtttacaaaacttgtagaaaataaaactgctgtgataacgtgtgataaacaacatttacccaacgctttcctgcaaccactatcaggccatagcgaacaaaccgagcgctacaggcatcagctaaatgcgagtgttccacttaagaaaaatatgtggcagcaaacagttagttctaaaatatgcaaccaggcactacatttatcaagccgggataaagaatcacgaaaaataatgcgttggtctggcgaagtgaaaagtggcgatgcagaaaatcacgaagctattgcggcagcgtattattttcaaaatctttttgaccacttagagggctttagtcgcaatcaaaagggagttgcacccaataatttattaaattatggatatgcaattttaagggcaataacagcccgtgcgcttgtaagcaccggattattgccatcagtaggaatatttcatagtaataaatataatgcctattgccttgcagatgatataatggagccttatcgcatttttgtagatgctttagtatataatataactcagagggaacatagttttgaagaactatcacaacaattaaaagccgagctactcaccatccctgcacttaatgtaactattgaagggaaacaaagtccattaatggtagcaatgagccgcactacaaatagcgtttatgagtgttatgccggtgtaagcagaaaaatactttatccggtatttgatcttagttaacataatcgctatgaaacccgattattattcaagattaaacgaatataggaatatgtgggtacttgttttttttgatttgcctactgaaaccaaaaccgaacgtaaagcagcttccaggtttcggaaagatttgttagatgacggttttacaatgtttcagttttccatatatctaagattttgtgcaagtcgcgaaaacgcagatgtacatactaagcgggtaaagcgggttttacctaaacaaggtaaagtaggaattatgcaaataacagataaacaatttggtatgatggaaatattttatgctcaaaaagaaatagtaaaagatactccagggcaacaactagaactgttctaaaataaaaaaacaaccccaaatcaatacttatcaaagcctttttattagatttttttcatcctaagattgaacgtagatttcaggataccagcattttaaagctggtatcctgtgaatcatctactaagatacaattttgaaagctattcacaacagagcagcaacaggggcaattcgatgaaaccctgtgaatcatctactaagatacaattttgaaagctattcacaacaaggcttgaccgtttaatatttggttttgcctgtgaatcatctactaagatacaattttgaaagctattcacaactggcagtcactgctcatgttatggacttgacctgtgaatcatctactaagatacaattttgaaagctattcacaacccaacacatccaaaaaggttcataaacagacctgtgaatcatctactaagatacaattttgaaagctattcacaacaacacccagtaaaggttaaattggtctgtgcctgtgaatcatctactaagatacaattttgaaagctattcacaacagcatctgcaacatcagtaaaacttttcctcctgtgaatcatctactaagatacaattttgaaagctattcacaacctctcgcttaaaatctcgtttagcttttcccctgtgaatcatctactaagatacaattttgaaagctattcacaactatcaatgaatgtaaatcagtcatactattcctgtgaatcatctactaagatacaattttgaaagctattcacaacagtgggaattgccggtatatgcctctgcttcctgtgaatcatctactaagatacaattttgaaagctattcacaacccggtgtagtgccttagcaatatatacttacctgtgaatcatctactaagatacaattttgaaagctattcacaacaaggctgattaataagagagccgggctgcacctgtgaatcatctactaagatacaattttgaaagctattcacaacggcaaacgcagggtttacaggaggtgtatgcctgtgaatcatctactaagatacaattttgaaagctattcacaacgtaaggcgtgatttgtctatgttaatggaccctgtgaatcatctactaagatacaattttgaaagctattcacaacaaagatttataaatctttttaatgccttctcctgtgaatcatctactaagatacaattttgaaagctattcacaactataagtgtggcacctgttaaagagtttgcctgtgaatcatctactaagatacaattttgaaagctattcacaactaattataaatatacccccggcctcttcaacctgtgaatcatctactaagatacaattttgaaagctattcacaacccgggggacctgcctaactttgatgcgtttcctgtgaatcatctactaagatacaattttgaaagctattcacaactgaaaaagcggaggcggtagaaccgattaccctgtgaatcatctactaagatacaattttgaaagctattcacaacaggaaaaccacccattaaaatatccgccccctgtgaatcatctactaagatacaattttgaaagctattcacaacacaggctctacggcctcgcttgccatatcgcctgtgaatcatctactaagatacaattttgaaagctattcacaactagcaaaacgaaatcctgctatgtttttacctgtgaatcatctactaagatacaattttgaaagctattcacaacatacgcttcttcgcgtctgcaccttctccccctgtgaatcatctactaagatacaattttgaaagctattcacaacctatgcaaagcgaccttttgccgtcatgtacctgtgaatcatctactaagatacaattttgaaagctattcacaactacaagtgtactgttgtagctgtctgcctcctgtgaatcatctactaagatacaattttgaaagctattcacaacgctattacccctataattattgaggctttccctgtgaatcatctactaagatacaattttgaaagctattcacaacttagtatttctaccccctttagtagcccggcctgtgaatcatctactaagatacaattttgaaagctattcacaacttaagcaggcggaaaccataaacaagctaccctgtgaatcatctactaagatacaattttgaaagctattcacaacttagacacttattgcatccggggttaacgcctgtgaatcatctactaagatacaattttgaaagctattcacaactcagtgttagagggtaaagcaaatgttacccctgtgaatcatctactaagatacaattttgaaagctattcacaacttgtaacttttcattatagattgggcatttcctgtgaatcatcccttgccttatcaaacaatcttaacctaaattcaggcagtgttcagccgatgtatttccccagtattattatttgagtaattaatatttatcttttgtctgtatttcgtctttccaatgatggtctttaggaaaagattgcccactccatgcttttacactcgtcaagtccatagcggcatcagcccaaaaaggatgcgccgccggtaagcccagtggcataaaggaaagcgaagtcatgtagaggctgccattattagtataccagtcggcaatgttgggttggctacctacaaaacctattgtaaggtatccttttttattaaaattatccgatccatcaaacatacggtgcataacggctgtgagcgccgccctcgcctggccgtttgtaatcccttcaggcagacgcccatattgcgccattagggcaaggggctgcatacaggccatacggtaaggtatagatctgccaaaaaccggaaaagtgccttcgggtgaaataaaccgttcaagaataagcgcatacttttgcgcgcgccttagttcacggtcgtaatatttttcatagtcaatgcgtgtgcccgcaccggcatctttcattgcctggcaggtttcaagatacatagggtgaaaaacaaagctactgtaatagtcaaagctaaatgaaggcccgtcggcataccagccatcgcccacataccattcttctactttacgtatagctgagttaatacgaaattcgtcatgttcggcgccggcctttgccaaaaatgcctcaatagtagatgaaaagagtaaccagttagtataaggcgggtcaatgcggcgcaattgctgaaactcggctatatagcagttcttagtttcttcatcaagaggtacccagagtgcatcatacccacgaaggaaactttcggcaatgtatgcagcatctaccagcgcctgcccgtggccgcgccataacaaataatcagggctgttagggtctacagcatttttataactttttagtgcccattggcgcagctgcctgcgtttagctccttcttttgtattatcatcgggcaatgccagccatggcgctatacccgccattagcctgccaaaagcttccatatacaccacacggttatcgcgcccatcataagacgcgcttacctctacaagcatatttgcacgcagcgtgccttcagacatgttactaagtaccggggccgccattttgtaggcaagttcagaccagtacgccctgtctttgctgctttcattattcgcttcgaggtagcgcacatattcgcaggcagctaaaaggaatgcccctactccaaaatttgctgtagatgctgcatttactacctggccgggaatggctttttcacctatgggctgaacataccctattttaccattcttttgcagtgcagtacctttaaggtacctccatgaacgttcaattaccggcacatatgttgcctggtccaggtaattattgtttattccccaaagtatagcatatgtaaaaaatgcagtaccacttgtttcggggccgggtgcatgttcagtatccatcatactccttgtccagtagccctgtggctgctgtaattgagccactgctgcagccatcttctgaaatttttggacaaagaaatcacggtgcttataatcggcaggtaaatctttaataactttagcaaggccagccagaacccagccatcgccacgggcccagaaatctttcttgccgtttacacttttatgcttcggataaacatatttggcatcgcggtaatacaggttttcatctgcatcaaacataatactgtctgcatacgacagatattcaaataatttatcaaggtattgtctattgtttgttatcttatacatcttggtcattaccggcattaccatatacaacccatcgctccaccaccagtaatcattattacctgtggccatttggtattccataacttctttagcccttgctattttatgcggttccggcaacaggttgtataagtctgcatagacctggaaacagatttgataatcgccaaaaagcacatattcatcgctctctccgtatgaatacttccattgttgtttatcgttgctttttgcccccatccactgattatgattagcccaggcttcagaataggcgcggtatttttcattaccggtaagcatataggcttctatatttccggtatgataggctgcgttatcccaaaagcttcttgtttctgcaacgttttgcgattgccagtatgtattaaccctgtcaattattttccgcacctgttccgggttatccgattgtgcagatactctattaaatagtaaaacaaacaggataaataaaaatcggagtgtgataggatttggtttgctcattatagctgtgtatgttggaaagtttttcgtaaacatacaaaaaacctcttaaggaaatggtttcatttaacttatggcaatacattgcctatatagccgtctgccgtcgccatttatgtaaataatttcctacattacaggaagatatataaaaacaaaaacctgcaaacttttagtttgcaggttttacaggctttaaagatattttatagttattgctttattaatgtatgttgtatggcacgctgcccatcagcctgaatgctgattatatatgttcccgaagcaagtgcagaagtatctaagataacctcggccgaagattgctttaactgtaccgtttgcagcggaactccgagtaaattaaatagtgttatagactctgccttagcaaaagtagtccctaaatcatacttaacaacagtgtaatcttttgcaggattaggcatagttgtcatttctgctggtgtagcaagtaacctggctgtgctgttattattaatttttgggaaatttataggaacttcagtataacatccatccatttgtataattagataatcacttccgccgttaaacgtggcattaggtgtaaaagtaaatgatacaggcactgtactaccagccgctacaaatacagatggaggcgaataaataccataattattaaagcttgaaatagttacattagcagtaggtgcagtgccgctaacaaatgtaccggttacctggtatatgccgttaacaacactaacattcaggtttcctaaaaccccaataccgcattttggatattcgcaaccttctgatggtactatggttagtatttcactttcataagtacagccgtcattaaccaccactaactgataattaccaatctggtcaatgggctggttttgtatgcccatgttggccccttgtgtagcgggctggccgtttacaagccatgtgtaagcatcaaccactcctaaaggtgcaagtatgtatggggccggcaatgcatccaggcacctgctaaagaagcctcccgcaaaatcccacgaaaaagaatgcggcacggtaatgcctgccgatgcattgcaggcacctccctcattaacaactgttacctggtaagcgcctcctgttgttacaattattgagtttccggtatcgccattactccagttgtaagtgccaccattaaccgaatttgttacattgattttaacctggtaaggttcacaacttacaatattataggttagcaccggttgtggtgacggtgcaaaaacttcaaccactattatagccatattagtgcaacctgccccattagcatatcttacctcaagggcatattgataagttccggcggataaattgcccggtactgtaaaagataagtttgccggtgttgcagttgcccagaccccctgtggccctgttaccggattggtatttaaaagccatcttacttgtaggttattgccggaaacactgccctgtaaaatagttgtttgcccctggcatatactgctgtttcctgttattcccacaacaggctgcggtataatggttaccgatgcatttccgttaccggcataactacagccgccctgacctcctaacctaacccagtatgttcctgtagtagttggattaaaataaggaacatttgtattggctactacctggttaccattcaaccatgtgaatgttgatggcactgcactacctgtagccggagtatattttatttctgcaagcccccccggagtacaggctaaagcgggtgtagcgcttagcgttccgttaaactgctggctgtttacgtttacatttaccgcattactacttatgctgcaaccgtatggtgtagttgcctgaagcgtaatgagcacctgtccgttacctgtaacatttacaacagttgaagctccggttgcattgtatatactgcttccaaaatgccacgagtactggtaagcagcattataattaggtatggtaagcgttaatggctcctgcgggcagtaattgaggtcggccaggttgaagttcaggttaggcaatggtgccagtacaatggttttacttattgagcaggcctgcatgccgggtgcatttacagttagggtataggtataagaaccaggtgcaagattgtttacagtaacgctttgccctgttgtgggtggaaggttggggccactaaatgtgtaggttgcattttgcgcattaaatacagtagaattattgagcaacgtaacgttataagtatggtttgttcctgaattacaggctgtagtagtataaaaatcaggtgtatattttttctctaccataatactcttttgcactacgcaaagcccgcttgaggtttgaaatgttacttttactgttataatatgcatacccggtacatcggttgcaaaataggcataatttgtaccctggctgctcagccctatgtgctggctgccaatccattctacatttatagctgttccacctgtaaaactcacttcagcaagatacttttcgcattcagcccaatgcccggttaatgttacagttggagatggcgagcaaggctcacccggcccattgccacaatcttcagttactgtaaccggttgcgatgtagctacacaaccattaacatctgtaacttccacataatattcgccgccggggttagcccctgtaatggtatatgccgctgcgccagatcctacagccgcattatttttataccacttgtaagatacgggctggctaataccactgccactgtttgaatataatgttaacgattgatatgtacccgggcatactataaatgaacccggggtaatggtaatttccttttccggataaatggcaatagtatctgtagcccttaccggtgtacagccattagtggttgttacacttgctgtaatagcataatttatatttactggcgtggtacctgcagctactacataagggttaggaaatgtataaatacccgaagcattaacaggtgtaacggtggtagttccatttccaaaatcccagttaacgctaccggtagttattcccggtgtagacaggtttacggttaactcagcatcattattgcacaaagaagccggtgcgctgaggcttataacaggccgcggcacaagcgttatgggtatgtttacaacggtatcaggattacatttctttacgcgtagtgtaagcgtacccccggtttggtttgcggctatttcattccagtttactgttactgtagtagcatttgcgccagatacaatgttaccaaagccctgcggagatatactccactcaagaaaatcaggtgtaatgccacccaggtttaccgaaaaagaagattgtgtaccggggcaaaataccgtagacccgctgctacttgttactaccggattaataaccaaacggctaacatttagatttaatggagccgaaagacagcctaaagccccagtagagcgcctgcgcacactaaccgtatagttagatgcatttgcattaaactgcacagttactgagttacctgtagtggcgccaataatggtaccgttaacaacagaccattctaaaactgaacccgtatctgtattaataaaactgtactggtaaggctgccctgcacataccttttccggcccgctaataacaccggtgggtgccggtggggttctctctacagttataagctttttagcagggcaatatgcggctgacgaggctgttagttcatatatgccggggctggaaaaaggatttgtaaaagttggcccggttgacgaggctataatagcggaatcttttcttaaaacccattgaacgctgcctacacttgatgtgtaagagcctaaaggattaccactgcaaaaagcggcggcacccaaaatatcaattgtttttttaatttgtatggtaa

SEQ ID NO: 1707 - DNA, 23960 bp, synthetic construct
  source 1..23960: mol_type = other DNA
  misc_feature 1..23960: note = Synthetic
gaattcagttttaaaagacaaagtaaaaattacaaaattcaaatattaataggagtttttaaattttaggggagacgtttgggcatgttttttaaaaaagttgttaaaatgggatggttgctcaaatcccagcgtatatccaatctcagcgatatcccagttggtatatttcaaaaggtttttagattcctcaaacattttttctttaataatctgcgtggtagtaaggttggttaccgattttacagaagaattcagatgattcacatgaacgttcagatggcgggcaaaatcagcaggtgttctcagtaccagcgggtatgccggtgaatccagcgggaactgtttgttgagtaattcatcaaacaatctgtacagtcttacattagctggcagttcacttgggttgacatcttcaacccggttttccagggccagatgcagcacggaagccagatggcttttgatactgttgcagcgatacggatacgcagaattattcattttataaatctggtcaaaataaagggtggccagctgtgtttgttcttccgttaagaatactacaggcttactccattctttaaataatgaagttttcttaaataggttaaattccgaattcccgttgaaaaactcctgattaaaaagacaaaaatacccttcctgaaaatcactctcacactcccacgagtatggtatgctgggagaaggaaaaaataaagcgggacggtcgatgtacaattgatgaactccatagtgtatggttcctttccctatgataaagcttattttataataatcacgacggttgtaagggcttttaaaactgcagtatttgcgcatagaaatattgaaatgagactttcccgtttcaaattcctctgaatcaaataccatactcttatcctttctgagacgtctgtaataatcttcgatggtttccagctgatcactcatacttttgaaattgtaaaaatcaaagatacaaaatgtggagaatatagtaaataaatggggcggaagacggaagtactatccggtataagatttctgctattgattaaaaattttgatgaaacagtttgcaaagactagcacaatatgtttgttttttaacctgattacctttcctgctcccagccttagtattttaattccttttgattgatttcccttttttaccctttattcaaatccattattaagatgtgtgacggcagttgaaacggacctgcctggctatctgatacagcagtgaaacccatttcttttaaaaattccaaaagaggatcatgagacagcatattgatccacagtacatccgtgaaacttactgcagacctgcattttttccacagagaatcccttgtttcaggagaatcgaatccgggaaggatcacgaaactgatttctgtagacctcttaccttcctgaattcccggatataccgaaccacttttaataatgctgtatcccacaggttgctgatctgcatatgtcatgataagttgattggaaagatcatttaaatcgttgatcatctttctgggatctatcccgtttttatattttttgatgtcttcttctgaaacaaagtctttgtgtaaagcatataccgaagaatcaagaatggttataagatcagaaattccctcttcagaacccactgtaaattttgaaatgatatccatgaattttttttaccaaaattagaagattaatcgattcataaagggtacagttggtaaaaatatgatcggtacagaaatctattttgtaaatttgcccggtacagatgactgcattatcatgaaaccatataaatacgaaatttttacaaagagtattgaagaacagataaggaatggtcttttacagccaggggatcgtttgccgtccgtcagagaaattaaagaaaggtatcaattgagtacaagctctgtacaaagcggttttgaatatctgatgatcacaggtcttgctgaaagccgtttacgatcaggttactttgtgccacaaaggaaagaagaaaatattccggagaccaggacgatgcttcctgtagtagtgagagatgaggtatttatgaaaaatatgctgctgacatcccgaagaacttccgaaccggcttcttttaatacgacaatgccgggagaccttttggttccacaaaaattgatactgaggacgatgcaggaggtaattcgtaagaaaggggccgcacttctgagatattatccttccgacggatccggggcattacgaaaacaaatttcaaaacaaatgagaatgcatggatgcctcctgaatccggatgaaataatcattacagacggagctttgcaggcactcactattgcgctgagatctgtgacaaaagcaggggatgtagttgcggtagacagtccgtgtgtgttttccgttctggaagttattgccaatcttgggcttaaagtaattgaaattcctgtacattacaggacaggttttgatacagactatttccggaaggcttgtagcgagcataatattaaagcgcttgcagtaacccccaattttcataatcctacgggaatcctgatgaaggatgaaacaaaaaaggaaatagtaaatatagcggaaacacatgaagtatgtattatagaaaatgatatgtattccgatctttattttgaagggaagaggccgagttgtatcaaaagctttgataccagcggaattgtgatgatgtattcttcattttcaaaaactttggcaccggggatccgattgggatggctgtatgccggtaatttttattcaaaatctgaaagagccagatttattctcggacgttcggtgtctccggtttatcaggaactcattcttagtcttttagaaaaaaacagttatgaaaggcatttgcggtcttttcggaaaaaactgaatcatcaggccgttgtggttctagactgtctgaggaagttttttcctgaagaagcttactttcaccggccgcagggaggatataacatctggggccaacttccggaaaagaccgatatgaaaaagttttatcattattgtgaaaataacagtatcatgtttactcccggaaatacattttcgccgaccagcagatacagtcatcattttagggttgtttttgcagaaagaattacccctgaaaacttatttcttttggaaaatgcaggaaagaaggtgaaagaatttttcactcataaataaacacttctttcagtgggttagggtgaaatgtaatcggttaatctgctgcctttcagaatattaatttaattgatgagaaaaacccggtgaaacatcgtatttcccgggaaattcagattttatttcaaaagttaaattcaatgtcggaacggtaaaccaaatttcaccaattatcatattttttttcagcacaattaggctggaatcaccataaaacctatatttgcagcctaaatttttaaataaatgaaagaactaattgaaaaaatcaacgcagaatttgaagcgttcacaactgaggcaaaccaacaagcggaaaaagggaacaaggcagctggtacaagagctcgtaaatcagctttagaactaagcaaattgttcaaagaattcagaaaagtttctgtagaagaagctaaaaaataattcacctttagccggcttttgaagccggtttttttatacccttgggtaacgcggtatcatagctgtaaggtctttcattcagcaatatctgacctcttgttttattcaaatattaaattttctattgcagaaagctaagctcctgtataatttgtattttagaaatatcaattacacagaatatgctgaaacattcttaccttctctttctcttttttttgaacttcttttcggcacaaaaacttttagtggtggacgctgaaaataacaaaccgatttccaatgccagggttcttctgcaacatcaactcgtttataccaatgaagacggttatgtagcggtggagccaggttcggccaacttcgaaatttcagcttcaggatttcaaaaggtgaaaattcgtgaatttcattccccggtacagctgaaacgggtatataaaaatattgatgaagtaaaaatggtaaaagtagacctcgaaaaactacttcaggatgttcataataattataaaaagaggtattataatgagccttccctatatgatgttctttataaagaaaaaagaagtgataacaaccagctccatcttttagtgattgccgaagcgaaattatggaacaggactaatttttacgatcgtaataaatcttttgataagaatctccaaatgcagctgaataatgtcaaatactttaaaaacctaaagtcagacagtatttttacacagaaaataaagaggttttccgacgaatatatgggaaattatttttttaattttgaattaagccgaacactggcccatgtaaaaaataagggatcaaaatcttccgcctggatgttttttaaagagggagatgaacaatttattacatttaaaatctagtcaggattgggaatcgatcttgcaggagaaatgaagtatcatgcaactgataaggtgatcacctattttgagattcattatttgcaggaccagtatcctatggtcaaaagaagaacaggagaaggtgaagaatttgattaccagatgggaaatgccatacttgtttttgatttttataaaaacggaggagtgtatgttcctgccatgagcagtcttgaagggaataaatacgttgcttactacaaaggagtgaagcatgaacggaagatcagcagagaacttatctatactacttttaaaagatcagatacaaaaggactgaaccctaaagtagattttacaaaagatatctgggataatgtttcggtcagtgagaataagaataatacggttttactttccgtggaagagcaggcttttatcagcaggccatcacctgattttaggccaaaataaaagcaattttagaggaaataatattaatgtgttgctttttttaggaaataatttaatttttttagctaaaagtctttaaaatatagtgtttaagggcttttttgatgtaattcctttatcatctcggtaatttctgttatctttaaaccaatcaatatatactatgaagataaatagattttttgcagtaccggctgtagtgttggctgcacagttttcatgggctcaggtaaaggtagatccgtcagaaaaacttgatcctgtcgtgaaaagctttgtggatgaaatcaataacaattcccaacttgaaaatatggcttatgagctgttggatggggtaggtccgcgtcttgtaggaactccggaaatgttggctgccaatgaatggagtgcagagaagcttcgttcatggggtgtggaagctaatcttcagcaattcggaacctggaaaggatggcaaagaggaacaacccatgtagacatggtctatccaagagtaaaatccctgacggccacacagctggcatggagcccggctactaaaaaagccattgaaggagaagtggttatcctgcctaaagtatctacaaaggcggaatttgacaaatggcttccttctgtaaagggaaaaatagtactgatggcacaataccagaaggtcggacgttctgatgagcagattaaagaatttgcaactccggaattatacgaaaagctgaaagccgaaaaagagcaggccacaaaagattttgcagcatatgtaaaaaatatcggctacgataataacagccttccggaagccctggaaaaagcgggagccgcaggaattgccatttcaaactggaccggaataatgggagccaacaggatctttggagcaaaaacctcaaaaatcccgatggttgatattgatgtagaagactacggaatgctttacaggatggcagaaaaaggagctcagcctaagattaaaattgacgctcaatcaaaaatacttcccgatgccaaaagttttaatactattggtatgatcaaaggaaaagaaaaaccggatgaatatgttatcctttccgctcaccttgattcgtgggacggagcacagggcgccactgataacggaacaggaacgcttacgatgcttgaagcgatgagacttctgaaaaaatattatccgaacaataaaagaacgattgtgataggactctggggaagtgaagagcaaggcctgaacggttccagaggttttgttgcagataatcctcaaattatcaaaggagtacaggcagccttcaaccaggataacggaacaggccgtgttgtgaatatcagcggacaaggatttgtaaaagcatacgattacatcggaaaatggctggaaggggtacctaaaactgtgagaggacacattaagacagatttcccgggaatgcctggtggaggagggtcggaccatgcctcatttgtagcagcaggagtacccggattttctttaggctctttaaattggggatatttcggttacacatggcatacgacgaaagatacctatgataagattatttttgatgaagtaaaaaataatgtggttttaaccgctgcccttgcatatatggcttccgaagatcctgagtttacaaacagagagaaaagaaccatgccaaaagatgagaaatggccggaagccaaagaaccgagaagaagctccaaagaatataaataaacaaatatttaataagaatagtaaaaaggtcgcctcaatggtggcctttttttgtattgatacctggatggatttgaaatattttttgtgaatgtcaaataattggtttccagtgtttgatgtttgataaatgactatttttaaaaaataataacgaatcaaaaataaaactatcatgaaacatttaaaaaaaattaaaagagaggatttaaaatcagtgaatggaggtgttggagaaagacagtgtagaataggagaacttttatgttatacagagcagtgtgttcttgtatgcatggacggatcgcaatgtcagccttctttctgtattgattagtagtttttagttttttaaatcggataaagtaaaaggctgcccgcagaggcagccgtttactattatggcagctaattaaatacaggtttccaggtccgggaattttgaaattgaaggggtgtatccttcattgtccagcttcccaaaaccgtatctacagaagataaacggaagatcattagcggcagcagaatcatgatccgtttgggtatccccgatatagacggaattttccggcaacaggtggtttctctccatgataagtttgatgttttcagcctttttcttttgagtccgtccgtgagactcaaaatctacaaatacttcattgaattggtaatgctctaaaaaggactcaatatatccatcctggcaattgcttacgataaaaagcttgtacgtttctgataatttctttagcgtgttttcgacaccgctatataaagttccaccttttacacgtaatattttattttcctgagcaacgatctcagaaagaatttcctgaacttctgcatcgctgattcccgtgatcatatcttttacaatatctttcgccaataatcccatatacggatccatatcctcaggtttcaggtctttttgtataagctggtgtctctgtaacacgtcattccagattgaaataattgtcaatcgcggatcccataacgttccgtctaagtcaaaaattaagtttttgtatttcaaaggttgtattttactgattatattaaattggtgaaggtatggtgtttttacagaatcatactcagttgaactctttttctggcttcatccacttctgtaacttttacccttacatgttggtgaagttttaccacttcattcacatcagagacaaacccgtctttcaattgggaaatatgcaccaagccactttctttgattcccagatctacaaaacatccgaatgcggtaatattattaacaattcccggaagtatcatgccggctttaaggtctttgatgctttttacattaggatcaaattcaaaaactttagccgcttttctgggatctaatccaggtttttcaagttcttttaagatatctttgatgcctaagattccgatctcttctgtgatataattttcagcctttatttgagcgattttttccttattggcaataagttcatccgttttaatacctagattttttgccattttttcaacaattccataggcttccgggtgtaccgcagaattatccaacggattttttgcatttgagattcttacaaaagctgctgcctgttgaaaagctttttctcccagtcttggaacttttttcaattgttttcggtcttcgaaagccccgttttcagcacgataattgacaatgttttcagccatcttctctccgattcctgaaacatagcttaataatgatttactcgctgtatttaaattgattcctactgagttcacacatttcatgaccgttgagtccagttcatttttcagaagggtctggtccacatcatgctggtactgacctacgcctatagatttgggatcaatctttaccaattctgccagcggatcagaaagacgtcttccgatagatacggcaccacgcaccgtcacatcatatgaagggaattcgtcccttgcaattttacttgcggaataaaccgatgctccggcctcagagactacgaaaacctgtaatggcttatcaaaagctattttcttgataaaaaattcagtttcacggcttgcagtaccgtttccgatagaaattgcttcaatattgtaagcgttgaccatcgaacggatttttttcattgccatgccgctctcgttctgaggggcatgagggtagagggtctcgttatgaagtaaatctcccttttcatcaaggcaaactactttacatccgcttctgtatccgggatcaatagccagaattcttttttcacccaaaggaggagctaacagaagctgaccaagattttcagaaaatatttcgatagctttctggtctgctttttctttcgcttcctgcaaagcctcattggaaatagcaggttctaaaagccttttatagctgtcttttatggctaatgcaatctgttcggaactttcgttattggacttgataatcgctttttcaataaaatcgatggcttcttctttgtcaattcccacattggttttcacaaaaccttccgattccgctctcagcatcgccaaaagcctgtgagaaggtgttctgctgaggttttcttcccattcaaaatattgggaaaatttctgggcgtcatcttcttcttttttagcctttaccaccttagaggtgatgacagctttgcgttgaaatatgcggcgcaggtttttacgcacatacatattttcgttgatccattcagccataatatctctggcaccctgcagtgcttcctcttctgaagaaacgtcttgattcaggtattttgacgccagaaacaataggtcattgtttttttggctcataatgattctggctaaaggttcaagtcctttttccttggctgcatcagcttttgttttcttgcgttttttgaaaggaaggtagaggtcttccaattcctgtatatcaaagctttcctgaattctttgtcggagttccggtgttaaagccttctgttcatcaatggattttaagatcgattcttttcttttgacaatttcctcaaactgtttgctgatttttgaaatctgctcgatctgggtttcgtcaagatttcctgttttgtccttacgataacgggaaataaaaggaatagtgcagtcttctgctaataattgtaacgtattgttgatgctcttttcagaaatattgagctgcttctgtataaattctacggtcgtcattgttctgttttcggaaggctaaaataggattttaaaacgaaaaaggcgagttgccccgccttgaatgttttcacaacggaataatccttattgtgaattgcttttcaaaattattgttacaaatatagaagaaaaaaatctggaagtcattatgggaatccgtaattcggatattttttttatttctaattttatgtggtatcaaaaattaataatgatgattaaaaatatacttggattagacttaggaaccaactctattggctgggctttgattgaagttgatgaaaacaatattcctattcgcattattgcaatgggttccagaataattcctttgtcaacaagtgataaagaagaatttcaaagaggcttatcaattactaaaaatcaaaatagaacagtaagtcgtacccaaaggaaagggtatgatagaaaacagctaaggagaagtgatttaaagaaaattctgaaaaaatacaatatttttccatcagaagagttgttgaaacttccaatgcttgatttatggaaattaagaagtgactctgccaatcctaatgaggatatttccgcagaacaattaggacgtattctatatatgctgaatcagaaaagaggttataagtctgccagaagtgaagctaattcagataaaaaagataccgattatgttcaagcagtaaaagggcgttatgctcaactgaaagatagaagacaaaccattggacaatacttttatgaagagctttctactgctttttcagacaaaaataatcagcagtattttagagttaaagaagaggtttatccaagggaagcttatatagaagagtttgatactataattaatgctcaaaaagataagcacggttttcttacagataaagtaattcaccaattaagaaatgaaatcatttattttcaaaggaagttgaagtctcagaaaggattagtgagtatctgtgaacttgaaggctttgagaaaactgtttatgacaaggaaaaaaataaaaataaagtggtatttgttgggccgaaggttgctcctaaaacatctccattgtttcagctttgccgaatttgggaagtagtcaatacaattagcttaaaaataaaaaatccggaaggaagcaaatataaatggggtgaaaaagtcccaaatttaaaacagaaagaaattttagcagattatttatttaaaaatgaaaatttaagctttagtacacttctcgaaattttagaactaaaaaaagaagatgtatatgtgaataagcaaatccttaagggtattaaaggaaatgaagcatatgcagctcttcataatgttttaggagatcacgaacttttgaattttgatgtttctataattacttcagaccatactgcaatattggtggataagaagacgggtgaaattcttgaagaaagagccggtcttgaacttgatgcatcattggaaagagaaccattgtatcaattttggcatactatttattctctgaaggatttagacgaatgtaaaaatgccttaattaaaagattcggtcttgatgaagacattgccgaaaagttatcccatattgattttaataagcaggcttttggaagcaaatcgaataaatcgatgaggaaaattcttccttttctgatggaaggctataattattctgaatcctgcagtttggcaggctataatcactctaattctttaacaaaagatgaaagagaatcgcaaattactttggaaagattagaacttcttcctaaaaataatttaaggcagcctattgttgagaaaattctgaatcagatgattaatgtagttaatacaattcttgagaaatatggaaagccatctgaaattagagttgaacttgccagggaacttaaacaaagtaaagatgaacgaaatgataccgatttacaaaattccaggaataaaaaactgaatgaagaaataggcaaaagactggctgaattaggactgcctgtaaccaaacggtatattcaaaaatataaattcatatttccatctcttagtaaaaatctgaaagatgctcacgttaataatcaatgcatttattgtggagaaacctttaatttaacggaagctttgaatggggatgcttatgatgtggatcatattgtaccgaaagctttattgtttgatgactcacagaccaacaaagttcttgttcatcgaaaatgtaactctacaaaaacaaatcagactgcatatgattacattactgcaaaaggcgaagaagaagttagaatatattcagaaagagtggatgactggttcaaaaaaggaattatttcttacagtaaaatgcaaagattgaaagtttcacacaaagaatatcttgaaaggaaaaaacttggaaaggaaacagaaacagataaaaaactttgggaaaactttatcgacagacaattgagagatacccaatatatttctcgtaaatcaagggaaattttacaaaaagtatgtaataatgtaaccacaacagaaggtggagttactgcaaagcttcgtaatttatggggttgggatgatattttgatgaatctacaaatgcctaaatacaaagaattaggacaaacaatcaccaaagaatggacaagtgagcatggaaaaagaaaacatcaaaaggaagaaatagaaaactggactaaaagagatgatcatcgtcatcatgccattgatgctttggtagtagcctgtactaagcaaggttttattcaacgaataaatactttaaattcaagcgagacaaaagatttgatgattaaagaagtggaagaagctaaaatagaatttaatgaaaagactacacttttagaaaaatatttaaagactcagaagccttttactacacgggaagtaatgaaagaggctgacaaaattttaatttcttttaaagcaggtaaaaaagtagcaacaataactaagtttaaagcaacgggtaaaaataaagaaacaggtgtgattgttccaagaggtgctttacacgaacaatctgtttacgggaaaataaaagtgattgaaaaagataagcctttaaaatatttgtttgaaaacccagataaaattgtcaattccagaattagagatcttgttgaaacaaggctttctgaaaatgaaaataattctaaaaaggctttatcaacagtaaagaaaaatccaattttttttaacgaagaaaaaaatgaaattttggaaaaggcatcttgttacaacgatgcaacagtactgaaatataaattgcaaaatcttaaagcaaatcaggttgatgatattgttgatgaaagagtgaaatttttggtaaaagaaagacttactcaatttggaagtaaagaaaaagaagctttcaaggacattctttggtttaatcaagaaaaacaaattccgattataacagttcgtttgtttgcccgtcctgatgctaataatttacagataattaagaaagataaaaatggtaaagatattggttttgttttaactgggaacaatcatcatattgccatttatgaagataaagatagtaagctggttcagcacagttgtgcattttggcatgcagtagaaagaaagaaatataatatacctgctgttattaaaaattcagcagatgtttggagtctgttattagataaagaacttccggttttatttttggataaattacctgctgatgaacttaatttaaaattcagtatgcagcaaaatgaaatgtttattttgggattatctcaagagggatttgatgaagccataaaaaataatgataaatccttattgagtaaacatttgtatttggtttggagtatttctaataatgattattatttcaggcatcatttggaaacaaagaatacggaattgaaaaatatcccaacagcaaaagattcgaaaagatattttagatttaaaagtgttggtgcattagttggaattaatccaataaaagtaagattgaatcatttaggagaaattaccaaaataggagaataataattatgatcacccgctcaatctacatcggcaatccggctcatcttaaacttaaagatgaacagatgtatattttggaaccttccactaaagaaatgaaaggtaaagttccagtggaagatttgggattactgatgttggaccacttccaaattactatttcacatcagttaattcagaaaatgatgggaaataatgtagtagtggtaagttgtgacggtcatcatttaccccatggaattatgcttccgctttatggacatacagaacattccgaccgaattaaagatcaattagaagccagtgaacccctcaagaaacaactttggaaacagactgttgaatgtaaaattgaaaatcaaaaagaggttttaaaacgcctaggaaatttttatgaaccgatgagcgattaccagaataatgtgaaaagtggagatattactaatatggaagggattgctgcacagcattactggaagcatcttattagtctagattttttgagacagcgttttggagattcacccaatcagttttttaatttcggatattcggttttgagaagtattgtggcaagagcgattgttgagacaggattacttcctgttctcggaattttccataagaataaatacaatccttactgtctggccgatgacctgatggaaccttatcgtccttttgttgatttattagtcatgcaatggctggctggtaattcagaaactgaagaattaactaaagaatttaaagctttcattttacagattgcgactaaagatgtgaaaatagatgataaaatcagaccattattgattgcagtaaaaacaacagccatgtctctatataaatgctatacaggtgaaaaacgattgatctcttatcctaaattgatatgaatgccgaaaggtttaatgcttatcgaattatgtgggttttagtattatacgatttgccaacagaaactaaagctaacatgaaagatgcgaaccggtttcgtaaatctttgcttgatgatggttttacgttatttcagttttcaatgtatgtaaggcattgtccaagtcgtgaaaatgctgaggttcatattaaaagagtgaaatttatgcttccaaaagctggaaaagttgctattatgtgtattacggataaacaatttggagatattgaaatattttttgccagaaataaagaagaacctcctccaacttttcaacagcttgaattattctaaatttaaaatcctaaaaaacaaaaacaatctactgattttcagtggattgttttttgaggctgtgactaatcacgaagataataatttttgaaagcaattcacaactggcttttcaatactgaagaaccggaacaagctgtgactaatcacgaagataataatttttgaaagcaattcacaacccgagttccttagcttcattgctgcgggcagctgtgactaatcacgaagataataatttttgaaagcaattcacaactagcacctgtctcatgatatacagttgcaagctgtgactaatcacgaagataataatttttgaaagcaattcacaaccgtataatatatatattcatctagcccatcgctgtgactaatcacgaagataataatttttgaaagcaattcacaacaccattatatgttttgaaatcaaaagccccgctgtgactaatcacgaagataataatttttgaaagcaattcacaactatttcctaaaggcggccagcaagtcacaggctgtgactaatcacgaagataataatttttgaaagcaattcacaacagtgggagagcattaaaagtactggcgagtgctgtgactaatcacgaagataataatttttgaaagcaattcacaaccgcgctgccccctaacgtacggcgttcgtggctgtgactaatcacgaagataataatttttgaaagcaattcacaacatatagaattgagttgtatcgtttattacggctgtgactaatcacgaagataataatttttgaaagcaattcacaactgaacaacgaaggtaagcaatcacagttcggctgtgactaatcacgaagataataatttttgaaagcaattcacaacaccccaacgctttaagggaaattttgcctggctgtgactaatcacgaagataataatttttgaaagcaattcacaacgtacgccgggtgctacttcataaaagctacgctgtgactaatcacgaagataataatttttgaaagcaattcacaaccatgcggcgaaacaaatctgtctacagcgtgctgtgactaatcacgaagataataatttttgaaagcaattcacaacgttcgaagcatggaaggcgaaacgaagaacgctgtgactaatcacgaagataataatttttgaaagcaattcacaacctaaaagctcatgagttccggtctggatgagctgtgactaatcacgaagataataatttttgaaagcaattcacaacaagtccacgttgggacaaaatatcgaatttgctgtgactaatcacgaagataataatttttgaaagcaattcacaactggagtgctgtttgctcaaaatggatattcgctgtgactaatcacgaagataataatttttgaaagcaattcacaactgaaggtagcaactccttatgttgtctttagctgtgactaatcacgaagataataatttttgaaagcaattcacaacatgctgattaaccaaactgcaataccttttgctgtgactaatcacgaagataataatttttgaaagcaattcacaacatgaaattatatcagatacgtcacaggtaagctgtgactaatcacgaagataataatttttgaaagcaattcacaacgaaacagcccaatgtccccaaggtgtaattgctgtgactaatcacgaagataataatttttgaaagcaattcacaaccaagagatagctaatgccttggaagtgtctgctgtgactaatcacgaagataataatttttgaaagcaattcacaacagtgatgtggtatttaaatgctgtagtcacgctgtgactaatcacgaagataataatttttgaaagcaattcacaacaacaaaaagaattgaggctgaaaaaacaatgctgtgactaatcacgaagataataatttttgaaagcaattcacaacaaaaacgcttaattcgactagataacgatagctgtgactaatcacgaagataataatttttgaaagcaattcacaacatacaatgccatctaattggaagcaatattgctgtgactaatcacgaagataataatttttgaaagcaattcacaacgttgcgattaaggtagaaatgatgactaatgctgtgactaatcacgaagataataatttttgaaagcaattcacaacgaagtcaatccagatcgaatccgatctcgtgctgtgactaatcacgaagataataatttttgaaagcaattcacaacgttgcggctgaattagcacgcgtgaacctagctgtgactaatcacgaagataataatttttgaaagcaattcacaacgcattagaaaatgaaatcgataatgttatggctgtgactaatcacgaagataataatttttgaaagcaattcacaacccatattatccaacaggcgcaggcgatggtgctgtgactaatcacgaagataataatttttgaaagcaattcacaacagaaaagcaaagcagataggagagatgcgtgctgtgactaatcacgaagataataatttttgaaagcaattcacaacagtagtttctattttccagaaaataggtttgctgtgactaatcacgaagataataatttttgaaagcaattcacaacagtagtttctattttccagaaaataggtttgctgtgactaatcacgaagataataatttttgaaagcaattcacaacggaaatctgtgatatttaccaacttccaaagctgtgactaatcacgaagataataatttttgaaagcaattcacaacggtcgacggtataatgagagatttagaaatgctgtgactaatcacgaagataataatttttgaaagcaattcacaacccccttcttcaactatacatttgattacctgctgtgactaatcacgaagataataatttttgaaagcaattcacaacttatcagacgattctgtaagcattaaaatggctgtgactaatcacgaagataataaatttttgaaaatgatataagattctaagtatcacattatttttattcataagttcaaataaactgtcttatcgcatttcttgatatatgataagatgtcaataataatgtttttctatttttgtaaccgaaaacaacaaagatttcaacaaacttatttaaacagttcaatatgaaaaaaattagcgtaattgcattggtagcagtaggattactggcagtatcatgtaacaataaagaaaaaacaaccgatacagcagtagctactgaacagtctgttgctgaaggaaaaggagaagcattagcagtagatacggtaacttctgtagtaaactggaaagctttccacaaaggaggttttgcacctcgttggggtaccttaaacataaaatcaggcgacctgaatattgaaggtgggcagcttgtagcaggaagctttactatagatatgacttctattaaagttgatccggcttccgtaactgaaaaagacaaaaaaccggctgaccttgaaacacaccttaaaagtgcagatttctttgcagtggataaaaatccggtgtcagactttaaaattacaagcgtagcagatgtaaaagatgcacctaaagatgctgtagcaggagctaataaaacaatcagcggaaacctgacattattaggaaaaacaatgaatgtttctttccctgcaaaagtaaatgttacagatgcttcggccgatattcaggctaagtttaccgtaaacagagctgattggggaattaaattcggtacatctgaagctgatcctgcagaatggatgatcagtaaagatatcgaaattgctatcgatgtgaaagcaaaaaaataattgaagattactttcaatactcataaagctgccttgagaaaggcggcttttttgtggtatttatttaactttttttagcattttattgtacagcacggcatcatattttctcttttaaccctataacaccaaaagataatattatgtcaaaaaaaattgcaattcttgcgacaaacggtttcgaggaaagtgagcttcaatctccaaaagaatatctggagcaacagggatggacggcagacattgtaagcccggaatccggtactattaaagcctgggctgaaaaagactggggaaaagaatataatgttgacagaacattgagtgacgttaaggcttcagattatgacgcgttggtgcttcccgggggtgttcttaatcctgataagttgaggactgatgatcaggcgctttcctttgttaaggatttctttgtacaaaataagccggttgcggctatctgtcatggaccacagatcctgatcaacgctgaagtggtgaatggtaggaatatgacctccgtacattcaatcagcaaagatttaatgaacgccggagctcattgggaagataaagaagttgtcgtagacaacggattggtaacgagcagaaccccaaaagatcttcctgcttttaatgctaaaatggtggaagaattcaaggaaggaaaacatgtagaacaagggatatagttcacattaaaaattggaaagcccggaattattgattccgggctttttttattgtgttgaaaaattcatttaaaaattgttggactaattaaacagccatgaattctggatgcgcctgcaatactcacttcccagatataaaggattaccatgcttttcagaccagaagccatccagtatatctttacttaaacatctgtagacagcaactcctttataaactttttgatcatcaccttcataattgaagttgagaactaatatctgatctttataaaatccggtaccgtgttgcacatgatcaccaataatccattgggcaacgacgcggttgttttcatcaacagataataataatataccttcgtaagaagtatcgttagattcctcctgattgctccctttgatagaataggttccggccagatcttgtactgtcattgcttatatttttaagatggcaaatgtaaaaaatcttcagctgatgatggaataaatcttcccggggctttctgtttttaaattaagctctatttttgcaggaaataattttagaatgatcccttttttgttaataatcaatatgattgcatttggtgcctttggatttgataaatggcaggcccgaaaacatcaatggcggatttctgaaaatatgctcttgggaatatcgctgtttggcggaataataggagcggcttcagggatgatcttttttaaccataaaatctccaagaaatctttcctgacgaaatttattatagtcacattgattgatttggtattgctgtaccgtttaataagacattgataaaaggacatgaacctctgtcgaacagcttgtttattgttaaatgaactattctttggaattattttaaaaataggatgaatttgggatactcacacaaggtgttgtcttatatttttttagtgcagtaaaaatagaattatctaaaattctcattatgaaattgttaaatattgcataaactttttaattaattcatttaaaatcactatttttgcacccgtaaaaatcctatatgcaaaacattagaaatattgcgattatcgcacacgttgaccacggaaaaacaactttggttgacaagatcatccacgctaccaacattttcagagaaaatcaggagagtggggaattaattatggataacaatgatcttgagagagaaagagggatcacgattttatccaagaatatttctgttacttataaagacacaaaaattaacgtaatcgatactcctggtcacgccgattttggtggagaagtagaaagagtattgaaaatggctgacggagttattctgttggtggacgcgttcgaaggaccaatgccacaaacaagattcgtgcttcagaaagcgttggaattaggtttaagaccattagttgttattaataaagttgacaaaccaaactgccgtcctgatgaagttcatgaccaggtatttgatctgttcttcaaccttgatgcaactgaagaacaattggatttcccaacattctacggttcttccaaacaaggttggttcaacacttcattagagcagactgaagatattttaccattattagatggaattttacaatatgttccggctccgaaagtaactgaaggaaatcttcagatgcagattacttcacttgattactcttctttcttaggaagaattgctatcggaaaagtaacaagaggagagatcaaagaatctcaatggatcggtcttgctcaggcagacggtaaagtagtaaaaggaaaagtaaaagaactttacgttttcgaaggtttaggaaagaaaaaagtaactgaagtacaagccggagatatctgtgctgtagttggtttcgattctttccagatcggtgattctttcgtagatcttgaaaatcctgaaccattggagagaaccgctattgatgagcctactcttaacatgacattctcaatcaacaattctcctttctttggtaaagatggtaaatacgttacttctaaccaccttaaggaaagattaactaaagaattagagaaaaaccttgccttaagagttcagcaaaccgatgacgccaatacattccttgtattcggtagaggtattcttcacttatctgttttaattgaaacgatgagaagagaaggatatgaaatgacaattggtcagcctcaggttatcctaagagaaattgacggggtaagctgtgagccttacgaatctttagtggttgacgttccggaagaatatgcttcaagagtaatcgacctggcaactcagagaaaaggtgaccttcacattatggaaactaaaggcgaaatgcagcacatggaattcgaaattccttcaagaggtttgatcggattacgttctcaaatgttgacagctaccgcaggagaagctattatggctcaccgtttcacagaatataagcctttcaaaggagctattccgggaagaaataacggagtactgatcagcaaaactcagggacctgctacagaatattctattgctaaattacaggacagaggtaagttcttcgttgatccgggtgaggaaatctatgcagggatgattatcggtgaacaaaacaaaccgggagatctggtagtaaacatcgtagaagcaaaacagctgaacaacatgagagcttcaggaaaagataaagatacaggtgttgctccgaaaatcttattctctcttgaagaatgtatggaatatatccaaggtgatgaagcgattgaggtaactccaaactttatcagaatgagaaagaaacttctttctgaagaagaaagaaaaagagtggaaagatctgcaaaagcataataacattctaacagataaaatcaaagcctcgatttttcgaggctttttttctgataccttgaaaaaaatgtttattttttcaacaaaattttccaaataataaaatataatttaaagtagttttgcggctatgaaaatgaataaattaaaacttatcgttttattaggagtttttgcgtcttacagtacctcatgttctgtccagaacaatactaccaagactcctcctgttaaaaatacaactaaacccaacaacaatacttctcagcctaaacctcctgtagccactacaaaacctactcccgtcacaccgccaacggctgcagatgaaatgttcagaacaaatcttcctgagatcaaaagagaattccgcggtgcctggatcgccagtgtagccaacatcaactggccgtcaagaaacgaccttacggtagatcagcaaaaagcagaagccattgctatgcttgatatgctgaaaaataacaatttcaatgcagctattttccagatcagaccctcggcagatgctctatatacaagtaatatcgaaccatggtcttactttttaacaggagaaacaggaacagctccttaccctaattatgatcctcttcagttttggattgacgaatcccacaaaagaggattggaacttcacgtatggctgaatccttaccgtgctcatcacaccaacggaggatccgtaaacagtctttcaatggccaataagctgtctgatatcgtggtaaggttaaaaaacggaatgtactggtttgatccggctaatcctaaaacacaaggccacgtttccaatgtggtaaaagatattgtacagagatatgatatcgatgccatccattttgacgattatttttacccttacgcaacttataacaaaggggcagattttcctgacaacgcaacctggaatgcctatgtgagcagcggtggaaacttatcaagagctgactggagaagagacaatgtgaataaatttgtagaaagaatttataaagaaatccatgctgaaaaaagccacgttaagttcgggatcagcccgtttggaatctggaaaccggggtaccctgcaggaattgtaggatcttctcagtttgatgagctgtatgctgatgctaaattatggctgaataaaggatgggtagactatttctcaccacagctatactggccgattgactctaaaggacagggctttgaatctctgcttagttggtggcagtctgaaaatactatgaacagacatttatggccaggcctgaatacggttgagatcaaagtgtccgatcgtcctgccgaaattaaaaatcagatcgaaatttccagaaatatcctgaaaaaagat

SEQ ID NO: 1708 - DNA, 23921 bp, synthetic construct
  source 1..23921: mol_type = other DNA
  misc_feature 1..23921: note = Synthetic
caagccgtaaatatcctgcaattatttttaataatacaggtcgtgaagccggagaccagattttacaagtggagaatttaggtaaaagcggaaacgatggcattttattcgacaaagttacttttatggtgaacaaaggcgataaaattgctgtgctttctcaaaacagcttagctactgccgcattttacgatgtgctaacaggtcgcgatactgatcataaaggagaatttaaatggggtgttaccatcagtacagctgatattcctaatgataattctgaatatttctctggtaaggatgaaaacctggttgattggttacgtgaatactcaggcacagatgctgatgagcaatttgtacgtagctttttagggcgtatgttattctcgggagaagaagttttgaaaaatgttaaagtactttccggaggcgagaaaatgcgttgcatgttctccagaatgatgttgcaacaagccaatttattaatgtttgatgagcctaccaatcacctggatctggaatctatcgaggcactaaacaatggtatgaaagattttaaaggaacaattttatttacctcacgagatcaccagttaacagaaaccgttgcaaacagaattatcgaaattacacccaaaggcaccattgataagttaatgacttacgatgaatacattaacaaccccgatgttgctaaacttcgtgaggaaatgtatgcttaagatttaaagcgcttcctttttaaagagcattattgcctggccaatgaaaaattggccaggcaatgttattttgtatccgcactaggcataacggggatttgttttagcaaaaggcataacacaccaacgtcatttccgcgcaggcggaaatcttaaagctttcgctatagggcctaaaaacaatcattttacaacaagtttcatacatgaatcgtcattgcgaggaggaacgacgaagcaatctacttaccattgtaattccaattgcagcattggaaagattgcttcactccagcgcacataccttttcttcagttcgcaatgacgggagtctcaacaaagtttatcttaaactttaatggcatgcaaatccgaatggtgttgcataagcttcaacggcctcctatccttccatcatttcctataacctagaatgcgtaacagggatttgttttacgcaaggagcatagtacccttgtgtcatttctatgcaggtggaaaccaagcaagtgcttatcgaagataaattaaaaaaattcctacccactgtagcgttttcatttcattaaacgttttagaagaaaagtgttaatggccattaaccaattttatttaaaaaattgatttaactacatgaaaactaatctaaaaaactttagtctgacaacaaaaattgtactctctctccttaccataactaccatattttcggcttgtaaaaaagactggaataatgagccgattgaagccgccggaattggatatgtacacgcatctccaggtactgccgctcttgattttgtattagacaatcaaaagattggaagtttcacgtataccaatgatcgcggatattatgcagcctatcccggaacaagattagttggtgttgcgaagaaagattctttaaagtatcttaccagcggatcagccgttttaaaatcaggatctttttactctgtttttgtggtagatacattaaaatccacaaaactgctattggttgaagatgatttgaaagctccggatgcagaaaaagcaaaagttcgtttcattaacttaagtcctgggtcatccgctttggatttagcagttgaaggcaatgctacagccttattcaccagcaaagcctttaaagaatatacaccatttacttccattgatcctgctgaaagctataattttcaggttaaggatgcgggttctgcaacagtaaaagcaacgcttcccggagttaaaattgaaaagggaaaaatttataccatttgggcaaaaggattaagcagtacaaccgacagcacaaaatttggcttggctgtaatgactaacaagtaatatctacccgttgaatttaacaccattctgaaatatggatggtgttatttctttaattttgcagaataagtttaatcacttatcaaaaaactaatcaaaccttaaatagatcctttacgggagtgataaaaaagatactcagttttgaggaaattttaaaaggctgtgtaaaaaatgacaatagctgtaaagaaatgatgtataaatcattttatggctatttaatgggtattattttaaggtataccaagaaccccgctgatagcgaagaacttgtaaatgatagttttataaaaatatttaagcatgttggcaattttaaaccaccaaaaaatccggaagaattgcaacgatcattcaaaggttggattgctcaaattgcatcgcgtacagcaatagataaaataaggagtgcaaaagctcaattctatgttgacgacttaactgaagatgaacatccggttacacaagtatctatcgcttcagaacttcatgttaacgatattttaaatttattaaatcacttgccagatacgcagaggttagtatttaacttatacgaaattgagggtttcgctcatgacgagattgctgtaatgttaagcattccggaaagttcaagccgtgtttacctgaccagatctaaaaacaagttacgtacgctttatctaaatacattggttaattcatataaaaaaaatggataaggaattaattgagcatatcacatcacagcttcaacatcacgaagaatcttattctgatggtgcctgggagcgtttttctgcaaaggagaataaaccaaaacgttttgtttactggcctttgtgggttgcggctgctttaattttagtttttgggggagtgtttttttctttgaatgaaaaaaccattaaaagtgatatggctgtaaataattcaaaaccaattactcagaaacccgatgaggagaacactttatcttctactgaaaacagccaaccaaaagaaaaaaaccaactaaatttaccattgatcaaagaaaatcaatccattccaggtataactgttgccagcaatcaatcgcaaaaacgtgttgaacaataccattcgttagcagttcacgaagtaattgaaaatgataaccgccttgaaaattcacttaccgctattaacttggcaagtgcaaacaacaggagctttgatatttatagagaaaacaaaaaagaaaaggtatttaaaaaaccaacatttgaagatatattggctcatgatagtaaattcaatgagtttagcagcgcatcaaaaagccagaaagattctaaatgggaacctggtgtttatgtggcaccggcaatgggtaatgacaacaaagtaaatatgaattatggtttctcattatcctatgccatcgataagaagctgtccattagttcaggggtttcgtatgcatcattaagttccacagaatctttagatgccagcgccccacaaactttatcaggcaagaatttggaatctgttaatgctaaagttcagggaatcaatatcccattggagcttaaatacaacattagcgataaactatataccggagtaggaatttctgcattggctgtactgaataattctcagcaaaacacttatctgatcaatcaggtgcagagcatgcctatggcttcatctagcggagcaatggaacaaaagaacttcatcgtggcagaaaaaaccagcgaaccacagccagaatcggccattgatcctgataaatacatcggtttttataatttctccataggttacaaacaaaaaatatctccaaagaaaaatatagccattgagccatttttaagattgccgatgaaaaccttctctaaagaaaacttaaacttaaccaacggaggcttaaggttaaaaatcgatttttagatattgttataaacgagttacaatttcaattacgcttgtttactatctttgcgggatatataacctgaagggaacgataatgaaacaactggcatttttatttttactttttattggctttggcgcacaagcgcagcatgatccgagcgatcaaatggattctccaaactgggatgtaattggaagcattggttttaaaacggttaagccaactgaaaaatatgcagtttacaatgctaacattaaaaaattcgaaaataagccttttgaattatccggatatattgttccgataaaagacgggatgaaacaaactaaatttatgttatctaccttacccatcaaccaatgtttttattgcgggaaaaatggtatcccaatcatggttttagttgaaatggccgagccggttaaatttacttaccaacccattacggtaaaaggtgttttaaaactgaataatgggaatacgatggataatccaccagtacttttatccacatcaaaactgttataaaacaaaggctgtcctaaaaatcccgttcaatcctattaaggaaattcacgttttacctatcgtaaactcatctttaaaactttgcatcatacccaatttaatagggtatcttaatacgttttcaatagcgaaagctttaagatcatcttcgatgggcacttatgtggcaatgacgaaacaagaatggtctggtctgaaaaatatttgtgtcaacacgataaatttcacaggcacgacagattgatcttttaggacagcctaattttgtttttatatcaacagtttaaaactgaaaatttataactgtgaaccgacctagtgacctgaatgtccatcagcaccatgagcatggccatgagccagttcatcctgagtagcttctctaacgtttaaaattgttccgctaaacaaaaggtttttcccagccattgggtgatttaaatcaactgataccgtttcatcatgaacagcggttacgttggccctgaactggttaccattgttatcctgtaatggaataacatcactaacatttggaacctcaccaccagcatctgtaaacatgcttttaggcaaatctgcaaaagctccgggatcaatttctccgtaaccatcagcagccgataattcgaaaccatattcatcgccggtttttaatccagctaaatgctcttcaaatttaggcaacatcatgccaacgccatataaaaatactaaaggattttgctcgtctgctttctcaacaaaaacttgttgtccttcttcgttagtagtatgcaattcataagttaatgcaactactgagtttggtgaaatattcattcagattgttttaatgtaaatacgctaatgcttcctcaacagttttaaccggtaactggcatactttatttcggcaaatataaacttttgtttcattgctttgcttaccttttaacagtggcaggttactttttgttccacccaatgtaattttgttgggaatataatgattgcttaactccagtttaaccacatcagtttctaaacccacaatggctatttcgttaattccctgtatctcattgagtaactgtatggcccagttggaataggcagaaccgtatgtttttatttttggataaaccgcagcaagcattgctgatgccttatcggtgtaatcatccaaatcaaaaagcaaccctaatttctttaagttttgtgccatggttgaatttgatgcaggaataacattatccatcacttcgtgtttacgggcaattaaactttctccttccgctgaggtatagaaaaacatgggcgagccggcgtcattgaaatttgcgatcacctcatctgcaagagcttttgcctctgttaaccattcttcatcaaaatcatattcatataaagcaatcaatgcttcaattataaaggcgtaatcatctaaaaatgcggtaatggatgccttttcatttttataattacggtataatccgccactagctgtttttaaattcgttaaaataaaacgtgcggctgccgatgccttttcatagtattgatgatgattcaaaacctgtgctgtatcggctaatgccttaatcatcattccattccaggccgttaagcatttatcatccaaacctggtctgatccttttatttctgacctgaagcaattttactttggcagcttttacagtttcatacaaggtttctgcatcaattccatacttttctgatagatcatcatctgataaggttttacgtaaaatgttggtttgctcctcttcccagtttccatcttcggtaacctgataatattcggccattaaccgggcatcatcgcccaaaatatggtcaaattctttcttatcccaaacataaaatttaccttctattccttcactgtcagcatctaaagcagaataaaacaagccttctgccgaagtcatttcgttaaaaacccattcaatggtctccactgccgtttgtttaaaagcttcaaatttggtgcattgataagcttcaatatataaactgatcaattgtgcattatcataaagcattttttcgaaatggggcacatgccattgatcatctacagaataacgggcaaaaccacctcctatctgatcgtaaattcccccacgactcatttcttcaagcgtgtggcatactgcagtaaaaacagattcatcatctcttaaaaagccataacgcaataagaaaacccagttattgggcagtggaaatttgggagctcggttatatccaccaaaaccaatgtcgaaatggcgtttccagggttcaatgatttctgttaaatgttcctgagtataatcttcttttgaaaccggtggaattattttttcactgtcttttattccggctgttaatctttcggcatattgaatggctttaccgggttcatttgcccacaatccggcaacattttccaaaatgttaatccaatcgttttttctgaagtacgtgcccccgtaaatcgggcgttgatcgggcaaacaaatgcaattcagaggccagcctccgctgccggtcatcaactggatagcatacatatagatctgatcaatatccgggcgttcttcccggtctacttttatgcagataaaatgccggttcattacctcggcaacctcgtggttttcaaaactttcacgctccatcacatggcaccaatggcaggcagagtaaccgatactcactaaaatgagtttattttctgccttagctttctccagagcttcggtaccccattcgtaccagtttacaggattgtaagcatgttgtaacaggtatggcgaagaggcgttaattaacttattgggtgctgaatgatggtttgacatgaatgctaaaatatttcaattgaacttgtaaagctattaattatctacaaagctgtttcgttttagtttttgtttttctactttagttgaaaatctacaagcaatggaattggccagaaacatttatttagtgcaataaaaaaagattatcattaaatcctgattgagcgtatgacaactgactgtactttttttgaagaacctcccgaattaaacacatcatccctaacccctcaaccctaaaccctcaaccctaaccgctaacccaatcatgaaaatcactcataccgaaatatatcgcttcagcattccgatggaacctttcgtaatcgctacaggaaccatgcattttgcacagaatgtgctgattagaatttataccgataccggaataaatggcattggcgaatgctctgcttttccgatgattgttggcgaaacgcaagatacctgcattgccatggcaaaagattttgcagctattttaaaaggaaaaaattcgctggaaattccggaacggatgaacgatttattgggctacgcagatcataacagcaccataaaaagtgcttttgatatggctttgtttgatatttcagcaaaacatgcaggcttaccgctgtataaatttctcggtggaaccaaaagaacaattgaaactgatatgaccattggcattgatacacctgggggaatggcggctacggcactaaaatacaaagaaaaaggttgcagaatcattaaaattaagctgggcaaaaaagttcacgatgatatagaacgggtaaaacatattcgtgaagctgtaggagatgacatgactttacggttagatgccaaccagggctggagttttgacgatgcattatttgccctgggcgagcttgaaaagtataacatcgaattttgtgagcaacccatgagaacctggtatgatgataaactgccggagcttaatgtaaattctcctattaaattaatggctgatgaaagttgttataaccatcacgacgcccggaaactgatcaacagtcaatctaccacctaccttaacatcaaattctcgaaatcgggaggcattttagaagcacaaaaaatacacgaagaagccttacaaaccggtgtaaaatgtatgattgggagtatgctggaaagcaggatcgctttaagtgcgaacttacattttgcattggccagtccaaatgtggaattttttgatctggataccgcactattaggccacctggttgatccggccgttggcggtttaacttataatggatacttccttgatgtgcccgatgaaattggaatcggtgctgaagcagatgaatttttcctggaaaaatgtgaaagctggattatttagttcatttgtatcattggttcattagtaggcaggtttgggtgcgtaaagttcattggtgtcattagttcattaggtttatagccttgtaccaatgaacagatgaccagtgaactaatgaaccaatgactaatgaaccattgaactaatgaacatctgcactaatgaacaagcattcctgccagtgccgtactatcgccgttaaacgcattaaaatctactacatggccaatgccactgattttcgctttatcagaatgttgccagaatttccagcggcttttatccattctcaatttgggttgatggtaatgagcaatccataacggatattcatcaaaatgatcagccaaataatcttcataaaactttaatcccgtgtaaataatcggacgaaccttggttttcatttccacaaaattgagaaaatctgcaagctctgcccgcatttttaatggcgaaacaccgtccaggctctcaatatcaacaacagggggtaaatctcctttttctatgtttaccacctgtaaaaaaaacttagcttgtgttttcccctctttttttggcctgaaaaagtggtaagcgccgcaaataataccagcttttggtgcttctctccaattacgctgaaagtaagggtcaacctgtaaaatgccttcagttgctttaatgaaagcaaagcgaatattcacttcgtcttctttcatttctttcactttttgccagtttattttgccctgataatatgaaacatcaattccatgtacggtatatgccttcggaattttaatgttaaaactttcgtaagtgcgataattggggtcctgcccccaatcttttacccatcgccaggtggccacgaaatctttaagcacatacccgtaatataatggagaaagtaaaatcaataataaccccgcaatagcaactttccattgaatcggtagcggtttaggtttctttttacgaacggtttttcgggttacccgttttcttttggctggcggcataagctatttaatgctgctaaattgaggaaaatatggagaaataaaaaaagcgagttgccccgctttgaatgttttcacaacggaataatccttattgtgatttgctttcatgtcaaagatagaaattattttaagatgcagattacgggaaaccgtaatgaattaaaaataaatgattttaagtttgggtatggcgtttaatactcatgattaagaataatttttctgatttaactgaattaaaaaattaaatcagatattgttaaaacattaaaataatctctcatgaagaaaatattaggactagatttgggaacaaatagcattggttgggcattgattgaagttgatgaaaataatatacccatccgaattattgcaatgggttctagaataattcctttagatgcagatgctagagatcagtttcagaaagggcaggctatatctaaaaataaggatagaactacagctagaactcaaaggaaaggatatgatagaaaacaattaaaaaagtctgatgattttaaatatagtctaaaaaagattttagaaaaactaaacatcttccctaccgaagaattactgaaattaccaagtctcgatttatggaaactaagaagtgatgctgtttctgacattgaagatataactcccgaacaattgggcagaatactctatatgctcaatcagaaaagagggtacaaatcagcaagaagtgaagcaaatgcagataaaaaagatacagattatgttgctgaagttaaaggaagatatactgaacttaaagaacaaaataaaactttaggacaacacttttttgatgaattacatctagctcatcaaaacaacacctattttagagtaaaagaaaaagtctatccaagagaagcttatattgaagaatttgatgcgattataaatgctcaaaaacttaaacatccctttttaactgatgaaattatccatacattaaggaatgaaattatttattatcaacgtaagttaaaatcgcaaaagggattagtaagtatctgtgaatttgaaggttttgaaactacttattttgacaagaaaacccaacaagataaaaccatattcacaggaccaaaggttgcacctagaacgtctccgttatttcagctatgtaaaatttgggaagtagtaaacaatatctccataaaaactaaaaatcctgaaggcagtaaatacaaatggggcgatagaatacctactattgaagaaaagcaaataattgcaaattatctttcggtaaatgaaaatctaagttttgcagaactacttaaaatattaggactaaaaaaagaacaagtttatgctaataaacaaatcttaaaaggcatccaaggtaatattacctattcagctattcataaaattataggaaatagtgaatatttaaaatttgacactcaaacaattccatcaaaacactcagctattttagttgataaaaagactggagaaattctagatgaaagagatagtgtagaattatcttcagatttagagcaagaaccattttatcaactttggcatactatctattctattaaagaactagatgagtgtaaaaatgccttagtaaaacgctttaactttgatgaagaaattgcagaaaaactttctagaatagattttaacaagcaagcatttggcaacaaatctaataaagccatgcgaaaaatgttgccatatttgatgttaggatacaatcaatcagatgctgaaagttttgctggttataatcgcaggttaaccaaagaagaaaaatcaaaaaatattttagacgaacgactgcaactattatcaaaaaatagtttgcgacaaccagttgtagagaaaattctaaaccaaatgataaatgtagtaaatgcaattatcgagaaatatggaaaaccttacgaaattagagtagagcttgccagagaattaaaacaaagcaaagacgagcgtgaagatgccgataagcagaatggatttaataaaaaactgaacgagctagttatgactaaacttgctgaactaggtttaccaactaccaaacgttatatccaaaagtataagtttatttttcctgccaaagataaaaattggaaagaagcacaaactgctaatcaatgtatttattgtggcgaaacatttaatcttgccgaggcattaagtggcgataatttcgatgtagaccatattgtacccaaagcattattgtttgacgattcgcaaaccaacaaagtgctggtacatagaaactgtaattctactaaaactaatcatacagcttacgactatatctcaaaaaaaggaagtgaagccttaaacgattatgtgacaagagttgatgaatggtttaaacgaggaataatttcttacggaaaaatgcaacgtttaaaagtttcattcgaagaatatcaagaacgcaaaaaagttggtaaagagaccgaagctgataaaaaaatatgggaaaactttattgatagacaattacgtgaaacggcttatattgctagaaaagcaaaagaaattttaggaaagatttgtcataacgttaccagtacagaaggaaatgtcacagcaaaacttcggcaactttggggttgggacgatgtattaatgaatttacagttacccaagtatagagaaataggacaaacacaattaaaagaatggacaagtgatcgtggaaatcgtaaacaccaaaaagaagaaattacaaattggactaaacgcgacgatcatcgccatcatgcaatagatgcgcttgtaattgcctgtacacaacaaggatttatccagcgaataaatactctaagttctagtgagacaaaggatgagatgcaaaaggaaattgatagtgctaagaaaaaatatggcgaaaactatgatgaaaagatattaagtgaaaagaatgaaataatcaaaggacaaaaagaaaaaaataatcaacttaatatttatttgatttcacagagaccagaaaattttaccacaaaatatattgaacaagaagcagacaaaatactagtttctttcaaagctggcaaaaaagtagctactataagcaagtttaaagctataggcaaaaatgaaaccacaggcgtaattgtaccaagaggtgctttacacgaacagtttgtttatggaaaaattaaaactattgctaaagatttcaaaacaggtttattaattaaatatcccataaaatacttgtttgaaaacccaagtctaattgccgaaccaactattaaaactaaagtcgaagaaaggctaaatgatttcgagggaaatattaaaaagtctattgagtctttaaaaagggctcctatttatcttgatttagctaaaaccattttacttacgtcttctcattgttataaagatgaatttgtgattaaatacaaaattaccgatttaaaaaaggacgatgtgaagtatattattgatgaaaaagtaaagcacttagtacaagctagacttgatgctcacaatggtaaagaaaaagaagcctttaaagatactctctggtttaatgaaaataaaaaaataccaattcttacagttagatgtttcactggactttcagctgtcgaagctattaaaaaagacgaaaatggcaaagaaattggtttcgcaaaaacagggaataaccatcatatagcaatttacagaaatagtgaaggaaaacagatacaacatttatgtactttttggcacgcggtagaacgtaaaaaatttagagttccttatattataaataacactaatagcctttggaatgatttacttgataaagatgtaccacaagcatttttagataagcttcctgctgataatttggagttgcaatttagcatgcaacaaaatgaaatgtttgtattagggctatccaaagaagaatttgatgaagccgtacaacaaaataacaaagcattattgagtaaaaacctctatttggtttggagtttatctgaaaacaattattggtttagacatcatgtagaaacaaaaaattcagatttaaaaaacatttctggagttaaagaaagtaaaagattgtataatataagaagtattggcgctttaaatgaattgaacccaattaaagttcgattaaatcatttaggagaaattactaaaattggggagggcggcaaatataaagcctcagaagataatctattatgaataaacactcgttatgaataaacactcgattttctatcaaacccaaaataccataaaaatttttaattcatttgaagaagcgaaaaaggatgagatagataatatcattgattttatgaccaaaataaacctcgataaagctaataaaagaaaaattattgcagaagttgatgatttaaaaattccgtttctttatttggatgatctagcgctatctaaatttaatattggacggataataaagtgtaaagtggatatagaaagcttcagcaaattcaaaaaaatagaaaatcttaaagtttctatagtatgatcaaaagaacgctccactttagcaatccagcttacctgagtttacagcaaaaccagctcgctattgatttaccacatttaaaatcattaggcgaaaaagaatctaaaaaatcgattccgatagaagatattggaattattatcttggataaccaacaaataaccattacccatggttgcattgctgcactattagaaaataatgcagccattataacctgcaatcagagtcgccatcctaccggcatgatgctacccattgatggacataacacccaaagtgaaaggttccgttatcaaattgatgcctctcagccgctaaaaaaacaactttggcaacaaaccgttcaggctaaaattttaaaccaggcagccattctttttaatcggggcattgcgtgtgaaaacatggttcattgggcaaaatctgtacgctctggtgatcctgataattatgaaggtagagctgctgcctattactggaaaaatgtattccctaaaaaattagatttctttcgtggccgtgacggtaatccgcccaataatttactcaactatggttatgccattttaagggctatcgttgcccgaggcttagtttgctctggcttactccccacccttggcattcatcatcgaaataaatacaatgcctattgcctggcagatgatattatggaaccttatcgcccctatgttgatgaaattgtattgggtattatagatagaggggaaaactttttagaattgggaacgtcaattaaaacacaacttttaggtatcgctactgttgatgttcaatttgaaaagagcaaaagtccgttaatggttgggctgcaaagcacaacttcctctttagctaaatgttatgaaggaacgattcggagaattaactaccccatcatgaagaatttcgagacgaaaaggagcttttataaaaatgatgagatcattaattctattaccataaatgaaattactgagcctggctataaaaaatctaatgatgaacttccattctaattgatgcgtttaaatgaatatcgaattttgtgggtattagttttctttgatttgccaactgaaacgaaaaaagaacgtagcatagcttctaaatttcgtaaagaaattttaaaggatggctttgcgatgtttcaattctctatttatttgaggcactgcagcagtagagaaaatgccgatgtacatattaatcgggttaaaagattattaccagaaaaagggcatatcggtatcatgacggttacagataagcaatttgggatgatggaattattttacggaaagaaagaaaaagaattacctgatactccgcaacaactcgaattgttttaaaaataataccattacaataaaagaaatgattagaataaaaaatcggatgcaaatacatccgattttttttaattctaatttttgaactaacctactgatggatagttaattgaactatggtatgttgttgtaaatatcagtagttcaaagaatgaaagcaaatcacaactagtcccattcatcaaaaacatctagtatagttgttgtaaatatcagtagttcaaagaatgaaagcaaatcacaacaaatccctgttgcaattggcagcaacctcagttgttgtaaatatcagtagttcaaagaatgaaagcaaatcacaactctcccatgctcaaactatcaagattgtttgttgttgtaaatatcagtagttcaaagaatgaaagcaaatcacaacacaccattgaaaatactcgcatgctgctttgttgttgtaaatatcagtagttcaaagaatgaaagcaaatcacaacaggagcttggttatttctgaattcgttgtagttgttgtaaatatcagtagttcaaagaatgaaagcaaatcacaactacggttctcttgccaatcaaaaggttttggttgttgtaaatatcagtagttcaaagaatgaaagcaaatcacaacctaaataaataatattatggaaaagctaaagttgttgtaaatatcagtagttcaaagaatgaaagcaaatcacaacactttggcagggcatttaatggaacctacagttgttgtaaatatcagtagttcaaagaatgaaagcaaatcacaacaaagtaaacgttaatggcgcaaatctaattgttgttgtaaatatcagtagttcaaagaatgaaagcaaatcacaacacttaggtactttctcctctggcttatttggttgttgtaaatatcagtagttcaaagaatgaaagcaaatcacaacgcaaaattcacagtaagggacggggttctagttgttgtaaatatcagtagttcaaagaatgaaagcaaatcacaaccggccgatgatgatcccatagtcatttacggttgttgtaaatatcagtagttcaaagaatgaaagcaaatcacaacaaatcttcaatgtattcgtcaatatcttcgttgttgtaaatatcagtagttcaaagaatgaaagcaaatcacaactaattgttgatgctaaaggggtttatattagttgttgtaaatatcagtagttcaaagaatgaaagcaaatcacaactatgcggcggtaagaggtggaacgatcagtgttgttgtaaatatcagtagttcaaagaatgaaagcaaatcacaactcaagagaaacaccaccacgtttagacgtggttgttgtaaatatcagtagttcaaagaatgaaagcaaatcacaactttatcgagtttttcaatacatttgtttaagttgttgtaaatatcagtagttcaaagaatgaaagcaaatcacaacaacttttagggctggatgacacaggtaaaggttgttgtaaatatcagtagttcaaagaatgaaagcaaatcacaaccgttaaaaggtgttacttttatgtcgtattgttgttgtaaatatcagtagttcaaagaatgaaagcaaatcacagcttactatttattggctaaacgagtacctaggttgttgtaaatatcagtagttcaaagaatgaaagcaaatcacaacgatgaatgatcaaagtgcgtccacattgatattgttgtaaatatcagtagttcaaagaatgaaagcaaatcacaacagtttgaggattgtgttaataaagtgctgagttgttgtaaatatcagtagttcaaagaatgaaagcaaatcacaactattggctcaacaccgatgcgcgggtaaaggttgttgtaaatatcagtagttcaaagaatgaaagcaaatcacaacaatgaatggtttgattcatttagaaacttgttgttgtaaatatcagtagttcaaagaatgaaagcaaatcacaacagcttttatcttcaatccagacatcacatcgttgttgtaaatatcagtagttcaaagaatgaaagcaaatcacaacttatttattacagaggttgatgatgaagaagttgttgtaaatatcagtagttcaaagaatgaaagcaaatcacaaccgaacttacgatcagaaatcagtttatatgttgttgtaaatatcagtagttcaaagaatgaaagcaaatcacaacattatgtgaagtattctgtactcctatagagttgttgtaaatatcagtagttcaaagaatgaaagcaaatcacaactcggtttaattatagctgatgaagcacattgttgttgtaaatatcagtagttcaaagaatgaaagcaaatcacaacctacagctatagaaaattcatttttttggttgttgtaaatatcagtagttcaaagaatgaaagcaaatcacaaccctgttacggctttctcttcgtactgcgacgttgttgtaaatatcagtagttcaaagaatgaaagcaaatcacaacatggcaacatcatacttgatattgatcatggttgttgtaaatatcagtagttcaaagaatgaaagcaaatcacaacggcagttcactactcatgtgaatgcttcctgttgttgtaaatatcagtagttcaaagaatgaaagcaaatcacaacagcttttatcttcaatccagacatcacatcgttgttgtaaatatcagtagttcaaagaatgaaagcaaatcacaacacttttctggtgtaagtatagtgtaaacgagttgttgtaaatatcagtagttcaaagaatgaaagcaaatcacaaccttgagcaggggatgggtaaaggtttaagggttgttgtaaatatcagtagttcaaagaatgaaagcaaatcacaacccctaaccactacatccacatagcaaccatgttgttgtaaatatcagtagttcaaagaatgaaagcaaatcacaacttagaacttgcaaacgaattacttgcagaagttgttgtaaatatcagtagttcaaagaatgaaagcaaatcacaactataaatgataaaggctttgacaatattgtgttgttgtaaatatcagtagttcaaagaatgaaagcaaatcacaacataatgaatgggttatttcattaggagctgttgttgtaaatatcagtagttcaaagaatgaaagcaaatcacaacttaatcggcttcccgttgtcattaggaatggttgttgtaaatatcagtagttcaaagaatgaaagcaaatcacaaccaaacgtccgttgtcatttttgattttctgttgttgtaaatatcagtagttcaaagaatgaaagcaaatcacaacgaaagcatcgcaaccgcattagacttagaagttgttgtaaatatcagtagttcaaagaatgaaagcaaatcacaacccaacctgatgttttccgctgaaaaggccagttgttgtaaatatcagtagttcaaagaatgaaagcaaatcacaacgatgcattgatctactgtaaaaaaggcctggttgttgtaaatatcagtagttcaaagaatgaaagcaaatcacaactcgtctgaagggaaaggttcaacgaaagttgttgttgtaaatatcagtagttcaaagaatgaaagcaaatcacaacggaactgccttaaggaaatcacgtttcattgttgttgtaaatatcagtagttcaaagaatgaaagcaaatcacaacctattcatgcagatgccaaatcatctttcggttgttgtaaatatcagtagttcaaagaatgaaagcaaatcacaaccaaatgacttacaaggttggtcaatacattgttgttgtaaatatcagtagttcaaagaatgaaagcaaatcacaaccagtgtatgtttccaatcactattgataacgttgttgtaaatatcagtagttcaaagaatgaaagcaaatcacaacaccttatagtcatgctttcagaaaagagttgttgttgtaaatatcagtagttcaaagaatgaaagcaaatcacaaccagtttaaatgccgcagcgtaattcataaggttgttgtaaatatcagtagttcaaagaatgaaagcaaatcacaacgcatcgcatgcgagctaacagaagatctatgttgttgtaaatatcagtagttcaaagaatgaaagcaaatcacaaccctgttacggctttctcttcgtactgcgacgttgttgtaaatatcagtagttcaaagaatgaaagcaaatcacaacatggcaacatcatacttgatattgatcatggttgttgtaaatatcagtagttcaaagaatgaaagcaaatcacaacggcagttcactactcatgtgaatgcttcctgttgttgtaaatatcagtagttcaaagaatgaaagcaaatcacaacagcttttatcttcaatccagacatcacatcgttgttgtaaatatcagtagttcaaagaatgaaagcaaatcacaacacttttctggtgtaagtatagtgtaaacgagttgttgtaaatatcagtagctcaaagaatgaaagcaaatcacaacactaggtaatcaactaaaacagcgctgttgttgttgtaaatatcagtagttcaaagaatgaaagcaaatcacaaccagagcaaagcgcgggtgatcgcagggtcaagttgttgtaaatatcagtagttcaaagaatgaaagcaaatcacaaccacgtaggtatgtattcctagtgtactatgcgccttgcctaaaacaaatcctcgttacccattcgctggcataggaaatgatactaaggaaagttaaaattcaattagcatctttcaaataccacagttcaagcagggcgaacggctcttaaatttaccggagttacataaacctggttgacgtgaaaattcctttttgctgaagaaacattcattaccaattcaacaatcacaaaaagattgcaacaaaaaacaggatgaacaataatctcagcagtgaattgcttttcaaaaaaaagattacaaacctaaagcggctttcagtttcacataaccagttttacttacgggcaaccaaatatctgatttaagcaacacgacataactatctttttcctttaactcgattttagttacctgagccagattaatgatgtaagaacggtgaatgcggataaactggcttgcatctaaagtttgttcaaaataagccatggttttgtttttatagaaagcaccatcagcagtgcttaatttcacataatcatcatcagcttccaggtaattgatatcgacagttggtataatcttaattactccatcttttttaaccactactctattgttttgggccgggctcaatgctgccgcatccaatacagcttctgtattttcggtttgatttaatcttgtcggaagctttttaatggcggcatcaaagcggcctttatcaataggtttaagtaaataatctactgcattaacttcaaatgctttaatggcatactcatcaaaagcagtagtaaaaattacagcaggtttatcctctaccagttcgagcatttcaaaaccgctgattttaggcatttgaatatctaaaaaaatgagatcaggtttatgtaaagtgatggcttttaacccttcaaaaccatcacaacattcagcaaccacctctatttcaggatgattggaaagataaaatttaacaatatctctggctaaaggttcatcatcaattagtatcgttctgatcatttttttgtggaatttttagggtggtaatatataaattatttgcctcaatttcggtctgtaacaaatgcgggttggcaaataataaatataacctgcgtttaatggcacttaagccaaaccctgttccgcctgcagctttcatttccggatcgaatggattttgaacgcgcaacgctaaaatatttcggtctaccgttacatcaattttgatggtaattgcggatgaggtattgtacaaaccaaacttaattgcattttctacaattggctgcaacaaggttccgggcaaacaaaggtttaaggtatcatctgcaacattaacttctatgtttaacctgtggctaaaacgcactttttctatatcgagatagagttgaatatactccatttcctcctcaactgaaacccataattcatcatcacgctttaacgttccccgaagaaaagatgctaacttggtaatcatcactcctgcttctttagggttgaccatagtgagcgcaaacaccgaatttaaactgttaaacaagaaatgtggttgcaattgatgacgtaatttattcaattctgcttctttagcaaggtttttagcagctgagagtctttcatgggtttctgattgttcttccaatctgtaccataaaatattggccaatgcacaccatcctaaacacatgaaagaaattaaaccacgaaaggcaaaagaaaaattataaaaatctttgtattctttgtaatcggcaaatatatagagcattgtgtatttggcagcaaacacaataacaaatgttagcgccaaagtaataatgagcacatataaaatacgctcattttttggctgataataacccagcatattgctgatgcctatacatgccataatgagtaaaaagttatttacaaagctatcagcgaacgagattagccatgaaaaatttacaacataatgtaaaccgacagcacacaaaagaagccaggcaatcgcaattgcgagtgatgttttttgtatttggggtatggatagaggtctagttgtcaaggcgttttagattagttaatgatttatttctgtgttttagttttgccagataagttttggatgattcaggttctattattttagaatttacctcaactccatctgctggctcatctaccgccaaaattccaccaatagcaacaaacttccataccactaaatcgcctgcactatttttgattggtaaattaaatttcccggcattttgttgtgcttttctaatagcattaaaactatctgcagcttttattaagcgtgtttgctcattaaattgtggcgagtgtttcccctcgccactaatcacttgataaataagattaattgcaaaccatttcatcgctcagtttttaaaaacttttaacctcaatccctccaaaaagtactgtaccatctaaaaccaatgttttctgcatctggtctatgggaagcatatgtcctcttttatcctctacacttccaaatattgcagtaacgttcgattttattgcccagtttggtggaacaattaatttaatgccaccaaaaatagcagtcacgtccagcgaaacattttctgtaaaatctgcctgggtcatcaggatatccgcgcctccaaatacagcggtaatatctccacctttaaaatttttagaataaacggtttgattagatcccccgaatacagccgttacatcaataacatcgttattatttgcatttgtatcagcagttttgaaattaccgctgtcccgccccataccgaactcgcttttcacactatctttaaatgcttttttatctctaaaagatcctcttggccttaaaattaaaaaaccgccgatgattacaagcccgaaaccaagtgcatatttagatatatcgaaatcaaaaccgatattatcaatggtttggtaaacgcctattaaaatcagaatcagccaaccgactcccctaaaattacgtctaaagcctataaatgcacctagtgcgattaaaaatgtccagaaactaaatatccagtgtgggatatctaagcccatattatcgagcaaaaatgccagtccgataattaatataattgaaccgctccaaaccctgcctgagttttttacgtgatgattatcattgagattttccatgtgttgaatgatttaataaccaaaagtatttataataccggggttgacagataataaacctataaaaattagccaaaaggcggtaagcgacatcatttcatcggtgaagaatattttcttattttgagcccatgaaatatttactatttacgatttgcgctatcttctcaattaacgcattggctcaggatgtgagcccacattataaaatttacgatgtaaaaaagcaaaaaaaaatagtattggatgacatcatttctgacatgagaaatgcagatgtgctattttttggagaagaacataatgattctatcggtcatgttttagaagccacaatttttaaaaaacttaatgaaaaattccctcaaaaagctgcactaagtttggaaatgttccataccgatacccaacccgttgt

SEQ ID NO: 1709 - DNA, 23843 bp, synthetic construct
  misc_feature 1..23843: note = Synthetic
  source 1..23843: mol_type = other DNA
caacaatgcaggaattggcgactttggaagcatcgaggaaatgccgtccgagacgtgggaacaagtgattcataccaatcttttcggtgtttattacacagcgaaagctgtttatccgtttttgaaagaaaaaggacaaggtgacatcgtgaatgtcgcttccacagctggtttgaaaggcggacccaatatgtcggcttatgcggcttccaaagcagcagtcgtttctctctcgcagtcgatgatggcggaatggagaaagcagaatatccgtgtcattacattgacaccgagtacaattgcttccgatatgagcatcaacggtggtttgacagacggtaatccggacaaagttcttcagccggaagatttcgcagaatgggtgagagatatcctgaaaatgaaccgcagagcaatgattgccagtgcgtcaattttctcaaccaatccataaaataataatgatggcagcttttccgccctccgttcccgctattttttgccgaggctaaggccatacaaaaaatgagctccactcaggtcgggctgcgagcaattcgatgttataaccctttcagaatttcaaactctgaaagggttttttattaatgcaaaacgacttttttccattaataaaattaaaactgtaacaatccaaatcaatcagaaatagtaaaatctaatatttacataatttccattatcatttttttattcataattcttatctttatcgaaatcaaataaaagatatgaagagacactcatttatcgcaatgtcggctgtgttttttgccgctcagattacattagtcaatgcccaaaccaaatccgaagaaaaactaaatcccatcgttcaaaactttgtgaatgaggcgaataataattcccaactggaagatatggcttttgaacttctggacggcataggtcctcgtctagtaggaacgccggaaatgctgaagtctaatgaatggagcgccgataagttgaaatcgtggggaatagatgccaatcttcagcaatttggaacgtggaaaggctggcagcgtggaactacgcacgtggatatggtctatccaagaaccaaaagcttatccgcaacacaattggcttggagccctgctaccaaaaaagcggtagaagcagaagtcgtagttcttccaaaagtatcttccaaggccgagtttgacaaatggttgccatctgcaaaagggaaaattgttttgatggcgcaatatcaaaaaattggtcgttcggatgagcagatcaaggaatttgcaacgccggaactttacgataaactgaaagcagacaaagacaaagcgagaaaagactttgcagattacatcaaaaatattggctatgataattcaacattgccagaagcattagaaaaagcgggagctgcaggtattgcgatttccaactggacaggcattcatagcaccaatcggattttcggggctaaaaccaaatctatcccaatgttcgatatcgaattggaagattacggaatgctttacagaatggcggaaaaaggcgcaaaaccaagaatcaaggtggatgcgcaatccaaagttttgccagaagccaaatccttcaataccatcggaatgataaaaggctcagaaaaaccaaatgaatatgtgattctttctgctcacctggattcttgggacggcgctcaaggcgcaacggacaacggaacaggaacgctgacgatgctggaaacaatgagaatcctcaaaaaatattatcctaatccaaagcgtaccatcgtggttggactttggggaagcgaagaacaaggcttgaacggttccagaggttttgtggcagacaatccggaaatcatcaaaggaactcaagcggttttcaatcaagacaacggaacgggtagagtggtggatatcagcggacagggattcaaagattcttacgcatacatcggaaaatggctggatgccgttcctaaaaaagtgaaagaccatatcaaaaccaacttcccgggaatgcctggcggaggcggttcggatcacgcttcttttgtagcagcgggcgttccaggattttctttgagttccctcaattggggctacttcggttacacttggcacacaaccaaagacacgtatgacaaaattgtttttgatgaattgaagaataatgtgattctgacagcaactttagcctatatggcttcggaagatccagaattcaccagccgtgaaaagcgagtgatgccaaacaatgaaaaaggcgaaaccgtaaaatggccggaactgagagaacctagaagaagtagtaaggattattaatcttacagaaattagaagtaagagtttagaaattagacccaactttaaattaataagcaaagcgacaaattatttgtcgctttgctgtttttatgctagatgtttaattgaaatttacttgaagaatctatttttattctaatgactctttccgtttcaaaacctttccgcgtggttcattgccttcatagagtgcaatgtcagaatgtaaaaattgagcggctgcggcagaatcttccacttttaccgaacttctttctatcatttcggattcgaatggatttaatacgctttcacgaagtcctttttctctccaatttgacttgggttggcattgtttggagatggagcgagccaaggataaagcatccagcaaagcctgattggcaccttgtcctttgaacggactcatcgggtgggcagcatcaccgattaaggtggctttcccaaaagttttcattaattccggattcagtaattctctgtcataaacaggatatccggaaacttggttagctaaagtcgcttccagaatttgcggaattggtttgtgccaatttgttcgtaggatggcttctgctttcagtgcttctgagccttttgcgcttaatattttagcatcttcctcagacatcgggaaactcaattgccacatgatggaatctttatcaaaaggcatgatataaatccgttcgttaccatttgctgtctggaaaactgttgccgaatccagcagaaaattatcagtattttctaaagcattcaaagagcaaattcctaaaatcacaatacaacctaagtaacgcaaaggtgaatggtcatcattaatcaatatatttcgcacggcacttcggataccatctgcaccgacaatcaaatctgctttttcagtttttaattcattattgatttgaaagttgaggtctattttaccatcgttattttcattaaaatcaatgagttgataaccccattttatcttgtcattaccacctaattgctcaatgaatgctgaacggagcgattgtctggcaatatggatattggtttttttaggactagcctttgttgaattttccatccattttcgcattccccattcagcaaccacttttccgtcggttgtatgtaccaaatgtcgggtagaaaccacaccttgttccaaattagaaattccgaatccgtcaatcactttgctggcttgctgtaatgtaagtccgtaaccttgagaacgttcattaaaactattatcccgctcatagatggtaaacggaatcccacggtgcagacaagccacagccaatgcaacaccaccaattcccccaccgacgatggcaacgtgaggtagattttcggtatctggagctggaaacgcatcagcagaaatcaatcccgaaccagaacagtcggaacaagtgtaatgatgtgccatcggacgagtaggagcagttccttcgccgttggttttttcaaaatgttccagttcagattggtagcggagttttacactttttttgattcttcgcttctgtttcccgagaccctggcatgctttgcaaatggtaaaacaaggtgttttgattggcatattttggtgttcgcaagtacaaacttaataaaatgaatgtaatttcaattttgatgtgggttacaaaatcatcgtcagttgaattctttttctagcctcatccacttctgttactttgacttgcacatgctgatgtagtttcactacctcattcacatcagaaacaaaaccgtctttcaattgggagatatgtacaagtccgctttctttgattcccaaatctacgaaacatccaaaagccgtaatgttattcacaatcccgggaagaaccattccgactctaatatctttgatagatcttacggttggatcgaactcaaaaaccttggctgcttttctcgggtcaagtcctggtttttccaattctttcaggatgtctttgattcccagaatcccaatttcctgtgtggtatatttttcaggattaatcagtgaaattttttctttatttgaaattaaatcttcggttttaagaccaagatcttttgccattttttctaccgttttataggcttccggatgcacggcagaattgtccagtggatttttagcatttttaattcggacaaaagctgcggcttgctggtaagctttttcgcccagtcttggcacttttttaagctcttttctttcggagaaagcgccattttctgcacggtaattcacaatgttctctgccattttttcaccaattcctgagacataacttagcaaagacttgcttgcagtattcagattgatgcctacagagtttacggaacggatgacggtgttgtccagttcttcttttagtttagtttgatccacgtcgtgttggtattgccccacaccaatggattttggatcgattttcaccaattctgccaaagggtcagatagtcttcttccgatagaaactgcgccacgcacggtcacatcatagctcggaaactcatccctggcaattttactcgccgaataaacggaggctcctgcttctgaaaccacaaatacttggataggcttatcgaatgctattttcttaatgaagaattcggtttcgcggctggctgttccgttgccgatggaaatggcttctatgttgtaagcattcaccatcgagcggatttttttcatcgccattcccgtttcattttgtggggcgtgcgggtagatgttttcgttgtggagaaggtcgcctttctcatccagacagaccactttgcacccacttctataacctggatctattgccagaatccttttttctcccaatggtgaagcgaggagcaactgctgcaggttctctgcaaaaacatcaatcgctttgatgtctgctttttctttggcttcctgcaaagcttcattggacaatgcgggctccagaagtcgtttgtaggaatcagcaatggccagctctatttgttttgtggatgaattgttgctcttgattatggcgttctcgataagatccagcgcttcatttttatcaatatctagggatgttttgatgaagccttcattctctgcacgcaacatggcaaggagtctgtggctgggaattctgttcagggcttcttcccactcaaaatactggctgaatttctgtgcggcttcatcctcctttttcgcttttacaactttggaagagatcgaagcttttctttggaacaatcgtctcagattcttgcggacgtaaagattttcattaatccattctgcgataatatctcttgcacctttcaaagcttcctcttcatcggcgacatcttggttgatatatttcgaagcgagatattcaatgtcgtcgtttctctggctcataatgatctttgctaaaggttctaaacctttttctcttgcaagatcagccttggttttttttcgttttttataaggcaggtagaaatcttccaattcctgcaaatcaaaactttgttcgattttttgtttgagttctgatgacaaagcattttgttcctcaatagatttcaggatgctttcttttcgtttgatgaggtcttcaaactgcttatttagtttgaagatgttttctatagctacctcatccaggtttccggttttgtctttccgataacgtgaaataaatggaatggtgcaatcttctgataaaagttgaagcgtactttctatgcttttggtgggtatgttaagttgtttttggatatattctgaagacgtcatttcttgattttgaatagcgaaattactctttttagaaagaaaagtaggcggatttttagctctgcattatttttctattaaaataagcggcgatgattttatatcaaaacaataattattcagttttatctgcattttaaaatctgttttctaaggagtctatcaaccaaaaatcgggacattaccaagaataacctgataatgccccgatgaaaaattgaattgataactgtaaaatctttcagcttttaagaccttaataaaaatctttctctgaaagttttggtagtctgtttttatttaatggagaccttctgagagactgctccttctggtgttttgatccacaggatgtacaaacctttttgtaatttttcctccgcaaaaacaaattctgaatttccggacgacagttttgtactcttttcggctaccaatttaccagacatatcaaaaagcttgaaagtgctttcaccaccagtattagacttcacagggatgcggaaagtaccattggatggattaggatacacagctccgatatttcctttttgattaaaatctacaaccgccatatcatccagctccacaatcgggaaaatggcgaaatggatggcaggctgatagttttccagattttctgtgcggaagtctttccaagtaggtgttgcaccgtggctatgccagcgtaccacatttctcccgtagttggctaaatcgctctgagttcttgtgccatctggcgcataagtcagtgccaatgtttttgtgcccaaaccaccgtgcgagtagtctcccaaacggaatgaaacgaaaaaatttcccgagatgttcaccgggtttgcaaactggatagacttgagacttccgtccacgggcacatcagcataagacaagttgtagttggcaatctgagcacctggcaatccagatcctgccacattgtaggctctgtaggcggccatcacagatcctgcagttccatcttgccctacgtgtatggcagagacaccaaatagtttaccagttccctggatttcatacttttcaccaaattcctcgtctccataggcattgataccacttagatagccgtcaccatcttcgtattcttctacgatgggcataatcacggttgggtcaaaatgttgaagggtggtttgttgtgccataacgaaggatgaaacagcggctgtcaaaagaataaagcttctttttttcataatgtaaaaaaattaaaatgttgatatattactgtgtacgctacacaatgttttcttgaataaaattgatagatatgcatatagacagagccattgcttgtgacagaattatgtcaaaacaacagtccataaaaaggtcttagaaatcaaagttctaagtgtagaagggaatcataagatttgcgcttgccataggtttgatggcaggatttttacacgataaattggtcgagaagaaagcgtgtgctgccaatgtatacccagatttgtaagctggctataaaaggaattctaggcttgcaaaatcatattaggaagctttgcaaacgcaatctctcatttctggacaaagcaatgcaatactgtcttagcaaagtaagtgtagtagttggctgttgtcagaagtaaaaataaatcttatgaaaataaagaaggtggaccccgaagtccaaaatgatgaatgaaaatctctaccggtgtaccagaggcagtttctgtttttaactgggcaacttctgcaaactttacagaaagatgatgatctgcaattgccggaatgtaagctgggaactgataaagattgtgactgcagatgtgacaatgctgatggtccgcttctgccttagatgttttgaaagatattccgccaacattattttcagcagaaaacgacttagaggcgggctcattgttgtaaccggtttcaaaatgggcttgcacatgttctaccgcatgccccaactggaatatttgtgaacttacaaatatcagaaggaaaaaaaacgaaaagtatttcagtttgcttttcacaatagccagagcggtattttgtctgtcaaaaataaacaattatgcttaataaagcctgtaaatactggaaaaattttcagaaatatgaatgtatttttaatagtaaatcttttttcttaattcaaccgtagattgattctgtaaactaataccaatcgatgtagatttatattctgttttattggtttttattattcttgataagatcgattgttgaaattaaaatatttcaaataggtttttaaggttgattatctgtagtttagtattgatttgtattgattttttttattaattttaaatcaaacaaaacacataaccaatgaaaaatcaaacaaacaatctgttttcgtatgtacagctcttttttgaaatgtttgcagaggtaatctcccttctgagacaactcgcaaatcaaaaaaaagaaaccgaaaaatcctatgacagtaccgatgtcaagattcttttgaaaatcagtgacagcaccttctaccgatggtgcaaacaaggaaagctacaatacaaaaaagtaggaggcaagatctatgtctccaaagactctgtggacaatctcttgcggtagcactgttgtttttatgtattttcaaagtgttgactctcatagattttgctggtttaaaaattctggcaagttctatgagttatttgagtgtgctttcttgtcaagtcattatcttttttgtctgcgtcatttttgagagctataataatttatcctttttgatttttataaaagtcagcctttttatagattaaatctaatgcctttcttcggatcatcttcgggcatccttcggatcgacttcgaaaaaaacatcttttttccgaagaagacccgaagaaaagtagtagttgatccgaaggattgtagaaaataccagtcaattgtattcaatggttgtcataggcggtcaataccagtcaggggtgtacagactgctgttttgtatcataacttcgtttgacaaatcaattaaatttattaattatggcaacatttaacaaaggaatccttggtggattctccggaaaagtaggaactgtagtaggcgccaactggcgtggcaaagacgttatgcgaagtctgccaaaaccatcacaaaaagagcctaccgagaagcaacttttgcaacaggcaaagtttaaactggcggtggcttttctgcaaccgctgaaaaccatccagtcccaatattttgggtcaggtagtggggtgaaatcccgagtgaatatggcaacgtcctataccataaacgaggcgacgcaggtggtggcaggcgttccggagctggtgtacaacaaggtgctgattaccaaaggtgagctcacaggcttccaaaatgccatcctatctactcaggctggtggttttctagagctggaatgggaagacaatagtacacaaggcaatgcctcgccaacggatgaggtgagtctggtctcttactgcaaggatttgaacgattttcaaatctttgaaagtattgtgatgcgctccgacctaatagcgggtgtcaccctcccgagtttctgcaccggaaagtcggtggaggtttgggcgttcctcaataccgagaagagaacctttgcaagtaacagtttttatctgggcgagcacacggtactgtaaatgaagaaatccacttgagagagtggattttttttgttctattaaggaaatgaaaaaaggcgagttgccccgccttaaatgttttcacaacggaataatccttattgtgaattgctttcggatacaaatgtaaatattaattatttaatcactttacggttttccgtatttatatgaaataatttctatttaattttaggaatttcaaataaactacttagctatggtaaaaaatatacttggattggacttgggaacgaactcgattggttgggcattgatagagatagatgataatggaactcccataaaaataatagcaatgggttcaagaatcatcccaatgtcatcaaacgacagagatgaatttgaaagaggtttgtctattactaagaatcaaaatagaacagtcagccgaactcaaagaaaaggctatgaccgaaagcaactgaaaaaaagctatctgaaagaaattttgaataagtataatatttttccatcagaagaattattaaagctcccaatgcttgatttgtggaagctcagaagtgattccgctaatccaaatgaaaatatttctgcggagcaattgggacgtattttatatatgctcaatcaaaaacgtggttacaaatcagcaagaagtgaagctaatgcagacaaaaaagacacagattatgtacaggcagtaaaaggaagatatgctcaattaaaagataaaaatcagacaataggacaatttttttatgatggactttataatgccagtgcaactgattcttatttcagagttaaggaagaggtttatccgcgagaagcatacatcgaagaatttgatacaattatcaatgtacaaaaagataaacacgattttcttacagaagaggttatcaatcaactaagaaatgagattatctattatcagagaaaactcaagtcacagaaagggttagtcaatatttgtgaatttgaaggatttgagaaaactatatttgataaggaaaaaaataaaaataaagttgttttcgtaggtcctaaggttgctcccaaaacctctccattatttcagttatgtcgtatttgggaagttgtcaataatatttcattaaaaatcaaaaatcctgagggaagcaaatataaatggggtgataaaattccggatttaaaagagaaagaaataatagttgattatttgtttaagaatgcaagtttaagttttgaagatttacgtaaaattctaaatctagagaaaggaagtgtatatgtcaataagcagattcttaaaggaataaaaggcaatgaaacgtattcggttcttcaaagtattttaggcgatgatgaacttttgaattttaatgtttcaattattccatcaaatcatacttcaatgttggtagataaaaagactggagaaatattggaagaaagggcaggtcttgagctggatgcttctttggaaaaggaacctttgtatcagctatggcatacaatatattctttgaaggatttggatgaatgcaaaaatgccttgataaaaagatttggctttgataatgaaattgcggaacaattgtccaaaatcgatttcaataaacaagcattcggaaataaatcaaataaatcgatgcggaaaattctgccttttttaatggagggttatgattattctcaagcttgcagtttggcaggctataatcattctaattctttaacaaaaacagaaagagaacaacaaattactttagataaattggaacttcttgcgaaaaatagtttaagacaacctattgtcgagaagatattgaatcagatgattaacgtggtcaatgcaattattgaacaatacggaaagccttctgaaataagagttgagcttgcccgtgaacttaaacaaagtaaagacgagcgaaacaatgctgatttgcaaaattccaaaaataaaaagcttaatgaagaaattggtaaacgattggctgaattgggattgcctgtaaccaagaggtacattcaaaaatataaattcatttttccgtcactcagtaaaaatctgaaagatgctcaggttaataatcagtgtatctattgtggagaaacatttaatctgagtgaagctttaagtggtgatgcttacgacgttgaccacattgttccaaaggcattgttatttgatgattctcagactaataaagttttggttcatagaaaatgtaattccacaaaaaccaatcaaacagcttatgattatatcgctacaaaaggagaagaacaggttcgtgtttattctgaacgtgtagatgattggttcaaaagagggattatttcgtacagtaaaatgcaaaggcttaaagtttcacataaagaatatcttgaacgtaaaagcttgaaaaaagaaactgaaacagataaaaaactttgggaaaacttcatagacagacaattaagagatactcaatacattgctcgtaaatcgagagaaatcttacagaaagtttgtaataatgtgacaacaacggaaggtggagttacagctaaacttcgcaatgtttggggatggaatgatgttttaatgaatctgcaaatgcctaaatataagaacttgggacaaaccgttgtgaaagaatggacaagtgaccacggcaaaaggaaacaccaaaaagaagaaatagaaaactggaccaagagagatgaccatcgccatcacgccattgatgctttggtaattgcgtgtacaaaacaaggatttattcagcgtatcaatactttgaactctagtgagactagagatgaatttaaaaaagaaattgaggagcataaaaaacgattaggcaaatcttttagtgaagatgattatgagcatttgtacagagaaaaatctactttattggacgattatctacgctcacaaaaaccttcaatattcactacaaaatatgttgaacaagaagccgataaagttctagtttctttcaaggcaggtaaaaaagttgcaacgataacaaagtttaaagcaactggaaaaaataaggaggaaggcgttattgtaccaagaggagcactacacgaacagtctgtgtatggtaagattaaaatcattgaaaaagataagcctttaaaatatttatttgaaaatgtagataaaattgtcaatccaaaaattaaaagtttagttgaggaaaggcttaataagaataaaaatgatgcaaaaatagctttgttgtctttaaagaaaaatccaatctttctgaatgacgaaaaaacagaaatcctagagaaatcatcttgttataatgatgcaactgtattgaaatataaattgcagagtttaaaagcaaatcaagcagatgatattgtcgatgaacgagttaagttcttagtaaaagagagattagctcagtttggaaataaggaaaaagaagcctttaaggatacgctgtggttcaacgaggaaaaacagataccaatcataacggttcgtttatttgctcgtcccgatgctaataatttacaggctattaaaaccgatgaaaatggtaaaggaattgggtttgtcgtgatgggtaacaatcatcatattgctatttatgaagataaagacagtaaacttattcagcatagttgtacattttggcacgcagtagaaaggaaaaaatataatattcctgctgtcatcaaaaactcatcagaagtttggaatcaagtattagacataaaacttccagaatcatttttaaataaattacctgccgataatctcaatttaaaattcagtatgcaacaaaatgaaatgtttattttgggtttatcacaagaagaatttgacgaagctttgaaaaataatgacaaatcgttattgagcaagcatttgtatttggtttggagtattgctgaaggagattattggtttaggcatcatttagaaacaaaaaatacagaattaaagaaaactgacggagcaaaggaaagcagaagattctttagattaagtttaaaagggtttaatgatttaactcctgtaaaagttagattaaatcatttaggagaaattactaaaatcggagaatactaaaacttatgataacccgctccatctacatcggcaatcccgcttacctcaaactcaaggacgagcaaatgtacattatggaaccttcgtccaacgagatgaaaggcaaagttccggtggaagatttgggattgctgatgttggaccattttcagattacaatttcacatcagttgattcagaaaatgatggggaagaatgtagtagtcatcagttgcgacagtcagcatttaccacacggcataatgttgccattgtatggtcatacagaacattcggacagggtaaaagaccagatggaagccagcgaaccactcaaaaaacaactttggaaacaaacgattgagtgtaaaattgagaatcaaaaagaggtattggtaaaattaggaaattactatgagcctatgctggagtatcaaaagaatgtgaaatcgggcgatattaccaatatggaaggcattgcggcacagcattactggaagtatctcatcagtttggatttcctgagacaacgtttcggagattcgcccaatcagtttttcaactttgggtatgcggttctccgaagtattgtggcgagggcaattgtggaaacgggtctgcttccagtgttggggatttttcataagaataaatacaatccctattgtcttgcggatgatttgatggagccttatcgcccgtttgtagatttgctggtaatggattggttgacaaagaatccaaacactgaggaactgacaaaagatttcaaagctcacatcttgcaaattgcaaccaaagatgtggtgattgatggtaaaacaagacctttgatggtggctgtgaaaacaacagcttcctcactttacaaatgttacacgggagaaaaacgaatgatttcttatcctgagttcaaataaatggacggtttggtcattgtactttttacatcgcaggtaatacaatagaaaatgaatgccgaaaggtttaacgcttatcgaattatgtgggtcttagtattgtacgacttgccgacggagaccaaagccaatatgaaagatgcgactcgctttcgtaaaagcttgatagatgatggctttacattgtttcagttttcgatgtatgttcgccattgcccgagtcgagaaaatgcggaggtccatatcaaacgggttaagtttatgttgccaaaagcaggtaaagttgccattatgtgtatcacagataaacaatttggtgacatcgaaatcttctttgccaggaataaagaagaaccaccgccgactttccaacaactcgaattgttctaattttcgaatcctaaataaacaaaaaatccactgaaaatcagtggattaacttttgaggatgtgttatatctcaaagatactcaaaattgaaagcaattcacaactacaaacaagcacggaattatgatgcataagatgtgttatatctcaaagatactcaaaattgaaagcaattcacaacagaaaagatgcattggtatgtttgggaattgatgtgttatatctcaaagatactcaaaattgaaagcaattcacaacggttggaactgcagatttatatcactggctgatgtgttatatctcaaagatactcaaaattgaaagcaattcacaacgatagtgatatcgatgttaatatggatgacgatgtgttatatctcaaagatactcaaaattgaaagcaattcacaacgcgccaaaggttggtaactccatatctgatgatgtgttatatctcaaagatactcaaaattgaaagcaattcacaacacaacagaacgaaggaagatgcaacaaattgatgtgttatatctcaaagatactcaaaattgaaagcaattcacaacggatttaccatacttgaaaacaaatcctttgatgtgttatatctcaaagatactcaaaattgaaagcaattcacaacaagtaataaaacttatccaattatccggatgatgtgttatatctcaaagatactcaaaattgaaagcaattcacaactcacaaagctttttaatatctaaatctgatgatgtgttatatctcaaagatactcaaaattgaaagcaattcacaactgcaggaactgatttctttatgactgataagatgtgttatatctcaaagatactcaaaattgaaagcaattcacaaccattttataatatgattctaagtttttagagatgtgttatatctcaaagatactcaaaattgaaagcaattcacaacgataaattcctttgagaagcgcacaatattgatgtgttatatctcaaagatactcaaaattgaaagcaattcacaacgcaatatcagatcaatattctgaacaagaagatgtgttatatctcaaagatactcaaaattgaaagcaattcacaacgacgattatgttgatattgaattcgggactgatgtgttatatctcaaagatactcaaaattgaaagcaattcacaaccatctaactaaaaccccttcatcggtatatgatgtgttatatctcaaagatactcaaaattgaaagcaattcacaacaaataaattcttttattagaaaaataccttgatgtgttatatctcaaagatactcaaaattgaaagcaattcacaacatatgaaatggaagaaatgattcacgacaagatgtgttatatctcaaagatactcaaaattgaaagcaattcacaaccgggcatccaactgaaattttcaatagatggatgtgttatatctcaaagatactcaaaattgaaagcaattcacaacagaagtatttgaagccttgaaaaaagaagcgatgtgttatatctcaaagatactcaaaattgaaagcaattcacaacaatcacaatacgttgtcattacggtttatagatgtgttatatctcaaagatactcaaaattgaaagcaattcacaacaattgattacttctgggtagtaaaacaagcgatgtgttatatctcaaagatactcaaaattgaaagcaattcacaacttgtaaagtcaatccattggtagtgtattggatgtgttatatctcaaagatactcaaaattgaaagcaattcacaacttatgctgattattctatcaggtttcatttgatgtgttatatctcaaagatactcaaaattgaaagcaattcacaacacaaaacattgtatgataattgcagtagttgatgtgttatatctcaaagatactcaaaattgaaagcaattcacaacggatttaccatacttgaaaacaaatcctttgatgtgttatatctcaaagatactcaaaattgaaagcaattcacaacatacgatagttgacgctgaaaatgaagtatgatgtgttatatctcaaagatactcaaaattgaaagcaattcacaacacactttacaaccgttaacgacagtttctggatgtgttatatctcaaagatactcaaaattgaaagcaattcacaactatcaaacccttttgtatcgcattttgagagatgtgttatatctcaaagatactcaaaattgaaagcaattcacaacgctgattgaggaagagcaaaataaggagtagatgtgttatatctcaaagatactcaaaattgaaagcaattcacaacgaagttgagaatgttgctgatgctgagaatgatgtgttatatctcaaagatactcaaaattgaaagcaattcacaacattatgtagatactttaaaaattgcttatagatgtgttatatctcaaagatactcaaaattgaaagcaattcacaacggtcaagggttggaaacgtaaggattcaaggatgtgttatatctcaaagatactcaaaattgaaagcaattcacaactaatgatctcaaagatctgcaaggttctgagatgtgttatatctcaaagatactcaaaattgaaagcaattcacaacggcattgcctccgcgaattgctcctctttcgatgtgttatatctcaaagatactcaaaattgaaagcaattcacaacaggatcttcattgcaggaaaaaattaaaaagatgtgttatatctcaaagatactcaaaattgaaagcaattcacaactttatcaggagtttggaagggttcttatgagatgtgttatatctcaaagatactcaaaattgaaagcaattcacaactaaaagtccaaagcttccagactttgtttcgatgtgttatatctcaaagatactcaaaattgaaagcaattcacaacatgtctttgaagacaacggaaatcgacggcgatgtgttatatctcaaagatactcaaaattgaaagcaattcacaacctatcattcaatttattgatatgttggacggatgtgttatatctcaaagatactcaaaattgaaagcaattcacaactaggaagtggttcaggatggccaagtagtggatgtgttatatctcaaagatactcaaaattgaaagcaattcacaacacaccaccgcaagggtcaatccaagaaatcgatgtgttatatctcaaagatactcaaaattgaaagcaattcacaactatcatgggcttctacaaaatttccaggacgatgtgttatatctcaaagatactcaaaattgaaagcaattcacaacatcgttgattcagtaatgtgcgttttggctgatgtgttatatctcaaagatactcaaaattgaaagcaattcacaaccacaaacttctgaggccattttgtaggatagatgtgttatatctcaaagatactcaaaattgaaagcaattcacaactaaaattagtatcactaacaaaatcaatgagatgtgttatatctcaaagatactcaaaattgaaagcaattcacaactttaaagcgctccttctcgtcacagtcggagatgtgttatatctcaaagatactcaaaattgaaagcaattcacaacgttttgatgtcaacggaaatattttcgcctgatgtgttatatctcaaagatactcaaaattgaaagcaattcacaacactaatcgtgatgttcacgccttgcgttgtgatgtgttatatctcaaagatactcaaaattgaaagcaattcacaacttgagcaatatcttccagctttatttctttgatgtgttatatctcaaagatactcaaaattgaaagcaattcacaacattagttcagtcaatgcaaatattaccaacgatgtgttatatctcaaagatactcaaaattgaaagcaattcacaacatatttttttgcagttgcttcaacaattaagatgtgttatatctcaaagatactcaaaattgaaagcaattcacaaccggtcgccaatgttgcacaaaccgcggcgagatgtgttatatctcaaagatactcaaaattgaaagcaattcacaacacccgaacatcgccgcaatcgccgcaatcggatgtgttatatctcaaagatactcaaaattgaaagcaattcacaacagcacctttgcccgaccacactcttccgacgatgtgttatatctcaaagatactcaaaattgaaagcaattcacaaccacacgcacagccgtttcaatgaaaggcgtgatgtgttatatctcaaagatactcaaaattgaaagcaattcacaacatccagagcttacaccgatacgagttaccggatgtgttatatctcaaagatactcaaaattgaaagcaattcacaactaatgatctaaaaacttttgcggaccaaaagatgtgttatatctcaaagatactcaaaattgaaagcaattcacaacagcattagcaaaagcaaccgcagaaggtgcgatgtgttatatctcaaagatactcaaaattgaaagcaattcacaacttgctaagaattatcccgttttcagctggtgatgtgttatatctcaaagatactcaaaattgaaagcaattcacaactgatgttgttaaaggattattgattgataggatgtgttatatctcaaagatactcaaaattgaaagcaattcacaaccggattggtagcaccaaatggaccagtaacgatgtgttatatctcaaagatactcaaaattgaaagcaattcacaacaaacgcaaagcaaggcttagcaaaaaaactgatgtgttatatctcaaagatactcaaaattgaaagcaattcacaactcctttgatgggtgatgattctaaagcaaagatgtgttatatctcaaagatactcaaaattgaaagcaattcacaacgagtgatacagctgtaaagattctggcatcgatgtgttatatctcaaagatactcaaaattgaaagcaattcacaactgttgttgtttgggcaaatgaggcattggtgatgtgttatatctcaaagatactcaaaattgaaagcaattcacaactcagtttttatagtttcttcgcaggctccagatgtgttatatctcaaagatactcaaaattgaaagcaattcacaactaaatcgttcgctttcattcttatattttggatgtgttatatctcaaagatactcaaaattgaaagcaattcacaacaaacgaatatttgcgaatggtctcgaaaaggatgtgttatatctcaaagatactcaaaattgaaagcaattcacaacagtaaaattaatcaagacttcggttccttagatgtgttatatctcaaagatactcaaaattgaaagcaattcacaacattctgacgatgcggaataatacgaaaagagatgtgttatataatcgccaaaacaaaatgtcaaaaaaaacaaatcagaacgtccaaaaaaaaacactctttaaataatctttaaagggtgttttcatcaaacattcaaagaaaacctcacgctctcaccgctcaacaatttaccagtcaagtctttgttattatcatatatatgaacattgccaataaacaatgttatcgatctcaaaggaagattgatttgtctactaattaaatacaaatgatacaggtcggctggaagtcctaaattagcatcagagcttctctgataggctgataaaaccaattttcctttatcaatctgaaactgaataagacttaaacaaggctgttggttgctctcagtatcgttctttccgaggaataaaacataattcttactatttctcttttccctatttattttctttatcaagtccggcaactgctcaaagtatgttggatatgaattaacaaatctttctccagactgaaacaaatcaagctctgttttaagcttattccgtgctattccatgcccttcgaagatttccaataaatcaactggttttaattctagtttttcattcaaaagaaaagtaatattacctttcttattttcttgaattttgcctttttttaggactttttctaaaattttgtgatacttattcatttttctatatttgcatctctcaccttttaacagcaaaaacccctaacagaagacttttgtcctccgcttggggtttttgctctaaatttaaaaggtgagatgtttaaattgcggaggacgttttttttcctcctatttcttttaacgtgcagcaccaacgcaattggctggctggacacggatttccaaagtaaatcctaactttccgctggtgtttgataaattgactttatcacatctatcaactcaatgtgcgtttcctttttatcaaaataaccccacttatcgtggctttctacagctgattgaaaaagatcagacatctttaattgtgtagtcttagagtggcgaataccaaagtagaaatcaaacgctggcattaactgatatggcgaattttctaatgttatttcagcatctacgctctcgtaaattggattctcattttcgtcgactccaatttcaatatcttttttagtttgaaagttctcattaatgacaggaatttgatttaaagtgactattgccaaataatcattactgattaaccaatctctgttttttacttttgcagtctccaactttaaaatactattatctaaagaatcaactgtaattacctcagctgttacgtaccagcgtttttcacgataaatcggtaaatctgagacatatcctataagtctcacgcgcccattaatatcatctgatatttgaagtatttccggataatccaattttagagtttggattagattttctaagttgatttctgttttcataataattctaattttaaaccgtgaatttcagccggagataaacctctgttatatatttttaaattttgcaagtagccaacaaagggaaatgaagaggcatttctttgcccaataaaaagaatgttgttgacaaaatttcctgtgttatcaaaactggaaataaccacagacggcatttttttgccatttacataaaaattaattttttccgaaacattcatttttgaacggtcaaattcaataataaaatgattccactcaatgaaattaaataacatagcacttgatgcaatttgagtctgcctcattgccgcttgaatgctatttgctgaagaattattattaatcacattgaaagcattattactcataagcgttggcgacatttcaaaaagcacagcagttgaagtttgcgctgatttcatccaaaatgataatgtaatcttatttgaatttacaggcagattagatggtgttctcacgcatccagctgtaaatagtaaacattgagttcccgacttgcgaccgttagaaaaatcagcgtttccagtttttattccgtgcagagaatttattgatttatctaataaatctccattaaaatcataacacagaatgtaatcttttggtaaacttccgatactatttataaatcttcttcttcccataatcatttattaactaccgaaaatcttcctaatggagaacttccaccacgtttaatcacaatgctatattcacgcactttcaaagcatcaggattatcactgtaaggatctgcttccagccaagatgggagggtgattaaagagccagtcaaggtcatagtcaagctacaagtgcgatttgtcgcaatcatattggcaaacgaaaccgcagttggcgcagttgccgtcaaagcgaaatgactacctgctttcaaatcaatcgcataacttccagaaattgtagcttcaactcgcacaccaagaacatcatgctctaaaaccaatgatgctaaacttcgccaaactcccgaagcatcagcataaccaacaacgccgtcctttctaccaagctcccacggcacaggcgtgccaatattttctgtcaaaactatagagttggcttttacacgcccattaacatgcaatttctcatccgctgtcatctgcccaattgccacagcactggcgatactttgcgttggtgtcgctgttttatcaacttttccggcaatctcagcgtttttcagatcagacaaccccaatggatttccaacattgccagagcctttcaatgtattatccgtcacaaccaccgtcattgactctgatgtgccaacttttaagatatcaagtttatccgtggttttattgtatttcgcaaaaatccaagttcccggctttaatgtgtaatcttctgaaaaaccgaccaaccaatcaaccgtgccattttgctgtagaaaaacattttccggtgtgtcatttttgattaaaaattcgatttctcgactcttgtcagtcaagcgaattccacgaacattgtatatcggatccacaggatcaactccactcaaaaatgttcttgtaattaaaaatcgagtgcgaacgtcggatttctctaatgtcagagttgtggatgaaaatacataagtttttttccaattgtcttccgctttttctttgaaaccagtcaacatctccggatcaataacatttccttctggcgttatcaaaatcaatcttacgtgaagttccccagcatccaatgacggttcttgcggttcaccgctttcaataccttctttaagaaagaaaagaccgg

SEQ ID NO: 1710 - DNA, 23831 bp, synthetic construct
  misc_feature 1..23831: note = Synthetic
  source 1..23831: mol_type = other DNA
gaagcacctcttcatgaacagcgatccgttgtggtaatacggataccaaagcaaaatcaacctcattattttctaaactttctagcactttagacttattggttacatccattgttaaatcaatgccggggtgttctttcaaaaaatcagttaaaaagtaaggcataatatattttcctgtagaaaccacagcaagctttaacctaccagataagatacctttatacgcttgagttttatagttgatggcatttacttcatctaaaattttttgcgccatatgggctatttcaaaaccaaaatcagttatatacacctgtttaccaacaacttccgttaaagcaatatcaaactggtcttggaaatttttaaactgaatagatacagcaggctgggttaaaaaaagctcatgtgcggctttagtaatactttttgtttctactattttaaggaaaacctgtaattgatgcagcgtataattcataaaaattagttatgtatttcatatcaaatataaataataatatatgaaatagaccttatatgtttgtgatgttaaaattaaagcaaatcacatggaagagaaacaatattctttaatagattggacttatagcgcagaagatgccgctcatatgctttctacactgtataatgcaaaattagaatatcataacagacagtctttgattaatcatgaaggacaaaaatctattcctgttgaagaccagagaagaataaaagagctagaagaggctttaaagaatatcagagcgcaaattaatattgctaagaaaaaaaatgttgatttacacattcaaagtagcatcagcttaaattttatccccaaataaatgttgttatggcagagcagcgcaaggctgcctgccttaatattaaaaaacattcatttttttttaaataaagtcaacaaaacattagaaaagcattaaaatttaaaaaaattagcgtaactaaataaaaaacatactaagtagctcaagaaaagcatcattagttaaaatttatccccaaataaatgttgttaaagcagtgcagcacaagctgcctgctttaaaagtttaaaaaccatttataaaaactaatgattaggctgttttacaataagaaaaatacaaaagaattagaattgcattaaaatttattagaaaattagctcaaccaaagaaaaagtactaggttgcacagaaaattaatattattttaaacttcataacaaaaaaaatgttgtaattgctgtgtagctaaagctgcaggccttaaaaaaacataaaagaagcgaaacaagaaatatggcgaacgctgaaaactactcaattaaaagtgctataaaacggtttaaccaactggttaacttagagaaaagagaaataagcaatgtttatttctatgccatcatcaacggtttcatactactctcactacctttaggcatacaagcaatagtaaatttactgtttggaggcaccgtaagtacctccttaattgttcttataggggtggttattggtggcgttttattaacgggtatattacaaattgcccaaatgcgtatcacagaacgtttgcaacaaaaaatatttacccgtttaacttttgcttatgcttatcgtatcccaaagctcaatttattaagtgttgattcttattatcttccagaattggtaaatcgcttttttgatacttcaaaccttcaaaaaggcttttcaaaactattattagactttccggcggcaagtattcaaattttattcggactcaccttgctgtgtttctaccacccggtttttatcatttttgcagttacggtatttacattggttatattaatcctttattattcttctgataaaggtttcgctaccagtatgaaagaatcagattacaaatatgatgtagcacactggttagaagaaatatctagagccgtaaaaccttttaaacttaacaggcatcacgagctacaccttaaaagaaccgataagttggttaatggttatttaacttcaagagatcaacacttttctgtattgttatttcaatacaggattttaataggttttaaagtagtaactactgctgcgatgcttattttgggttcttatttatttatagagcagcaaattaacttagggcaatttatcgcggcagaaatcatcatcattaccattttaaactctatagaaaaaatgattttaagtttagaggttgtttatgatgtacttacagctttagaaaaactaaacaaggtattggcaaaaccacaagatgatgaggctagcgaacaacaaagcttggcttttacccctagccctggcttagaaataaaaattacgtctttagattttgcatatcctcatgaatctttaacacttaaaaacctcaaccttaaaattaatgctggtgagaaagtatgtattttaggttcagaaggttccggaaaatcaactttattacgcatattatcaggcatttatcaagactttaaaggtaatatcttatataataatacgcctttgaaaatgattaactcgcaagtactaaatagaaacatatcttctttattgggagatgaagatgtatttagtggttctatattagataatatatgtgtaggaaataaagaagttagttttcaggatgtagatttggtttgtaaaattgttggcttagatgattatatcagtaaacaacagcaaggctatgaaacttatgtagatcctcaaggtaaaaaactacctttcaatatcatccaaaaaatactattagcccgttgtttggtaaccaagccatcgcttattttggtagaagacaattggaatggtatagagccgcaaatcagacagcaggttatcaattatttaaccaatcctgatcatgcttttacactgcttgccatcagtaatgatgaggcttttaccagccagtgcaccagaactttatatttagaaaatggccagttagtagaaaattaagtttaaacctatgtttttagatagcaagataccttcagaccatttcacaaaatatcaatcttttggaagagttatgcgtgaccgcgatggcaaatccaaaagaagaaagtggtttaccataaccctaatcattattttggttattttatgtttaccatggactcaaaatatacagcccgatggcgtagtttcgaccataaacccacaacaaaggccacaagagattaacagcattattgctggtagaatagaaaagtggtatgttaaagacggtgatattgtaaaaaaaggcgataccttacttaaaataacagaggtaaaagaagaatatttagacccttctcaattgatacgtgttgatgagcaaatcaaagctaaatcagcatctatagacttttatgagaacaaggctaaattaactggcgaccaagctattgccatagaaaatgctagaactttaaaattaagtcagcttagaaacaagcttaaacagtatactttaattgtacagtctgatagcattagctatgtagctgcagaaaaccaactcagaattgctgatgagcagcttaaaagacagaaacaattgtatgatgctggtttaaaatctttaaccgagtacgagcaaagacaacaagcttatcaggatgcgctatctaaaaagatgggagcagaaaataagttttataacagtcgtaacgaactattgatcatccgcctggagcaaaatgctgtagaacaagaatatcaagaaaaagtattaaaagccaatggcgataggctatctaccctatctgatatggctactacacaaagcgaggttgctaaacttaaaaaccaattgtctaactacgaaatcagacgaggcttttatgttattaccgcacctcaatctggccaagttatcagaaccactaaagcaggtattggcgagacggttaaagaaggcgacccacttttagaaatagtacctattaattttgatgttgcggtagaaatatttgtagacccactagatttaccccttattaataaagggcaaaaagtgcgtttacagtttgatggtttccctgctattgtattctctggctggccaaacacctcttatggtacttttggtggtgttatcgctgcggtagatccatccatcagtgtaaacggtaaatttagagcatgggtacgcccagataaaaatgataaaccgtggccaccacaactgagctatggcactggagctaaaggtatagccttattgaaagatgtacctgttatttacgaattatggcgtcagttaaatggcttcccgcctgagtattatgtagctaacagtacaggaaataaatcaaacgatagtaaggataaaggaaaaagcgataaaaaatgaaaaggttattaggttcttttattctgatagcgtttttgctgccggcttttgcgcaacaacagcctgctgacacccttaaatgggaagcttttaaagaaattatcaggtcttaccacccggtagcacaacaagctaatttggttggcaggttagcaaaagctcgtatgctacaagcctggggaggttttgaccctaaactttctgtggattatgatagaaaagcttttgatggtaccgagtattatcagtttgttacaccagaagttaaaatacctttatggtatggcattgagttgaaaggaaattatgctaccgcagaaggtgcttatcttaacccagaaaataagcttcctaaggaaggtttaagcactgtaggacttaacttctctttgggtaaaggtttattgatggataaaagaagggctgctttaaaacaggctcgtatttttactgaagctagcgaaaatgaacaggtcttaatcattaacgatttaatcttaaatgctggtgaagcttatttaagctggcaaaatcaatataaaattgccgaagtatatcgccaagcattagcattaagcaccatcaggtttgaagctgtaaaagaaggatttagaggaggagatcgtccggctattgataccgtagaagctttaacacaagtacagcaacgtgaagtacaataccaacaggctgctttagaattacaaacagcaaaataccttttagcctcttttttatggcttgaagataatacgcctgtagatattgaaaaattaaatgctttgccacaagaggctaatatagctttaccagaaagtgccgaattaaatattgctaataaccctaagcttttaagttatgactttaagctgcgtgatttacaaatagaaaggcgtttaaaagccgaaagtttaaggcctaccatagatttacaagtgggcttactaaacagcgatacgcaatttctaagaaatgtaaacagaagatattgggagcaaaacaataaggtaagttttcaaattgcgatgcccctcaccttctctgccgctagaggagaattggcagaagctaaaattaaaattagaaataccgagcttgaacaagatttggtacgtaatgatttaaacgtaaaactgagtcagaatttagctgaagccaatactttacagaaacaattacaaacaattaaagctgctttggtagccaaccaaaagctattagatggtgaagaaatgcgctttaaatttggtgacagctctttattcctcatcaatgctcgtgaaagtaaattgatagaagctcaggagaagctgatagaaactcaaaataagatccttaaaaataagctcaagaaagagtggcttttaggttctttaattaactgatttttttaggttaagtttgtaacgtcggtagcaccaaatgctatcgacgtttttattttcctcgtaaaattaaatttagtacatcatgagtggctaatcgaaaagtctaaaaaaaatagtgtcgaaaatcaggagacttcgacaccttttaaacccaccctcaattgggtttgtatacatcgcctaaagctgaaaagccaataactcatcgtcttgaagtaaacaagcttctaggtctttaagtatttgtattttatccatatcctgaccaataaataccaactcatttaaacgatcgccaaaccttttatcccacttactttctatataatctttgttttctatatagtctggatattggatacgctctgcaaaaggcatgctagcccaccaaactccagcaccttctaaacgggatgaaccacctgcttgcgaaaaattataagcttcttgaggtttatcggccatccaaaacaaacccttagacctgatgatgttatgcggaaattcttgttgcaggtaagccatccatctttctggatgaaaaggtcttttatctctaaaaacaaaagaactgataccgtattcttctgtttctgggatatgctcattttccaattctttttgccatcctgcagatgaggatgccttctcgaaatcaaactgatgggtaaaaagaatatcatgaaggttaaccttagaaaataccgtttctataatccttgcttcgggattaagtttgttgattaaagcttttaagagttttacatctccaggctgtaccaaatctattttgtttaagatgatggtattggcaaactctatttggtctgttaataggtttacaatggtacggttatcatcctccatgtctgttagctgcctatctttcaatagttctgctgttccaaaatctttaaagaaattataagcatccaccaccgtaatcatttgatcgatataactaaagcgtgaaaggtctatatccttttcttcatccttaaaagcaaaagtttgtgctacaggtataggctcagaaatacctgtactctctatcaaaaggtaatcaaacttgccctcactagctaatttttctacctctatcatcaaatcctctcttaaggtgcagcaaatacagccattactcatctccaccaatttctcttctgttctagaaagggtagcctcgtttttaaccaaacgggcatcaatatttacttcactcatatcattcacaatcacagcaacttttaagtcttctttattgtgtaaaatatggttaagcaaggtggttttcccgcttccaagaaaaccacttaaaactgttacaggcaacttcttattcatatctacttctattttgaagcaaatataatatcagcaaaacattaatgcaacataattgcattaatacttgtataagtctaaacttaaatttgctctgctgtaaagccggccttttttactgtatctgcaacttcttgtgcgcttagaccctctgcttctaccgttagtattttatccgcattagcggtatctacttcccatttgtttatacctgctaaggcatttaaagcaggcgttacagtggcaatacatccaccacatttaatattggttttaaattttatagtttccatgttcttgtatttatgatgttaaaaattttaagcgtaaactgtttgttactaccgatactgagcttaaagccattgctgcacctgctagcatcgggttcaataaaaatccgttaaagggatataaaattcctgctgcaaggggtatcccgataaggttataaataaaggcccaaaacaaattctgcctgatggtttttaccgtttgtgatgatagctgcaaagccttaggtatcaacctcaaatctgaggataccaaggtaattttagctacatctatggcaatatcagaacctttacccatagcaatagatacattggcctgcgctaaagcgtggctatcattgataccatcgcctatcatggctactactttaccttcttgctgtaatttctctacaaaagctgccttatccgcaggcaaaacatcagcttggtaatgtgtgatacccgtttgttgggcaatagctctggccgtttgctcattatctccggtaagcatataaaccgaaataccttgctgctgtaattgttgtatagcttctttagaacctgctttcacctcatcggcaatagccactacagccaaaacttctttactgtttgcaaaatataccagtgtataggcttgctcttttaaagccagtaattgctgctgcaaatcatcagcgatggctaaatttttaagctttagtattttatgactagctgctgtataagtttcctgctcaaaaaccgcttctacacccaaaccggttaggctgttaaattggcttagctgcactgcagctaatgttttttgctttaaatggctgataatagcctctgccaatgggtgttcagactgctgctctatagctaataaaaccgcctcgtatgttgctaccttatggagggctgcttttgcccataacacttgctgtacttgaggatgccctgctgtaatggtgcctgttttatctaaaatgatagcatttacctgatgaccagcctccaaagcctcggcatctttgatgaggataccctgctcggctcctttgccaatacccaccataatggcggttggcgtggctaaacctaaagcacaaggacaagcaataaccaataccgttaccatagccattaagccttgggtaaaagcatgctctccgccaaaaagcatccaaatggcaaaggttaaaagggctatcagcatcaccaccggtacaaatatcccggcaattttatctaccaatttctgtacaggtgctttagatccttgggcatcttgtaccagcttaataatttgcgccaataaggtatcctgacctaccttttctgctgtaaacttaaagctacccttttggtttatggtgcctgcaaaaaccgtatctccggtttgcttggctacagcaataggctctccgctaatcatactctcgtctacaaaagaattaccttctgctagcctgccgtctacaggtatcttctcacccgaccttatcaaaattaaatctcctacctgcacctggctaatcggaacttcttcctctccgctagcgcctaaacgtataaccgttttaggctgtaaacccataagcttttttatggctgtagaggtgctagattttgccctgccctctagcaatttccccagcatgataaaaacaatcactactgccgccgcctcaaaataaacatgcggatgtaaacctctttgatgccaaaaatgtgggttaaaagtattaaaaacgctaaaaatataagctatacctgtgcttaaagccaccaaagaatccatattggctttgccatgtttagcctgtttataagcattgatgaaaaaacttcgtccgtaaaagaacaaaacaggtgtgcttaaaaccagcatcagctcattggcataaggcatatccatcagaaacattcctatcaccaccacggggatggttaaaatagctgccagaataaagttatacttcaacttttgataagcctgctgctgcacttcttcctgcttttcttgcgcattttcttcgtctataatgatatcataacccacactttgtaaagctttctgtaaatcttgtggcttcacctgctctgggttaaagcttagcttaaccgactgattggcataatttacctcggcctgctgaacgccttcttgtgctgcaagcatactctccacacttaccgcacaacccgcacaagtcatccctgttaccgggaagttttgggtttttattgttgttgccatcttttcctccttttcataacacaaatttatgggctttaatagcgaaagtgttatacagttttaggaaagtgttatataatttttgtggttgagtggtttatgaaagagattggaagaaataaaaaagccccgaagatagtcgaggcactaaatgttttcacaacagaataatccttttaatttatttagtacaaaaaaaggcgagttgccccgccttgaatgttttcacaacggaataatccttattgtgatttgctttcaaaatcaaaggtataatttatttttaaattacaaatacggaaaaacataaactgtaaaaaaaatatttatatatttagcaagacaatttattaactactatgacaaaacatatattaggccttgatttagggaccaattctattggttgggcaattatcaaagtggatgataataatgttccgattaaaataattgcaatgggttcacgaataattcctttgtattcaaacgatagagaccaatttcaaaaaggacaagctatatcaaaaaataaagatagaactacagctaggactcaaagaaaaggttatgatagaaaacaactaaaaaaatctgataattttaaatatagtctgaaaaagattttagagaaacttgacatcttccctaccgaagaattaatgaaattacccactctcgatttatggaaactaagaagtgatgcggtttctgacattgaaaatataactcctaaacaattaggtagaatactttatatgctcaaccaaaaaagaggatataaatcagcaagaagtgaagctaatgcagacaaaaaagacactgattatgtggcagaagtaaagggaagatataaattattaaaagaacaaaaccaaactttagggcaatacttctataatgaattatctgcagcaaatcaaaataatacttattttagagttaaagaaaaggtctatcctagggaagcctatatcgaagaatttgatgctataattaatacacaaaaacctaaacactcatttttaactgatgatgtcattcactcattacgtaatgaaatcatctactaccaacgtaagctaaaatcacaaaagggcttagtaaacgtttgtgaattcgaaggttttgaaactacttattttgatgaaaaaacacaacaaaataaaaccatatttacaggaccaaaagttgccccaagaacatctccattatttcaactctgcaaaatatgggaagttgtgaataacatttcactaaaaattaaaaatccagaaggaagtaaatataagtggggcgatagaatacctactattgaagaaaaacaaacaattgcagattatctgctagaaaatgaaaatttaagtttcgtagaattacttaaaattttagggctcaaaaaagaacaggtttatgccaataaacagatattaaaaggtattcaaggcaatataaccttttcagctattcataaaatcataggtaatagtgaacatctaaaatttgatattcatactgtaccatcaaaacatttagctattttattagataaaaaaactggtgaaattttagacgagggagatagcatagaattaagttcagctttagaacaagaacctttgtatcaattatggcatacaatttattctataaaagagttagatgagtgcaaaaatgccttaatgaagcgttttaactttgaagaagaaattgcagaaagactttctaaaattgattttaacaagccagcatttgggaataaatctaataaagcaatgcgaaaaatgttaccttatttaatgttaggttacaaccaatctgatgctgaaagttttgctggttataatagaaaatttactaaagaagaaaaatcaaaaaatatttcagatgagcctttgcaattattggctaaaaacagcttgcgacaaccagtagtagaaaaaattcttaaccaaatgataaatgtagtaaatgcaattatccagaaatatggaaaacctgaggagattagagttgagcttgctagagaattaaaacaaagtaaagatgagcgagaagacgctgataagctaaatggttttaataaaaaacttaatgaattagtcgcaactaaacttactgaacttggactaccgacaaccaaacgctacattcaaaaatataagtttatttttccggcaaaggataaaaactggaaagaagcccaagttgcaaatcaatgtatttattgtggtgaaacattcaatctgaccgaagcactaagtggagataacttcgatgtagatcatatagtaccaaaagcattattgtttgatgattcgcaaactaataaagtactggtgcatagaagttgtaacgctaccaaaacaaacaatacagcttacgactatattgctaaaaaagggaatgaagcgttaaacgcttatgttaccagagtagatgattggtttaaacgaggaataatttcttacggaaaaatgcaacgtttaaaagtttcatttgaagaatatcaagaacgtaagaaagtcggtaaagaaacagaagctgataaaaggttgtgggaaaactttattgacagacaattacgtgaaacagcttacattgctagaaaagcaaaagaaatattaggaaaagtttgccataatgtgacgagcacagagggaaatgttactgcaaaactacgacaactttggggttgggaagatgtattaatgaacttacaatttgaaagatttaaatatgcaaaccaaacaaagttggagacttggactagtgatcatggcaatagaaagcatactaaagaaattatcgacaaagaaatttggacaaaaagagatgaccatcgccatcatgcaatagatgccctagttatagcttgtactcaacaaggctttatacaacgcataaatacgctgagtagtagcgatgtaaaagatggaatgagaaaagaattggaagaagatagaattgtttacaacgaacgattaacattactagaaaattatttagtagagaaaaagcctttctcaactgaagaaattgaacatgaagcagacaagattttagtatcttttaaagcaggaaaaaaagtagcaactatcagcagatataaagctgtaggcgaaaataaaaaaacaggtgtgattgtgccaagaggtgctttgcatgaacagtttgtttatggaaaaattaaaactatctctaaggatttcaagacaggtacattaattaaatatcctattaagtatctctttgaaaacccaaatctgattgctgaaccactcattaaaataaaagtgaaagaaagacttcttgatttcaataatgacatcaaaaagtctattgaatccttaaaaaagtctcctatttaccttgacttaggcaaaactatattactgacttcttctcattgttataaggatgaatttgtgattaaatataaaatcacagatttaaaaaaggatgatgtaaaatatattatcgatgaaaaagtaaagcaattggttcaagagagattagatgctcacaatggtaaggaaaaagaagcatttaaagatacactctggtttaatgaaaataaaaaaatacctatattaacagttagatgttttacaggtctttccgcagttgaagccatcaaaaaagatgataatggcaaagaaattggttttgcaaaaactggaaacaatcatcatatagctttatatagggatgacacaggtaaatatatacaacacttatgtaccttttggcatgcagtagagcgtaagaagttcaaaattccttatatcattaaaaatacaaatactctttggaatgaattaatcaacaaagaattacctcaaccatttttagataaacttcctgctgataatttggagctacaacttagtatgcaacaaaatgaaatgtttgtactaggattatcaaaagaagaatttgatgaagcaatgcgacaaaacaacaagtccttattaagtaaacacttgtatttagtttggagtattggtgataatcaatactggtttagacatcatttagagactaaaaactctgaattaaaggtaacattgggcgctaaagaaagtagaagattttacttatttaaaagtgttggagcatttctatctaagaacccaataaaagtacgtttgaaccatttaggtgaaattacaaaaattggagaataaaaatcatggaaaatctccaaattaatcaatattaccacatttacaaccatgctaacggcgatgataatttatttagagaagctaagaattatccatttttcttatcgaagtatcatattcatattgaccctatagcagaaacaattgcgtggtgtttaatgcctaaccatttccacctgttggtgcgtataaaagatgaagaagaattagaacgagattttccaaagttcagaactttggaaaatctaagttccgaagaaaaacaactccaactttcctacctattatctaaacagtttgccaacttttttagctcctatacccaatcatttaataaggtttaccagagacgaggttcattatttctgaaaaattttaaaagaaaagaggttgaagatcaaaactatttattccaccttattttatatattcacctcaatcctattaaacatggctttacaaatgagcttacagagtgggaatggtcatcttttcatcatttaaatagtcaacagccaaaattaagttcagagttatttggtacaactaccgattatttaaatcatcatcaagaaaaacgtgattgctttaaagaatacctccacatagaaaatcaaatcctaacactatgaatgacctatgattaaaagaaccctctacttcagtaacccggcttatctcaacttaaaagataggcaattacagatagacctcccccatttaaaaactttgggaacagaagaatccgtaaaattggtacctattgaagatataggtgttattattttagacaatcagcaaataaccataacacatgccagtattgctgctttattagagaataaagtagcggtaattacttgcgataaaagccatcatcctataggaatgttgctccctttggatggacatgatacgcaaagtgagcgttttagatatcaaatagatgcctcattacctttaaaaaaacaattgtggcagcaaacagtacaagctaagattttaaaccaggcggcagttttatttgaaagaggaatagcttgcgaaaatatgattcattgggctagagcagtacgctctggcgaccctgataattacgaaggccgagcagcagcctattattggagaaacgttttccctaaaaaattagacttctttaggggcagagatggcgacccacctaataatttattaaactatggttatgctattttaagagctattgtagctagagctttagtctcctcggggctgttacccactttaggaatacatcatagaaataaatataatgcttattgcttggccgatgatattatggagccctaccgcccttttgtagataaaattgtacttaaaattatagataatggtgagaatttcttagaattaaacaccgccataaaatctcagttattaagcattgctagtgttgatgtaagttttgaaaaaggcacaagccccttaatggttggcttacagtatactacagcatcattagctaaatgctatgagggcactttaagaaaaattaactaccctattataaaagattttgatgccaaaagaataggatacctaaaaaatattgatgatacccctataagttatgccgctgaaaaaaccataaaatatggaaataaaaaaagtacagacgagcccgaattacctttttaggaaatgcgcttaaaccaatatcgcgttttgtggatattggtattttttgatttgcctactgagactaaaaaagaaaggcagatttatactcgctttagaaaagacatcatgcgagatggctttactatgtttcaattttctatttatttacggcattgtagtagccgagaaaatgcggaagtacatataaaaagggtgaaaaacctacttccagctaaaggacatataggtatcatgaccgttactgataagcaatttggaatgatggaattgttttacggtaaggaagaaaagaacctacctagtaccccacagcaattagaattattttaaagcaagttgatagcaagaaaaaaattgaacataaaaaaatccggaagataaactgaccggatttttttattcctgattttacatttaaaatactgatttacaattttttaaaccaaggtatgttgttgtaaatatcagtagttcaaagaatgaaagcaaatcacaacaggaaatcatattgtttgggatgaaatttcgttgttgtaaatatcagtagttcaaagaatgaaagcaaatcacaacggcataaccacacacaaccgaaataaagaagttgttgtaaatatcagtagttcaaagaatgaaagcaaatcacaacactacggcttcgacaacttcaaaataacaagttgttgtaaatatcagtagttcaaagaatgaaagcaaatcacaacagtaattgccaccgacattttcacaacagcgttgttgtaaatatcagtagttcaaagaatgaaagcaaatcacaaccctaaaaaacaattacgtaaatgaaaatccgttgttgtaaatatcagtagttcaaagaatgaaagcaaatcacaacctctatctcttcgccaccaactaagcgagggttgttgtaaatatcagtagttcaaagaatgaaagcaaatcacaacgcttttggctatggtgatacttgggttggggttgttgtaaatatcagtagttcaaagaatgaaagcaaatcacaactagatatgggtgtgggtaaaggcatgcctagttgttgtaaatatcagtagttcaaagaatgaaagcaaatcacaacttgcggatgaaacttgcttagcctgtggaagttgttgtaaatatcagtagttcaaagaatgaaagcaaatcacaacgaacaatacaataatactttgggtaaaactgttgttgtaaatatcagtagttcaaagaatgaaagcaaatcacaacctattttgagatgcctgaatagaaaaatcagttgttgtaaatatcagtagttcaaagaatgaaagcaaatcacaacaagagctataggcatctcttttatactttgttgttgtaaatatcagtagttcaaagaatgaaagcaaatcacaacttagaaacaacagtgttagcgtcataaaaggttgttgtaaatatcagtagttcaaagaatgaaagcaaatcacaacatgtgggaagcagtaatattaacactatttgttgttgtaaatatcagtagttcaaagaatgaaagcaaatcacaacatatccgcctccctttcatcaactattaacgttgttgtaaatatcagtagttcaaagaatgaaagcaaatcacaacaatcctttacctagtttaatctgataatgtgttgttgtaaatatcagtagttcaaagaatgaaagcaaatcacaacaatgggatgaagttgcaaaccagggcggatgttgttgtaaatatcagtagttcaaagaatgaaagcaaatcacaaccatctgaattagtgttagttaagtattcaggttgttgtaaatatcagtagttcaaagaatgaaagcaaatcacaacttgctgataaattgcaaatgcaaattgaaagttgttgtaaatatcagtagttcaaagaatgaaagcaaatcacaactcattattattttttaataatgtccattctgttgttgtaaatatcagtagttcaaagaatgaaagcaaatcacaacgccacagcctttggtaaagagatagacagcgttgttgtaaatatcagtagttcaaagaatgaaagcaaatcacaactcaatagttaaaacgcttacttcaacatacgttgttgtaaatatcagtagttcaaagaatgaaagcaaatcacaacaagattcgattgggccttatcagcataaggttgttgtaaatatcagtagttcaaagaatgaaagcaaatcacaactcaccatatgttcataatttggtgacatgtgttgttgtaaatatcagtagttcaaagaatgaaagcaaatcacaacctggaggtggagcaagtgcaactgacatttgttgttgtaaatatcagtagttcaaagaatgaaagcaaatcacaacctatatgtagccacatcatttaaagttggagttgttgtaaatatcagtagttcaaagaatgaaagcaaatcacaacactgtttacgatgctaattcaggcggttttgttgttgtaaatatcagtagttcaaagaatgaaagcaaatcacaacccatagccaccgcatgcgaagcttttttacgttgttgtaaatatcagtagttcaaagaatgaaagcaaatcacaacgaggttgatgttaattccttgcctttagcagttgttgtaaatatcagtagttcaaagaatgaaagcaaatcacaactacaccagatacagcacacccaaagaaagtgttgttgtaaatatcagtagttcaaagaatgaaagcaaatcacaactcactatctgatgatttaaactctggaaaagttgttgtaaatatcagtagttcaaagaatgaaagcaaatcacaaccgctgccatagcctggttagataaagtaaggttgttgtaaatatcagtagttcaaagaatgaaagcaaatcacaacagcttcttctttgttattagctaatgttgcgttgttgtaaatatcagtagttcaaagaatgaaagcaaatcacaacggaaacaatcttgccggcttagaaggttacgttgttgtaaatatcagtagttcaaagaatgaaagcaaatcacaacaaagttgagatagaagaaaatcaaattacagttgttgtaaatatcagtagttcaaagaatgaaagcaaatcacaacattcggacaaatcgaaaataaggaacgatagttgttgtaaatatcagtagttcaaagaatgaaagcaaatcacaacaaacaaagaatagctgagctaaagaaagaagttgttgtaaatatcagtagttcaaagaatgaaagcaaatcacaacatgtagaatgtttcaaaaccatagattaagttgttgtaaatatcagtagttcaaagaatgaaagcaaatcacaacggattgcgtgggcgcataatagcggtaaccgttgttgtaaatatcagtagttcaaagaatgaaagcaaatcacaacttaaaggtggtagggtagatttaacggatagttgttgtaaatatcagtagttcaaagaatgaaagcaaatcacaactatcatttattttggttgtgtatgggtgtagttgttgtaaatatcagtagttcaaagaatgaaagcaaatcacaacaaattcagtctaactctgaaaagaaaaccggttgttgtaaatatcagtagttcaaagaatgaaagcaaatcacaacccttaccgcaaaaaggttttagaaccattggttgttgtaaatatcagtagttcaaagaatgaaagcaaatcacaaccgaggattttgttacattttcattaagctgttgttgtaaatatcagtagttcaaagaatgaaagcaaatcacaacaattaaaatgtattaatcaatataaaattagttgttgtaaatatcagtagttcaaagaatgaaagcaaatcacaacgatgtacccaatgaagatgccagggctttagttgttgtaaatatcagtagttcaaagaatgaaagcaaatcacaactatactctttatttgttaacccagaaaatagttgttgtaaatatcagtagttcaaagaatgaaagcaaatcacaactgcttgtgctcctgtagcaaaagcagatttgttgttgtaaatatcagtagttcaaagaatgaaagcaaatcacaacagggatttggatgctgcttttagattgacagttgttgtaaatatcagtagttcaaagaatgaaagcaaatcacaacagatttagagattttgtccatcgcttcgatgttgttgtaaatatcagtagttcaaagaatgaaagcaaatcacaacttttatctattttgttttcgatgtcttttagttgttgtaaatatcagtagttcaaagaatgaaagcaaatcacaacagcctaagcctgttatattatatgattttggttgttgtaaatatcagtagttcaaagaatgaaagcaaatcacaacacttgataccttcaaataaattccctagaagttgttgtaaatatcagtagttcaaagaatgaaagcaaatcacaacgaaacgccagtaatgaagaagagtttttatgttgttgtaaatatcagtagttcaaagaatgaaagcaaatcacaacaaaatgctctcatcaagcttatgcactggtgttgttgtaaatatcagtagttcaaagaatgaaagcaaatcacaaccataaagatggtaccgtagaagaagccattgttgttgtaaatatcagtagttcaaagaatgaaagcaaatcacaacactattccattgcagcaattaaagggcctggttgttgtaaatatcagtagttcaaagaatgaaagcaaatcacaacggattgaaattaccggtcaaggtcaatcatgttgttgtaaatatcagtagttcaaagaatgaaagcaaatcacaacttacgcagcaagtaacaattaagaatttagttgttgtaaatatcagtagttcaaagaatgaaagcaaatcacaacacaacctttttcttttacctcatcaatcaagttgttgtaaatatcagtagttcaaagaatgaaagcaaatcacaactacctttcaatagggttgtattcatgtatagttgttgtaaatatcagtagttcaaagaatgaaagcaaatcacaacaccttttttaaacctatttgctaaagttttgttgttgtaaatatcagtagttcaaagaatgaaagcaaatcacaacactaattgaacaaatacataaaggataatcgttgttgtaaatatcagtagttcaaagaatgaaagcaaatcacaacaatgttatacaaggttttagatgatataccgttgttgtaaatatcagtagttcaaagaatgaaagcaaatcacaacaatgttatacaaggttttagatgatataccgttgttgtaaatatcagtagttcaaagaatgaaagcaaatcacaacaccaaatctcgctctacttgcctcataatggttgttgtaaatatcagtagttcaaagaatgaaagcaaatcacaacgcttgactctgttaaaccaataagccctgagttgttgtaaatatcagtagttcaaagaatgaaagcaaatcacaacacactcccagcgtctaccaattccgccaccgttgttgtaaatatcagtagttcaaagaatgaaagcaaatcacaacacacaacaagcattagataggcaaataaaagttgttgtaaatatcagtagttcaaagaatgaaagcaaatcacaacgatgtaaagcttttacataaagatgttacagttgttgtaaatatcagtagttcaaagaatgaaagcaaatcacaacagacttcttgatgagcctaatacgcaacatgttgttgtaaatatcagtagttcaaagaatgaaagcaaatcacaacagagcaaacaaaaagagttggtattgcgtggttgttgtaaatatcagtagttcaaagaatgaaagcaaatcacaacttaatacctatgtggatgattgccaaccaagttgttgtaaatatcagtagttcaaagaatgaaagcaaatcacaacctattattaacgttgttaactcttatattggttgttgtaaatatcagtagttcaaagaatgaaagcaaatcacaacatcaaaaggaaacatcaggatacttaaacagttgttgtaaatatcagtagttcaaagaatgaaagcaaatcacaacacaaacagaggattggtaacaattacgttagttgttgtaaatatcagtagttcaaagaatgaaagcaaatcacaacctgtgactcaacattctatagcgtatgttggttgttgtaaatatcagtagttcaaagaatgaaagcaaatcacaacattcgaaccctgtagtaatcagcgaagttcgttgttgtaaatatcagtagttcaaagaatgaaagcaaatcacaacgaataaacagtctttccttctggattgatagttgttgtaaatatcagtagttcaaagaatgaaagcaaatcacaacaatccaaagaagcatttaacgactttatgcgttgttgtaaatatcagtagttcaaagaatgaaagcaaatcacaacaaatcagagccagcaaatagattgatttgttgttgtaaatatcagtagttcaaagaatgaaagcaaatcacaacaaagagcgattaggcaggtctcctgactttgttgttgtaaatatcagtagttcaaagaatgaaagcaaatcacaacaaagagcgattaggcaggtctcctgactttgttgttgtaaatatcagtagttcaaagaatgaaagcaaatcacaacatgtggatgaggtaaaaaggttaaaggctggttgttgtaaatatcagtagttcaaagaatgaaagcaaatcacaacagccaagaacaaaagaatatcaataaacaagttgttgtaaatatcagtagttcaaagaatgaaagcaaatcacaacgccggcaagagctgccagaagtaccacccagttgttgtaaatatcagtagttcaaagaatgaaagcaaatcacaaccgcccggtagtaggatgaaaaccattaccagttgttgtaaatatcagtagttcaaagaatgaaagcaaatcacaacaacagaaaagaaagccatttttattgcgtggttgttgtaaatatcagtagttcaaagaatgaaagcaaatcacaaccatttacaccagtagagcctttcccaagtggttgttgtaaatatcagtagttcaaagaatgaaagcaaatcacaacaatgtacaaaatggtacggtagtaactgtagttgttgtaaatatcagtagttcaaagaatgaaagcaaatcacaacaatggaggctaccatgtgccaattctttgtgttgttgtaaatatcagtagttcaaagaatgaaagcaaatcacaaccaatgtctaattacaggaaaaccttcataagttgttgtaaatatcagtagttcaaagaatgaaagcaaatcacaaccaaggggttttaatcttaaaggtaaatttggttgttgtaaatatcagtagttcaaagaatgaaagcaaatcacaacggtctgtaaagtactgccatagctttatgagttgttgtaaatatcagtagttcaaagaatgaaagcaaatcacaacatagtttcagctccaaataaattatacgtagttgttgtaaatatcagtagttcaaagaatgaaagcaaatcacaacataatgaagactacccagaggacttggtgggttgttgtaaatatcagtagttcaaagaatgaaagcaaatcacaactgtctgtataatatatagctgtagttctatgttgttgtaaatatcagtagttcaaagaatgaaagcaaatcacaactagactctaggtctgtacaagacagattaggttgttgtaaatatcagtagttcaaagaatgaaagcaaatcacaactaacgatgctacaagattgaataactctgcgttgttgtaaatatcagtagttcaaagaatgaaagcaaatcacaacacaggtttagagtcttgtattataggacacgttgttgtaaatatcagtagttcaaagaatgaaagcaaatcacaacgatgaaactaaaacagttaccgctggggcgttgttgtaaatatcagtagttcaaagaatgaaagcaaatcacaacgataacatggacaaagtagagcgtcttcaagttgttgtaaatatcagtagttcaaagaatgaaagcaaatcacaacttgtaaacagtgtcttctatgattactattgttgttgtaaatatcagtagttcaaagaatgaaagcaaatcacaacagt

SEQ ID NO: 1711 - DNA, 23816 bp, synthetic construct
  misc_feature 1..23816: note = Synthetic
  source 1..23816: mol_type = other DNA
ttacccatccgccgtagaaaaaatgattggtgtaattattttgatgtaaaatgcgcaacaaagaatgaaattcgggattgttgggatattgatccgtaaaacctttgtctcctaagggtgatgcgccgaatagcgcaggaagtacgccaaatgttcgggcagaaacgctcaaacaatattcccacaacagactctgttttgatagcgaatctaaaaaaggcattaattgatagtctgttttaaagaaatcataacctaaaccttccacaataataaaaactaaattgggcggctccggtttcaagttaaaatacggagatagaacatctttataggtcgcctgataaagaaatggatattctacttctgcaaatttatgttccggaaaataggcgcgaaattcttttacagctttgttgatttctttattattttccttaaaaagaggattttgtgttttaaatacgctttgcaaaaaaaagtattgcttattcactttcacaaggtactgctgtgtgtgtgttggaggtttattaaaaataaagaaagaaaataaggttaatgaagcaaatataaccaacagcgtattattgattttgattcttttgcctgataaataaaaatacaacacaggtagcgcaatcataatcatataaatccaaagcgggcttttgccgctcgacctgatgatataccacatttcttttaatgagtaagtgaaaaccaccttgtcgagaagaaatccggaagtagcgaaaaatacaatacatattagcgacaaaaatagcatcagacttaagagaatacgtaaagtaagtcttgatattttttcgtttaaaaaacaagctgcaacgaaaagtacaagtatccaaaatcctgtgcgtaagaataaaaagatgtcgtatcccaagcctgttaaattccattggagatttgaaacgaaactatgatgattcacctgatttaaaagaatcgcttcaaacaaacgcaatgcaacggcaaaaataagtaaccaaatacacagttcgatgtaagacttgcaaaatattactgctcttgataaaaaaagagcgatttttttcttcataaaggaatatttatgatgcctgcaaaaataagttttttcattattgttttttaggaaatttcgtttagaaaaaaatatatttttgcacccccaaaataaaaaataatttttagcataatatagcaatgaaaagaacgtaccaaccgtcgaacagaagacgcaaaaacaagcacggatttagagaaagaatggcaactgcaaacggtcgcagagtattggcagcccgcagagcaaaaggcagaaagaaacttacggtttccgatgaacctcacgataaaaaataattgttgtaacgtgctgtgaagaagctccatattgaaacttacggctgtcaaatgaatgttgcagacagcgaagtggtagcttccattttatctccctattataccataacagattcgcttcgagaagcggatctgattttgttaaatacgtgttcggtgcgcgataatgccgaacaacgcatcagaaaacgcttgcgcgaattagcatcgttaaaaaagaaaaacaaaaacttattgctcggattactcggttgcatggcggaacgcattaaagaacagctgcttgaacaagaaaaagcgttagattttattgccggtcccgatgcctaccgctcattacctcagttgattgaaggcgcctctttgggcaatacttcttttaacgtacttctctcagaaaaagaaacttacgatgatattgaccccgtgcgttacgatagcaacggcatttccgcctttattgccattatgcgcgggtgcaacaatttttgctcctattgcgtagtaccttacacccgtggaagagagcgtagccgcgagccgaaaaccattattgaagaagcacaaaatttgtttgaaaaaggattccgtgaagtgactcttttaggacaaaacgtaaactcatattattggaaagacgtccttagtaacatggattttgcggatttagtcgagaaaattgcgcaaatttccccattattgcgtgttcgatatgccacttcacacccaaaagacatctcagataaattgttgcttattatggcgaaatatccgaatgtatgccattacattcatttgccggtacaatcgggaagcaataacatgctgaaaaagatgaatcgcgtgtactctcgcgaatattatttggaacgcattcgaaaaattaaggaaatattgcctgattgcgcgatttctaccgatattattgccggtttttgcggagaaaccgagcaagatcatcaagatactttaaatttgatgaaagaagtgggttatgaatatgcttttatgtttaaatattcggtacgtgaaggcacaaaagcagcggagaaatttgaagatgacatcacggaagaattgaaaattaaacgtctagaagaaattattgcacttcaacaacaactttcgttagaaagcaacaaaagagatatcggtaaaacggttaccgtgttagttgaaggaatatccaaacgttccgacgagtatcttttcggcagaaattcgcaaaataaagtgtgtgtatttcccaaaaaacattacaaaatcggcgattatgtggaagtgaagattgtaaaatgcactgcaggcacattaattggcgaggcattataataatgaaaatcaaactattatttataggaaaagaaagcttggaagaactgcaagttgcttcacaggactatattcccaaaattaataactacaatagttttgagattgaggcgattccatatttaaaaaataccaaatcgttatctatagaattgcaaaaaaaacaagaaggagaacttttcctcaaaaaaataaccgtacaagatgttgttgttttgctcgatgagcacggaaaagagtattcttcaatacaattttcacaatttattcaacaacgattaaattcaggatgtaaaaatgtattatttttaataggaggtgcttatggtttctctgaggaactgtaccggcgtgccaatttcaccttatctatgtcaaaaatgacttttccgcataaattagcccgtttgctattcatagaacaactctatcgcacatttaccattctaaaaggcgaaccctaccatcacgaataatttttgctactaaggttgctttaaaaaataaggcttctttccgctaaccgccaaccgcttgccgtctacaacattctttcccaaacccaactcggcactattcgcattgcaaaaacgataaaacgccacttgctatccacgaaaatgtagcgtttttgtttaagcaatccttttgcgataatacgcaccgcttttttcaacggaagcgttaacggatatttatgatccttaattaaatccgtatctacaaagccgggaataatcgtagtaaattttatatttagcttattatgatgtgccgtttgagccaaactctcaataaaaagacgttgatagcctttagtagcagagtaggagggggcaccgcgtaagcctcgataacctgccacggaagagattaccgcaaaatgaccatttccttggtttttgaagtaattgtatgcaaaacaggcaatttttgtaaatccgtcgatattggttttgttggtgcggttttcattttcgtaatcaatgtctaaaagcgcttttccgatccctgaagaatacaacaacatatccattccgtccaattcttgaatcagattttctaaaacagtaatggtattttcttggataacatccatttttgctgtttttatattggaaaattgacttgcaatttcttccagtagatcatttcttctaccggtaattccaacttgatgcccttgattcgccaaaatttccgctgttccgcgtcctaatccggaagtgccgcctataatgatgattttcatgtttttatgattttttagttttatataaactaccccgtctcgcttcgcgagccaccccttcaaattttgaaggggattattctaccgttttctttccccctcccgttttcgctttcgtgctttccgcttacattcctaaaatcccaataatttcaaaaagcgttgtttttacttgctcgccggtttccatattttttagtgtgaaaagcgattcttttatttcttcttcgcctgccataatgacgtacggaatctgcttggcattggcataactcatttgttttccaatttttgcattgtcgggataaatctccgaggcaatctcatttttgcgtaattctgcaagcgcttttagagcgtaaagttcttccgtttcaccgaaattcagaaataatgcttttacaggtgctccaatttcattggggaacaaattacattcattcaaaatgtcgtaaatacgctctgcgccgtaagagattcccacgcccgacatctcttttagcccaaaaatgccggtcagatcgtcgtaacgtccgccgcctgaaatgctgcccataacgacgctaacggcttttacttcaaaaatggcgccggtgtaataatttagtccacgtgccaatgtaatatccaattccggttcaataattccaacttcttggcaataagcaaatactgttttaagttcttgcacccctgttttacctatttcgctttctgcaaaaaaacgttctaaaaacgctaacttttcttcatttttgcctgaaaaatcaaaaaaaggttcaattttagcaattgcttcttcgggaatttcacgctctcgcaattcggcaaacacattctctttgccgattttatcaattttatcgatggcaacacaaatatccgtaattttttccggcaatccgataatttctgcaattcccgataaaatttttctattgttcatttttataacaataggaatattgaatgctgcaaatatttcatacgtaatttgcaataattcaacttcttgaagcaatgatttcgtaccaatcacatctacatcgcattgatagaattcacgataacgacctctttgcggtcgatcggcgcgccataccggctgcatctgatagcgtttgaaagggaaaacaagcttatcacgatgttgcaccacaaagcgggcaaaaggaacggttaaatcatagcgcaatcccttttcacaaatcttaggtgcaatttgatttgcggttccttcattaaaattcactcccgccataaaatctcccgaatttagtattttgaataagaggcgatcaccctcttcaccatatttccccatcaaggttgataaattctccatagaaggcgtttcaatgggaaggtatgcatatttttcaaacaccttttgaatggtattgaaaatatagtttctccgaatcatttcttccggtaaaaaatcccgtgtacctttgggaattgagggtttttgagtcatagatttaagaatttaaagatttaaaatttaagagttcggaatgtgtacatgaaaatacttgctgctattgccgcatttaaggattccggcgccgagttttcgtgcgagaacataggtatttctatttttttattaacataggaagccgtttcttctgaaattccatgactttcgcttccgataattacaatgtcattatttttaaatgattgtttttgaataggttcaccattcatatataatccataaacaactctctggttttgtgttttcaaataattagaaagatttgcataaacaattttcactctggtgaatgaacccatagtagcttgaattactttgggattggtaagttctacacagtcttcagagcataaaatttggtcaaaaccgaaccaatctgcagttcgtattatcgtacctaaattgcccgggtctctgatagaatcgagtattaataacggcttaatatcactaagggcatcaagttggtattgcgttttttttacaatgcacaaaatatccggtgcggtggtgaggcaactgatacgttccatttctttttcggaaatggtaacgatgtttgaatgggactcctcgctacgctcggaatgacgggtggttacgtaacattgtaccacctcaaaacccgattgtaatacctccatgcatgactttaccccttccacaataaaaagcccctgctcatcacgatgttttttatgatgtagcaaacggatttgcgaaatgagagctttagaaatcaacgttgtaaaatatttttttaatgcaaaacgtttctatgtttttgcgctgcaaaactatgtaaagttttcaacgttcaacaaaaaaacatattttcgccgttaaaattaagatacaaaatcaaaaatgaaaacactgcacttcacataccgtactccacacactgcgcacctaattgcctttctcctttctgctttcctccttgctcccttttctctttccgcacaaaaaagcaaacaaaaagaacccgaacgtaaattagtattcaacattaaagattctaaagacagccaactgctattggcagttcattttaaagacaagttaatgttgagagattctgcatttaacaatggtaaaggcacttttgtttttgaaggagatgaaaaatacgacgatggcatgtattcattagtgtccggcaacaagcgccttcttttgaattttattatggatggaagccaaaactttatttacaatttagatactaccggaaatgtgagtgatttttctgtaattggctcacccgagaatgcggaaatgttacgctttcaacaaaaaaccgttgatgcgcaaagaaaaatgtcggtatggagtagaaaaagaaaagagtttgaagataaaggaactaaagacagcgcagagtattattcggaaaagatgaagagtatgaatacggagatggaacaatttattatggaattaattaataaaaatcccactttcttattttcaaaactacaaaaatcatatcgcgatattaaaattcctgatccgccggtttacgaagatggctctatagattcctcatttcaagctacttattataagacgcattattgggataattttgatttgaccgatagtagatttttatttttaccttcttttgaacccaaattgaacgattatttcagaaaaacactatggcttcaagaagtggatacggtaaataaatatatagacttgatgttgtataaaacgcagtctgacagcttaatgtatcgttatttaatagaatttttgtcgaaagagtatgaaaacagtaatgttatcggatatgacggtatttttgtgcatatagttaaaaataatcaacttgcaggaaaatgtacttggatgggtgaagatttaattaagagatataaaatgcgtattgaagatttggagcctatattgattggcaaaaaatcggtggaactgattttaccggatacgtcgcagacaaagtggcattcgtcttataatatgccttacaagtacagaattttgtggttttatgatcagaattgccctacttgcaatagagaaggcaaagagctgaaaatgttatacgattcgctatcaaatatcggacaactcaattttgacgtatacgccgtaaatcgaactgaaaatattgatagttggaaaaaatatattattgataatgagtacacatggattaacgtgggtggaataaaaggcaatgtggattggtacgaggcttatcgcatcaaatccaacccacaactttatatcattgatcaagataaggttattatcttaaatagaaatattcctaaagatatgattccgtattttttacaagaccatgaaaaattgaaagcggataaagaacgattgaaaaataaaaaacgatgaattttgtagaagaattaaaatggcgcggcatgctgcacgatgcaatgcccggaaccgaagaacaattgcaaaaagagatgactttggcgtatgtgggtattgacccaactgccgattccttgcacataggacacttggtaggcgtaatgatgttgaaacatcttcaactttgcggacataaaccgattgcgctattaggcggcgccaccggcatgattggcgacccgtccggaaaatcgcaagagcgtaatctattggacttggaaaccttacgaaaaaatcaggatggaattaaaaaacagctggctaaatttttgaattttgaagacaacgtgccaaacgcggcaatgttagttaacaattacgattggatgtccaaatattcgtttcttgattttattcgcgatattggaaaacatctcactgtaaactacatgatggcaaaagattccgtaaaaaaacgcttctccggcgaaggcgatggcatgtcgtttacggaatttacctaccaattagtgcagggttacgattatctatttctgtatcaaacctatggctgtaaattgcaaatgggtggcagtgatcaatggggcaacattaccaccggcacggagttgattcgcagaaaaaccggcggcgaagcgtttgccatagtttgcccgcttattaccaaagccgatggcggtaaattcggcaaaaccgaacaaggaaacatttggttagatccggagaaaacctctccttatcaattttatcagttttggctcaactgttctgatgatgattctaaaagatatatccgcatttttacgctactaagcgaaactgaaattaaagaaattgaggcagcgcataatgaagcgccccatttgcgtcttttgcagaaaaaattggcgcaagatttgacctgccgcgtgcattccgaagcagagtacgatgctgctgtagccgcctctgaaattttgtttggaaagggcacggcggaatcgttagctgcgcttccggaaaaaacttttctgtctgtttttgaaggcgtaccgcaagtagaaatagacaaatccattataaaagaaggaattaacattgtagatttcttgacggatgttactcaaatatttccttccaaaggcgaagcgcgaagaacattgaaagaaaacgggatttctattaacaaagagaaaattaccgatgcttttacggtggatttgggtgctgtgctaaatgggaagtatattttggtgcagcgggggaaaaagagttattatattgttggggtgagataggatagaaaatacgagtttttaagaaaatgtttttcttcggtggacaattttgacaatatggacatcgtttgaatgttgtcacaaaagtccgcatcgtccaccggaaacaacaactaaaaatactaaaccctaaactaaaatggaagctcactacaactcagacggtttcatacccaagcacggaggctatcaaaagctaataactttccaaaaagcagaaattatttacgatggcacttattatttctgccacaaatattttcaaaaatacgatcgtacaatagaccaaatgattcaagcagctcgttccggaaagcaaaatattgtagaaggcagtatggattcgggaacttcaaaagaaattgagataaagcttactaatgtagcccgtggttctcttgaagaattactcaacgattacaaagattttttgagaacgcgaaaactaaaactttgggataaaacacacccttattatcctcacttgacgaaattgcacgtaaccccaaacactacttacgaaaactaccgcaaaggaattgaaagccctgatccggaagttgctgccaatgtgatgatcagtttgattaatattacctcttttttactggctaagcaaataaaagcattagaacaggaatttttgcaagaaggaggtttacgcgaaagaatgacgcaggcgcggattaatgtgaggaaacggagagggtaaacaaaaaagcgagaaaaattcccgctttacatgttttcacaacggaataatccttattgtgatttgcttctaaagtttgtgcggcgaaattaaactttttttacaaagagaagaaaaaagttctatttttggcacattattttgaaaaatgtgattttatgggaaaaatacttggattagatttaggttctgcttccataggttgggcagtcattgaagagaaagatagcactgtgaaaattgttgctttaggcagtcgtattattccttatgatggaacagaaggacaagattttgctaaaggaacaggtgaaagtcgtaattcgttgcgaacaaaagcgcgtactgctcgaaaaggctatgaccgttatcagttaagacgaaaatacttagtagacgtactgataaagaacgaaatgatgcctgatgaaaacttaaaaagtttaccgaagatgcaactttgggaattacgtagtaaggcggttaccgaatatatatcaaaacaagaattggggcgactgttaatttggcttaatcaaaaacgtggatataaaagcagtcgtagtgatgcaaatttagataaaaaagatacggactacgttaaagatgtgaaaagtcgttttgaaaaaatcaaagaattagacctaacaatcggacaatattttcataatgaattaaaaaacgatgaatattttcgtgtaaaagaaaacatttttccacgtgaagcctatatcgaagagtttgatgtaatttggaatacacaagccaaatataatccttcattgaatgattgtccaaaagaaatattagaaaaaatagcgaatggtatttttctaggcagtagttcgtcacagcaaagtttaagaaaagatgcaataactaatggcttgaagtatattatcaaaaaccaaatcatatataatcaacgcccgttgaaatcgcaaaaaggacttgtctcagtatgcgaatttgaaggtttttggactaataaagatggaaaagaattttttgtcggtccgaaagttgcaccgaaaagttcaccattatttcaacttgctaaaatttgggaaaatgtaaataatatcagattgagttcaaaacgaggtgaaacaatagaattggcgttggaagaaaagcaaaaagtttttgagcatttgaataacaacgaaaaattgacagcaaccgatttattcaagattttaggaaaaagcaaaaacgaatttacagttacaaaacaattggaaaaaggtattcaagggaatattacccggaatgcaatcataaaagttttaggcgaaaatgaagtatctaaaaaactgcttaaattagatttaaacattgttgaaaccgacaaatccggatacttatattccaagaaaacaggagaggttttaggcgaaaaacctgtcaaatatattgatgcaggagttgaaaatgaaccgttttatcaactttggcataccatttactcaatcaacgaaatacaggaatgtagccatgctttgcaaaagcgttttgggatagatactgaaactgccgataaacttgctgcgattgatttcagtaaatttgcttttggaaataagtcggcaaaaacaattcgtaagattttaccttatttgatggaaggaaatatgtatagcgaagcaatgagctacgcgggttacgaacattccaactctttgacaaaagatgaaaatcttggacggaagctgttggacaaacttaaaccggttgagaaaaattcattacgccaaccgatagtagaaaaaattctcaatcaaatggttaatgtagtaaatgccattattgagaaacacggtaaaccaaatgaaattcgtattgaattggctcgcgagttaaagcaaagcaaggaggaacgtaatgatactgataaagcaatgagtaaacgtcagcgtgaaaatgaagtgattgcaaattatttagcggaatacggtttgagagcaacaaaaaacaacattatcaaatggcgattgtatcaagaaattgataatcaagataaaaaacttaacgcaatttgtatttattgtggacaacctatttcgattacggaagcgataaaaggtacggaagttgatgttgagcacattattccgaaatcgaagctttttgatgattcgcaaagtaataaaacgttggcacatcgtcgttgcaatgccaataaaggcgatatgacagcttacgattttatgaaaacaaaaccgcaacaagaatttgatgcttatgttgaacgtgtaaatacattgtatgctaacagaatcataggaaaagctaagcgtgaaaagctgttgatgtcggaagataaaattcctgataattttattgatagacagttgcgagaaagtcagtatattgctaaaaaagcacgagaaattttacaaaccgtttgtcataatgtttggagcacaagtggcacagtaacagctgaattgcgccatctctggggttgggacgatattacgatgaatcttcaaatgccaaaatacaaagaattgggtttaacagaaatggttgaatgggaaagtgaaaacggcaaaaacaaacattcaaaagaagttatcaaagattggacaaaacgtgatgaccatcgccaccatgctattgatgcgctcacaatcgcttgtacaaaacaaggttttattcagcgtttcaatactttgagtgcgagcaagacgcgtgaagatatgttaaaagagattgaacaacgttctgaaccatacaaagaaaaactctcgttgttggaaaaatatatcgtttcacaacgccttttttcggttgcagaagttgaaaatgcggctgctcaaattctcatttcgtttaaatcgggcaaaaaagtggctgtaaaagggaaacggaagattggaaaacgaggcaataaaaaagtagttcaaaccgatattattgtgccacgtggtgccctgagcgaagaaagtgtttacggaaaaatcaaaacaattgaaaagaataaacctgtaaaatatctttttgaaaacccacatttgatttttaagccatacattaaaaatttagtagaacagcgtttggaaaaatttgagaatgatacaaaaaaagcattagcttcactcaaaaaagaacctatttatttagataaagaaaaaactaaattattggaatatgctacttgtttcaaggaagaatttgtgataaaatatactgttgatacaaattttaataaaacagataaaattgtagatgaacagattaaacgtatattgcaaacacgcctgcaaaaattcgacaataaaccaaaagaagcctttaaagatgtacaacaaggtgaaaaatctttgaaatggtatgaagatgaaggtttggagcgtccgattctctcagtacgatgctttacggggctttctgctgttgttcccgtaaaaaaagatggagaaggaagtgaaatagggtttgtaaaaccagggaataatcatcatatagccatttatgctaatgatgacggggataaaccggagcaagtttgctgtactttttggcatgctgtagaacgcaaaaaatacgatattcctgtcgttattaaaagtgcaaatgaagtttgggataaaattttacaacagcgtgaaaatacataccctcaaagtttcttggaacaacttcctcctcctaatttggatttgaaattaagtatgcaacaaaatgaaatgtttattttgggaatgacgaatgaggaactaaaaatagctattgataataaagaatataggaaaattagtgaaaatttatatcgagtgcagaaaatttttgggaacaaaaaacagatagaagttgttttccgccaccatttggaaacccaattgaatgatgacaataatgctaaaataagcaaacgctttgttaaaatccaaagtttatcaacattgttttcacttaatccgttcaaagtaaaaattgattgtttaggagatgtaaaaccacaatagtcatggtataactgatttataataaaaataatgcgtaaaaagataaaaattggaacaaaagaatttgcaaccaaaaaagaggcgttaaatcactacaaaactattctaaattcttacgaatttggagaatttttaaatgatagtgattttagtgatattttagatttacttgaaacacaccctaataaagaggaaaagataggtgttgggattgaaaaagttagagtctcaaaattacaacattattataacacaaaagcatttgaattagttcgttttgacggttcaatggtaattatttcttacatacaaagaataagctcaccgcaaacaagtttcactaaattttgtaaagcgtgtagagaggcaattcgagaagatttaagaaatgtgaaacttgcttattttaaaaaaacttcaaaaaaaggaaaagtcaagtgtcaagaaacaggagaacttgataaatatgaaaatctaacagttgaccatagacaaccgaataccttttcaataattgttgacaggtttattgaactgaataatctgaatctcgaaaatatagagtatatagaagttgctggagacataaatgaacttgcggatatagaattgaaagaaaaattcaagcaatatcatacagagaaggcaaatctcaggattgtcaagaaaaagttgaatttagggcgttcatttcaggcaagagtaacgaggcaaaaaaaagatttaatagtggggaatgaaaaataaccaaaacttaaaaataacttacattacttaagctaaaatttcaacctcaataaaattatccaagtctccaataaaagaacaattatgtcaaaacctatccttaaaaaagaactccaaaaactcaccaaagagcaattaatagatcaaatcttagatttatacgaaaaaaacaaagcggtaaaagaattctacaatttttatctcaatccacgcaatgaaaaagaattggcaaaaaagtataagaaacttatgcgcaaggaacttcatgtagaaaatcctgaacgaggcagttttaaattttcaattgcaaaacgtatcatctccgattttaaatatttacaaccttcttccgaagcattagccgatgttatgttgtatttgcccgaatgtgcttgcgaatatacttatcactacggcgacatgagtgggccattttataacggagcctacaatagttttgtagcaacactaaagtttttgcataaaaacgacttgttagattcttttaagaaccgtgttgagcaatgcttaaaatgggcttcgtcgtgcggttatggttttggcgaggcaattgccgatgtatatcatgagtattatcaagatgaataacatttaattaaaatcaaaatgataaaacgcaccctctatttcgaaaaccccgcctacctcagtttaaaaaacaaacagttagtcattaaatttcctgaaatagagaaaaacggtacattacctgattcgtttaaaacagaaaacgtcaaaaccattccgattgaagatataggaatcgtaattttagataacaaacagattactatcacacacggattaattgaagcgctgcttgaaaataacagcgctttaattacttgcggaagcaatagaatgcctgtgggtttgcttttgcctttagtaggacatactgttcaaaacgaacgttttagagcacagattgaagcatcacttccgctaaaaaaacaattgtggcaacaaacagttcaagcaaaaatagaaaatcaggcgtatgttttaaaagaatgtcgtggaatagaggtgcgtaacatgctaaaatgggttgatgaggttcgtagcggcgatgcagataatatggaggcacgtgcagcagtttactattggtcaaatcttttcaaaaatttcaaacgagatagggaaggggagccaccaaacaacctgttgaattatggatatgctattttacgggcaattgtagcacgcgcattggtggcaagtggtttactgcccacattgggcattcatcaccataatcgctacaacgcttattgtttagcggatgatattatggaaccgtatcgcccatttgtagataaattagtggtagaaattgtaggggcagaaaattttctgcctaacgaattaaccaaagaaatgaaaatgcaattgttgcaaattcctgttttagatgtggttattaatgggcaacgcagtccattgatgattgccgttgggcaaaccactgcttcactcgctaaatgttttttgggaggaagtcgcaaaattgtttatccaagttttggatgatatggaacgtttcagtgaatacagaattatgtgggtacttgtatttttcgatcttccgacagaaacaaaaaaagagcgaagagcacacgcacaatttcgaaaaaaattacttgaagatggttttactatgtttcaattttccatttacatgcgccattgcgccagtagagaaaatgcagatgttcatattaagcgagtgaaaaaacttttgccggaaaaaggttatgttggaattttatccattacagataaacaatttggttcaatggaattgttttattgtaaaaaagagaaagaagttgttgcgccaagtcaacaattggaacttttttgagaaaaaactgattatatttatgccctactacgaagcaatgaaggcaagcctaaaatccccttcaaattttgaaggggtggttcgcgaagcgagacggggtagtttatatcatctattctttaccaaatgttttaataataaaatctgccaaattcatcaaaaccgtactcatataaaggcgtacattttcctcagatattctataaactactaatcctaatgattctaaacacaccgttctttgtgcatcataatcttcttgaaattgatgtattcctccatcaatttcaatgaccaatcctaagcactttacataaaagtcaacaatgtaatttccaactgtccgcttcggtattttcgtaaggttcagtattgcgtatttctcagcgtccagccgtccaccccttcaaattttgaaggggattttgggattgtcctataacgacgttataggatgtaatattttttgaaaaaatatttggatactccaaaatttcaagtaacaaaattggagaaaaatagctgcgttatgtcaataattgaaactttttaagaaaaaatccgcaaaaagaacaattttctttcataaaatcaacttcatttaaacaaaaaatctcgtcattattgacgagattttttgtttagcgaacagattttttaatttctaataatctttgtaaatcgttgtttatcattttgatactcacatcgtactgttcacgatgtcaaagatacaaacttttgaaagcaaatcacaacgtagtcgttaaatgggcgcgagattgtgaactgttcacgatgtcaaagatacaaacttttgaaagcaaatcacaacaaaatattatgtacgtttaatccaaaaaaactgttcacgatgtcaaagatacaaacttttgaaagcaaatcacaactgtttcgccggtattgccatcaaagaggagactgttcacgatgtcaaagatacaaacttttgaaagcaaatcacaacaacacgcaaaaatacgtttaacctcctttaactgttcacgatgtcaaagatacaaacttttgaaagcaaatcacaacatacgacttagatctttacggcgagtcggaactgttcacgatgtcaaagatacaaacttttgaaagcaaatcacaacttgctcctgaacggttagaggattgttaaaactgttcacgatgtcaaagatacaaacttttgaaagcaaatcacaacttaatagtgttaaggatacttatcgctattactgttcacgatgtcaaagatacaaacttttgaaagcaaatcacaacgtcgaaagatgtttgcagccgcatactttactgttcacgatgtcaaagatacaaacttttgaaagcaaatcacaactttattccagctattccggcatgccttattactgttcacgatgtcaaagatacaaacttttgaaagcaaatcacaacctttatccgccgtcaagaaaacgagttgaactgttcacgatgtcaaagatacaaacttttgaaagcaaatcacaacctgagcgccttggttaataaaagagtcaccactgttcacgatgtcaaagatacaaacttttgaaagcaaatcacaaccgtcgagctgaaagatggtcgagccgtcatactgttcacgatgtcaaagatacaaacttttgaaagcaaatcacaactccgtcgcttgcggtacctgtcttatttgtcactgttcacgatgtcaaagatacaaacttttgaaagcaaatcacaacacacgttgcacctgttctgaagacaaataaactgttcacgatgtcaaagatacaaacttttgaaagcaaatcacaactattctacctgtggtaactgtgcctagggactgttcacgatgtcaaagatacaaacttttgaaagcaaatcacaaccgtgttgataagtttttataattcattacaactgttcacgatgtcaaagatacaaacttttgaaagcaaatcacaacttggattaaatgaagtaaaatatgctgaatactgttcacgatgtcaaagatacaaacttttgaaagcaaatcacaacgctatttcaattatatattttggataaataactgttcacgatgtcaaagatacaaacttttgaaagcaaatcacaacaaacaatcagccagagagccagcagagacaactgttcacgatgtcaaagatacaaacttttgaaagcaaatcacaactatctaattgctgtattaattttttatctgactgttcacgatgtcaaagatacaaacttttgaaagcaaatcacaacctatgtcgctttcggcggcggtgccaacacactgttcacgatgtcaaagatacaaacttttgaaagcaaatcacaactacaatcttttttccgctttttcaaaagtaactgttcacgatgtcaaagatacaaacttttgaaagcaaatcacaacttgagcgcggaaatgcctatagaattaagactgttcacgatgtcaaagatacaaacttttgaaagcaaatcacaacatgaaattcttttctgctttccatatcaaactgttcacgatgtcaaagatacaaacttttgaaagcaaatcacaacgataatctttccaaatcaattctacttaatactgttcacgatgtcaaagatacaaacttttgaaagcaaatcacaacaaatccaaccccaatctttcaactaatttactatttgcaatgtcaaagatacaaattttcgagagaaattataatggtgttacatttccttctccgttttgccgtactattcacaatatcagtaaaaaaatatttttgcccattaatggtaatcggagaattttcatataaatttgcagttcgatttttacgaatatgtaccataaaaaaattacctcttttcttatcatttcattgctgtttttgtgtatacaaatacaagcgcaaaaaacagctgttatagggttttataatgttgaaaacttgtatgatacagaaaaagattctatcgctgatgatagtgagtttctgcccaccggcgcctatcaatggacgttggaacggtaccatcataaattgaaatatttgtcttttgcaatttccgaaatgggaaaagaacacggtggggtagtagtgctcggagtttgtgaagtggaaaacgaacgtgtaatgaacgatttggtagctcaagaagcgcttaaaccttttaagtataaggttgctcatcacgattctcctgatcggcgtggcgtagatgtcgcttttatttatcaaagcgaacgatttgaacgtatagcattccaacattttgaattgaagattcccgaaaaaccggaattcaaaaccagagatcaattacttcttgttggtgttttagatcaagctgatacactgtattttatagcagggcattggccatcgaagaggggaggggaggcgcgcagcaatcccttgcgaatggctgccgctaaacttacaagatctattgttgactcgctactgaatgtaaatcccaatgcgaaaattatagtaatgggcgattttaatgataatcctaatgcaaaaagtattacggtagggcttggagcaaaaggaaaagttaatgaggtaacaccgctcgacctttttaaccctatgtggaaaatgtatagagatggtttcggatcttacgtttttcgaggtaacagggaaatgattgaccaaattatagtttcttacgcgttgttgcgtccgagaccaaatagctataagtttatttcggcacacgtttttagtcctaattttttgataacaaaatcaggttcatatcaaggatacccatttagaagttatggcggcggaagttatttgggcggatatagtgatcattttcctgtgtatattattttgcagaagaagtaaaatttaagatttaaaaatttaagattttaagaatggaagtaaaaaccgacaaaaaagtaattcttattcctacctacaatgaaaaggaaaatattgaaaatattattcgtaaaaccttcactgtaactgattccaatatcctggtaattgacgacggctcgcccgatggcacagcgagtattgtaaaaaaaataatggaagagttcccagatagacttttcattgaggagcgtacaggcaaattaggtttgggaactgcttatattcacggttttaagtgggcattagcaagaaattacgactatatttttgaaatggatgccgatttttcgcataatccggaagatgtagaacgtttatatactgctattttagagaataatgccgatgtagcagtcggttcacgttattgccaaggggtaaatgtgcttaattggcccatgtcgcgcttgttgatgtcgtactatggctctatgtatgtgcgatttatcttaggaattcctgtaaaagacactacagcaggttttatgtgttattccactgaagttttgaaagcgattgatttttcaagaattaaacatgtgggctatgggtttcaaattgaaatgaaatttaatgcacataaattaggttttaaaatcattgaagttcctataatatttaaagatagaactttaggaacctccaaaatgagtgccggaattttcaaagaagctatttttggtgtaattgggttgaggataagcagtttcttcaggaagtggaaaagacaagggtaaacaatatcctatttaacataatatcaattataggaattattttagctccatttgtttacatgttattaaccaaataaagaaggaaatatgaaaaccattaaatcattactcattaccatcgtttttttagctatgtgctacagtgtatccgctcagtttggcattggacgcgccgtgaatcgcggcattaataacgctgtggaaaaaaaggcggaagaagctacaaccaaagccattgatgatgctgccaaaaaatctgaagaagaacaagcgaaagaaaaagaagctgaaaaggcacaaaaaacgcaacaagaaacagaagatacgcccgaagagattccccaagtaagcaatacgccttacacgccttcggagagcgagtatgctttttttgcaatgaaagagggtgccgtgcaagtttttgttagcaaagatgctaaaggtaaaacaactgcacaaacacgaaacactatcaaatcaattacgggagataaaaacgcctttgctattgcttatgaaactgaaatacttgacgaaaaaggaaagtccgccggcaacgataaaccgcttgttttcaattatcgtgttgtaataaaagacgatatcatgtatcttgatatgaaagaagtatttggcgcaatcgaaggtctcgatgatgtgcaagcgactggtacggctatgaaaattcccagcaatctcgtcgtaagacaaaaacttcccgatgcttctgtaaaaataaaaatgggttttattaacctttctgcaacaatgacagaaatagaatgtgttgacatagaaaatgttattgtagaagcaggcacttataaatgctataaggtttcgcaaaaaaataacgttactgcggtgggtagcaaacacgaaagcacatccataacttggtatgccaagggcgttggcgcagtaaaaaccgaaacttacgacaaaaaaggcaagttgctctcaacgcaagaattggtatctcacaagtaaccggttatgcacttaatagaagaattgcagccttataaaagcctatccatcattggaatggagaaaaacaccggtaaaaccacttgtttaaattatttactgcatcaatttaaagaaaaaaacaggaaaattgccattacttctattggaattgatggtgaacaaaccgatttagtaacacaaactcaaaaacctgaaattgaaatctttgaaggcatgggattcgttacttccgaatatttctaccataaaaagaaactgacggcagaaattattgatatttcgcaacgaagtacctcacacggaagattagtatttgcaaaagccataacttccggaaaagtaatcttgtcggggcccaacacaacagtttggctaaaacaagtaatggagcaactttacgcccaagacttcgattttgtgattaccgatggcgcactctcaagaaaatcgttagcctctcctaccctatccgaatccttgattttaaccacaggcgctgttttaacaccggtactttctgaattagttcgcaaaacgaagttcgcctatcaacttgctcaaattgaagaatttaaaacaaatttaaaagctgaaattgaaaatttcgaaacaggaatatacgcattaacagaaaatgaatatattgatttaaaaatcccatcttcgttattattagatgcttataaaaatgaactgtttatacacggaaatacgctttatgttacaggaattataaccaattcattattaaatactttaaaaatacacaaagaggtcaaaaatacaaccttagtagctaaagattttacaaagatttttgtagataaagatgtattaaaccattatcttcgtgccggaggaaaactaaaagtgctgaataaaaataagttagtagcaatatgcgtaaacccggtgtctccacagggttcgcatatagattctaaaaaattagtggaagcgctacaaaaagagatagaggttccggtatacgatgttaagcaattttcacactgttcttgagcaatttctctaaaatgcagaaaaagtcgatttttaagcaaaaaagtattttaaaaatgcactttttacaaaaagtgcatttttgagagaaaggaatttggaagaaatagggtacgctatacgcaacactcctaccctacttcatttccgcaaaatacttgtaaaaataaggtatcgtttcaatgcctttgtagaaatgatctaatctataactttcgttaggcgagtgaatagcgtctgcttccaagccaaatccgagtaggatagattttatgccgagaatatcatcgaaacctgcaataataggaatactgccgccgcttcgcgttgggatgggcatttttccataggttgcttcaaatgctttttcagcagccttgtatgccggcatgtcaagcggagaaacgtaagcgtttccgccgtgatgcggtctaacctctacttttacgcatttaggtgcaatggattcaaaatgttttttgaaaagttcgcttattttttccggcttttgattgggcacaatgcgcatagataattttgcgtatgcttttgagggcaacaccgttttggtgccttctccggtaaaaccgccccaaataccgcacaaatcgaatgttgggcgaatgcctacgtgttccatcggcgtatatccctcttcgccacataattct

SEQ ID NO: 1712 - DNA, 23810 bp, synthetic construct
  source 1..23810: mol_type = other DNA
  misc_feature 1..23810: note = Synthetic
gctatagttacagcagtattttatctccggtaacacctactttataccatttgttattttcaaataaagctgcctgatgatctcctttgtgctgatttacatctacgcccagcacttttttattataataaaatccaatattcgtttttacaatagtgtgacctacaataattctttttacctggaataaggatagcgtttggtctacaactttctcatctaatacaggttctttaaagtatccgcggtaccagaaaatgccatctgtgctattgaatattttcagaatggtagcatcggtaacggtatttttaaggtttttccagccaatataaggtctggctatttcatttagtttttctatggtcagccccagactgttaacatccggagaaataccaccgtgcatgcataggttatcgccgattttttcaatcaggttcttgcttctcagccatcgccccaattctgttttttcactgtataaatccgcataggaaaggtttagtttctccgcattcagaaaatatttctgatctacatatttaaagttgcctgccagattcataatgtcgtgattgcccaaaatagtttgaacgtaacctcccttcagtttagcttcctcttccagtttataaagcaaccacattgtagcaggtacttcggttcctctgtcaaacagatctccgcaaatcaccagatgcccgtctccatagatccattcgtattttttattaataactttgttcgccagtaacagctctcttagtgcatcgaattcaccttcaatatccgagagtaccagcattttcttaggctgtgccgttacagagggttcattcgaaatattttgttttagttttacttcaaaatttttctccggtgcatctgaaaaactgatacgcagctttatagctttcttgtttttctgaaggtaatgttctttcctctggctgccagcctcaatttgctgcacaagaatactgtcgcctttatagcttacatatggaccatcggacgaattaacaggtcttttttcctgtccctgaacggagcataaactgagagaaaataataatagtagtacagattttataggagaaaacatcatgatatagtattaatctgaacaaatataagggataatggggacttgggaatgggttatcggttgctagttgttagttaagtacgaagttagaagttagaaaaaagaaattagacatctgccttaagtgatttcatctggctaatcaaaagctcccgactatatcggtttttataattaattacccggatattttatagcatccgaaagttctataggattgttgttttttcttattgtaaactgtttttgtttcgtaagctcattgaaattaggtgtaactggcttaccagattcatcaacaaatttcatttttattttaccggttttggcttctttataagggtcgttataatagtctgtatatactttatttagctgatgagttgttacaggaatactcttaattagttttgaattttttccatataagtcttcagatccttttagtatttttactaaactgaattcgtaattatttttagtgtcattcagagcaacaataagtccgggaagtccattgaaaatataaggaccttcatgtacggggatatcagttgtaaaccaggctatccagtctctgcctttatatgatgttgttgctttttgacatttcatttgtccgataacttttgaatccttggatagcttccaattaaatttcggaagcttttcagaagtctcaaacagatctaataaaatattgtaatatttctttacacttccagtctttaaatcttttttaacaaaaaaagcataatctctcgataccgtctttgttataatattatgggcttcgtttgtaacaattgtagaatcacttttatataatttgtatgaataaaatacagagttatcaatattgtaatccaataccatattcttagttacaaattcagcactagtagaatctgttttatatttcatatcgtaaaaagcccggaaactttgggcaggtaaaaaaccaactgtaataaaagtcagacaaattttaattaatttcaatttcataatattttattgtggtttgttttaatggatttttcgtccaatcattccaaatacctttgtatgggtcatatccacattttaaaggttttgataagggatttgaaggtttttcaagataagctcgacaatctgtgcatatatatcggtattcacaatctttacagatctcaatactatcctttgtaatatttctaacagggtctgcttctattaccgtgtaaagatcttcaatcaaaatattatttatatgaccaatttcatgatgaagagaaggacagttttttattgttccatttctggaaataaacaatttgtcctttaaacaattatttacattttttgatttcgagaagttttttatatcgattaaaaaataatcggtattaataatgccacataagctttcatctgtaagattcttttcatagtaaataacattaaaataaaaaggcttattgatgcttttattaaatggagaattataaaaatatagtatctgaactctgggatttttctcaatataacttatcagagcggaatttttatcttcatccatatagggaatcagaatttcaattgttctgatatttgatgatgacaataatgaaagtacttttttcaattttctgaagctataatctataaagcggatttgtataaattcggcaccgatagattctagtttcttatatacattttctatagagaatccttcattttttgagtgttcaataataacttcattgatcagtttagaagattcccactgaagacttttacggtgtgtacttttttcaacagatatatatccaaacttttcctctgtaaggaagtcaataatttctttactcttatcttcatataaaatagaaagatcatcttcaaaataagaatatacttcatttatatttattgagttcttagtatacaaatcacagagtaatatattctttgctccttttatgatctggcaatcctgatataaaataaaatatttactcttcatcatcaaataattttatatcaataaatggtgtgcttactttatcataaatctttactttcagattgtttgtattgtacctttttgataagatattgtactttttattgctaggtgcatttagcgatatcttttttaaatattctgtcagcttaggagttaaagtgaagtatattaagttaattctatttttcattggattcataaagtgttttaagtgacaaagcgatttctttatccagataagtattattataaacggaatggtatgtgaactgtcctgtagcattaacttcaaggaaaacataattgtcattagtatcgataatcatatcaatcgaggcgcagtttaaatccagatgctgtaacactttttgcagcttaatttctactgatgttggcagagaatacacttcatatctgcagtcagaatggagagcatttactctgtgatcaacttcatttttattttcggctataattctagtggtaaaaaatctgcctgtgagatagaaaattcgtaactcaaattttttttccactcttttctgtattagtgctggcggaaaaaaatcagggatatgatcaatgtgtttatttacaatagacgttttcatcaatatatattcaccttctagagttaaaggaatgcaattttcaaaaggctttgttatcaaatcttttcctttatgaagctttattatttcaataagaccggatttggaagaaatgacataagaatcgggtatgagtagtccgtattctttggctattttcatctgtagtaatttgttttctgtcgaaaagaaaggacttgtcagccatttgatttttttaatttttcttaattcggtaaaaaagaattgacaaaatgctgatgcttcataactgtaaaactgattaaaagactttgagattttctttgtcaaataatttcttgtaatctcatctatgttgggcgagtattttctaaaccatacgactttaaattcattaatatcagttccttttattttgaataggttagtttgaaaatctacttctacatcattatacagctcatcattaatacgtataaaagaaagcttccattttattagccagtcgataacaaggtctgtagtcggttccgagtctcttgagataattaaaatcattcaatacatttaaaattatccattaaaaactgagctccatttttattcattttatctgaaattgttaatgtaacatcgttttttctatcacactgcaatgtttttgtataataccctttggggtacgttttttttcttcctactgaaagatctataaatgttttgaactgcattaaattatcatgataagttgtaaaagcgtataataattttttagatgtagtgaaacccaccacacctgttacttctttactttgcagtatctttttgtatttattcttgtcgtgtgcatgtacataagctccaaaaattagcattgtcatacgaagggagtcattggtgtatttataataattaccattaaaattacttccttcatatttaaaatactgatcaccctgatacaggactgtttctttcggaatagaattgtataatgcatatttgctgtatgaggtacagctatatacaaatagtaaaaagaatactaaggacatttgtttatacgtctttaacatatttcttataatatctttcttcataggttgacatttttaaaaatcattcaatgcatttaaaattatccattaaaaatttagcatcgcttcttgacgcattttcagaaataacaagtgttatcttgttcttattattgcattttatggtttttataaaatcactgtcagggtattttttttgacctacggaaatatcaaagaagtgttcgaatacagtagcattattatcataagttgtaaaggcatataataatttgttccggcttttaaaaggtattttattggttatcgatttatcagccatcatcttcttgtattgctgtatattttgtgcataaacaaaatctccaaacataagcatcgtaattttataatattcattggtataccgatagtaattaccatttgaataaaattcagatttttccgggatcgagttgtagaaagcatatttactatatgaagtacagctgacagcaaatagtaagaagaatgttaaggacatatatgtatatatccttaacatcccttttgtcataagaaaacctaataccatgggccagtgttctttcctggacctgatggatctgtaggtttatctccatcttcactaccatcgtcgtcatattcactttctaatgcagcaggccttggaactgtgattacaacctctttaatcgttaaggatctgtttccaccaacgattttagaaccaaatgttttggtgaatcctcccagttgtaatttttttcgaaggttttcaattgatttgtcttttttcataaataaaatatttaaaatgatgtgccattattgacattttaaatttggtgatatttatttgtaaaaaaaagatattaacatagtttaacatttgtaatgtgctgatttgtaggtttttgtgtttttgttattttgatgataatactttatgaatgcgatttttatttctaagcttcttatttgcaaattttcaaatggttgcctcttcaatttgaaataattttatcttatttttgccccaacattcactaatacgaggattcatggaattaaattataagctagaggaacaggattatttacaattgtatatgtatgctgcttctaaaaatcaggttataaagcagcagcgacaaagggtgttatggcttctgattataatctacatcgtttgttcattgcttatgtttagtatgagtatggtttctttgtttgtttttatagcagctgctattactgttacgcttatttatatatattactatgaacgtaagcgctatgaaaagttttacttaaagaatataagaactaatcttaaaaacaggataggggttaactataaaactgtatttggccctcacgatattattctgacagagcctaatgctgaagcaaagtttaaatatcccaatatagagcttgtagaggaaattaatacctattatttctttaaaatgaaaaccggtgaaagattcattgtgcctaaaagtgctattcagaattctcaggaatttaatcagataatcagcagactgtctaaagattataatattcagttgtatcaggaactcaactggaagtggagataggaggttagttattggttgtcagtggttagttgctggtgaattgtgtaaccataaaatcgtgtaatcgtttaattgtttaatcataaaagcaaattaacgattacacaaatttacaaattcacccattcacctattgactcattgatatagtatagttgtaaaactgtgtaaccgtaaaatcgtgtagttgtttaactgtttaatcataaaagcaaatttacgattgcacgaattcactcattgacatattcacatatttacctgttcataaatcttattttttcttttggcttataatttgtagttgttttattttaaaataagaaatatttacttttttttaaatgattgaaataaaattatactgaatctaacttgtgagcatagtacgggttgacgtctaaaagcagattctgttaatatctacaacttgtaattgttctgattaataaaacactgatgaaatctcaagatgaaaaatttaactacaacaaagggcgaagcctggcaccggaggatatattaaaggctctgctggatgcattgaaaaattacgaaacctcgggagagaagttttacgatagtgccgatctgaagcgtctgttgaatattagtgacagtacgctttaccgattgcggaaaaccaagagtattccttttatacattttggaaaaaagtacttttacactaaatcgttttttgataagaaagccgaggggtaaattattaaatcttaaacgcaaagagcgtcaagcttcattttcttttatactgctttaaaggttcgcaaagccactaacgcttagcaaagtattttatttcaacaccaaggcacaagatctgtttatctgtcttgctttttaaggcacggattgcttcgcaatattcagttttcaattgtgtcagttcgagtgaaattattaaatcttaaacgcaaagaacgcaaagttttattttcttttatgctgtttttaaggttcgccaagccgctagcgcttagcaatgttccctaaaacttaactatcttaacttctaaatgttgaagataattttacctttaggtgaaatctttgtgctctgaaagcaatgctctatcaacatcacttttgtgtctttgtggttaaccttttatttcaacaccaaggcacaagatctgtttatctgtcttgctttttaaggcacggattgcttcgcaatactttttgtttattatattttcagcgtcagttcgagtggaattattgaggtttaaacgcaaagatcgcaaagcttcattttcttttatgctgttttaaggctcgcgaagccgctagcgcttagtaatgggcgctaacttaactatcttaagttctaaatgttgaagataattttatcgcaagataaaatctttgtgctctgaaagcagtgctgtatcaacatcacttttgtgtctttgtggttaaccttctaatagtcctaaggtttatcataacactaaggcacaagatctgtttatcagtcttgctttttaaggcacggattgcttcgcaatattcagttttctattgtgtcagttcgagtgaaatagtgaaattattaaagtttaaacgcaaagatcgcaaagcttcattttcttttatgctgttttaaggctcgcgaagccgctagcgcttagtaatgggcgctaacttaactatcttaacttctaaatgttgaagataattttatcgcaagataaaatctttgtgctctgaaagcagtgttgtatcaacatcacttttgtgtctttgtggttaaccttctaatagtcctaagacttatcataacactaaggcacaagatctgtttatctgctttgctttttaaggcacgaattgcttcgcaatactttttgtttattatattttcagcgtcagttcgagtggaattattgaggtttaaacgcaaagaacacaaagcttcatttttctttatactgtttttaaagttcgccaagccgctagcgcttagtaatgggcgctaacttaactatcttaacttctaaatgttgaagataattttatcgcaagataaaatctttgtgctctgaaagcagtgctgtatcaacatcacttttgtgtctttgtggttaaccttctaatagtcctaagacttatcataacactaaggcacaagatctgtttatctgctttgctttttaaggcacgaattgcttcgcaatactttttgtttattatattttcagcgtcagttcgagtggaattattgaggtttaaacgcaaagaacacaaagcttcattttctttgatactgtttttaagattcgccaagccgctaacacttagcaatgaccactacaaattactccgtagaatcttcgacttagggttaaataacttccttccaggttacatactagtgtactttagcagcatttttgtttcactcttgttcggggtttgttcgggaatacccccgtttttaggcaacattcccgaagcatcctcgaaggatccccgaacaaagccattaaaaagcattggatgtataggccgtaaaagcctttactcatggtgtttttcagtgttttcagacaggggattgtatcgtttttcagaggtttataccggtcaaaaccagtcaaatgcagtcataagctgtcaaaaccagtcacgaaaactgaaaaacaacttttgaaagcaataagtctataccttggctctgaaaccaataaattttatttattatggcaacaattagtaaaggaatccttggtggattctcaggaaaagtaggcaccgtagtgggtgttaactggagagggatggatatcatccgaagtgtaccgaagcggtcgcgaaaacggccgacagataatcagatgttgcaacagtacaagtttaaactggtcgttagcttcctgcagcctctgcgcagtatccaggagttgtatttcggaagcccgcagggaagcctgtcacgggtaaacctggcaacatcggaaacgctgaatacagctttggaactggtgaacgatgtgccggaattggtattcgaaagaatactgattaccaaaggcgagcttaccggatttcagaatctgaaaatcagtccggaaacggggagtatcctgaatctggaatgggaggacaacagcacacaaggtaatgctaaagaaacggatttgataaaccttatctgttatctggaaacgcagaatgcttttgtcatctttgaaggactggtagcccgtaagcttattaaggctactgcaaaactgccggatgtgtatcagggaaaggaggtgcatgcctgggctttcctgaacaacgagaagaaaacacaggccagcaccagtgtttacctcggcaaaattaccttaacctaaacaaaagaccacccgaaagggtggttttctgttttatatgtaaagaagttttgagaaaagtaaaataaaaacataaaaaatcccccgtattggaagacgagggggcttgaatgttttcacaacggaataatccttattgtgaattgctttcatttacaaagctatgtaaataaaattaatttcaaatacggaaaaccgtaaaaatgaataaaaaagtctttttatatttagtgggtatttgaaatgaagacaattatggttaaaaatatacttggattagacctaggaaccaactctgttggatgggcgttgatagaggttgacgaaaataatcttcctatccgcattattgctatgggttctagaattattcctttatcaacaagtgataaagaagaatttcaaagaggtttgtcgattacgaaaaatcaaagcagaacagtaagtcgtacccaaagaaagggctatgacaggaaacagttaaagaaaagtgatctaaagaaaattctgaataaatacaatattttcccttcagaagaattgttaagacttccaatgctagatttatggaaactaagaagtgattcagcgaacccggatgaaaatatttctgcagaacaattggggcgtattctatatatgcttaatcagaaaagaggttataagtctgccagaagtgaggctaatgctgataagaaggattcagactatgttcaggcagtaaaaggacgttatgatcagttgaaagatagaaagcaaactattgggcagtatttttatgatgaattgtacaatgcaaatgccaataattcatatttcagaattaaagaagaagtttatccaagggaagcttatatagaggaatttgatacgataattagcgctcaaagagagaagcacgattttcttacagatgaggtagttcatcaattaagaaatgaaatcatttattttcaaaggaaactaaaatctcaaaaaggattagttagtatttgtgaatttgaaggctttgaaaaaactgtttttgataaagaaaaaaacaaaaataaagtgttttttgttgggcctaaggttgctcctaaaacatctcctttgttccagctttgtcgaatttgggaagttgtcaatacgatcactttgaaaataaaaaatccagaaggaagtaaatataaatggggcgaaaaaattccggatttaaaggagaaggaaattttagcagattatttattcaaaaatgaaagtctaagctttagtaaacttctcgaaattttagaattaaaaaaagaaaatgtatatgtgaataagcagatacagaaaggcattaaaggaaatgaaacgtattcagctcttcatagtattttaggtgataatgaacttttaaattttgatgtatctatcatgacttcaaatcaaactgcgttattggtagataggaagaccggcgagattcttgaagaaagggcaggtctcgaacttgatgcatcattggaaaaagaaccgttatatcagctttggcataccatttattcccttaaagatctggatgaatgcaaaaatgctttgattaaaaggtttggttttgatgaagaaactgcggaaaaactatcccgtattgattttaataagcaggctttcgggaataaatcgaataaatcgatgaggaaaattcttccttttctaatggagggctatgattattctcaatcttccagtttggcaggctataaccattctaattctttgacgaaaaatgagagagaacaacaaattactttagacagattagaacttcttcctaaaaatagtttgagacaacctattgttgagaagatattgaaccagatgattaatgtggttaatgcaattcttgagcaatacggaaagccttctgaaattagagttgagcttgcccgggaacttaaacaaagcaaggaggagcgaaatgaaactgatttacaaaattctaaaaataaaaagctaaatgatgaaattggtaaacgattggctgaattgggattacctgtaaccaaacggtatattcaaaaatataaattcatattcccatcacttagtaaaaacctaaaagaagcttatgtcaataatcaatgcatttattgcggagaaaccttcaatttaacggaagctttgagtggagatgcttatgatgttgaccatattgtaccaaaagcattattatttgatgactctcagaccaacaaagttctggttcatcgaaaatgtaattcaacaaaaacgaatcaaactgcatacgattatattgctacaaaaggcgaagaagaagttagagtgtactcggaaagagttgatgattggttgaagagaggaattatttcttatagtaaaatgcaaaggttgaaagtttcacacaaagaatatcttgaaagaaaaaagcttggaaaagaaacagaaaccgatagaaagctttgggaaaactttatcgacagacaattgagagatactcagtacatttctcgcaaatcaagagagattttgcagaaggtatgtaataatgtaacgacaacagaaggaggagttactgctaaacttcgaaatttatggggttgggatgatgttttaatgaatctacagatgcctaaatataaagaattaggacaaacaataaccaaagaatggacaagtgaacacggaaaaagaaaacatcaaaaagaagaaatcgaaaactggacaaaaagagatgatcatcgacatcatgccattgatgctttggtaattgcttgtacaaaacaaggctttattcaacggataaataccttgaattcgagtgatactaaagatttgatgataaaagaagttgaggaagctaaagtagaatttaatgaaaagactacactgttagaaaaatatctaaaaacacagaagccttttagtacacacgaagtcatgaaagaagctgataagattttagtttcttttaaagcgggtaaaaaagtagcaacaatcactaaatttaaagcaacaggaaagaataaagagacaggtgtaattgttccaagaggagctttgcacgaacaatctgtttatggtaaaataaaagtaattgaaaaagataagcctttaaaatatttgttagaaaactcagataaaattgtgaatccgagaattaaaaatcttattgaaataaagctctcagaaaataaaaatgatcctaaaaaggctttattggcattaaaaaaaattccaatctttttagacgaagaacaatctatcactttagaaaaagcatcttgttataataatgcaacagtattgaaatataaattacagaatctaaaagcggctcaagtcgatgatattgttgatgaaaaagtaaaaaaaatagtaagagaaagactttcccaatttgggaataaagaaaaagaagctttcaaggatacactttggtttaatgaagagaaacaaattccgattacaactgttcgattatttgcccgtccggacgccaataatttacagaccattaaaaaagatgaagatggtaacgggataggatttgttgtaacaggaaataatcatcatatcgcaatttatgaagataaagacaataagcttgttcaacacagttgcacattttggcatgctgtggagagaaaaaaatacaatattcctgctgttatcagaaattcagcggatgtttggagtcaattattaggtaaagaacttccagaatcatttttagataaattaccagctgatgaactcaatttaaaactcagtatgcagcaaaatgaaatgtttattttgggattgtcacaagatgaatttgatgaagcgatagcaaataatgataaatctttattgagcaaacatttgtatttggtttggagtatttccaataatgattattatttcagacaccatttggaaacaaagaatactgaattgaaaaatattcctactgcaaaagatgcaaaaagatattttagatttaaaagtgtaggtgccttggttggaattaatccagtaaaagttagattgaatcatttaggagaaattaccaaaatcggagaataataattatgatcacccgttccatctacattggtaatcctgcttatcttaaactcaaagacgagcagatgtatattctatgtcctgaaaccaaagaactaaaaggtaaagttccggtagaagatttagggttgctgatgctagatcattttcagattacgatttcccatcaattgattcagaaaatgatggggaataatgtagtagtggtcagttgtgatggtcatcatttaccacacggaataatgttgcctttgtatggacatactgaacattcagatcgggtaaaagaccagatggaagccagtgaaccccttaaaaaacaactttggaaacaaaccgtggaatgtaaaattgaaaatcaaaaagaagtattgaggcgtttgggaaactattatgaaccaatgacagattatcaaaataatgtaaaaagcggtgatattaccaatatggaaggtatcgcagctcaacattactggaaatatcttattggtaatggttttttacgggaaagatttggagattctcctaatcagttttttaattttggctattcggttttgcgcagtatggttgccagagctattgtggagactggtttattacctgtgatgggtatttttcataaaaataaatacaatccttattgtctggcagatgatttaatggagccgtataggccgtttgtggatgtattggtgatgcaatggctccaaaccaatccggaagcagaagaactgactaaagagtttaaagcatatcttttgcaaatcgctactaaagatgtaaagattgacggaaagaccagacctttgctggtggctgtaaaaacaacagcatcatcactatataaatgttatacaggagaaaaacgtttgattgcttatcctgaactgatatgaaagccgaaaggtttaatgcttaccggattatgtgggttctagtactttatgatttaccaaccgaaacaaaggaaaatatgcgggatgccaatctatttcgtaaacgtctgttagatgatggcttttcgctttttcagttttcaatgtatatccgccactgtcccagtagagaaaacgcagaggtccacataaaaagggtaaaagtcatgttgcctaaagctggaaaagttgctattatgtgtattaccgacaaacagtttggtgatattgaaattttcttcgccagaaataaagaagaaccaccgccgacctttcaacagttggaattattctgatttttaaattctaaaaaataataaaatccgttgaaaatcaacggattaaattttgaggttgtgttatatcacaaagatatccaaaattgaaagcaattcacaacatgatttttttcttggcattcttttgctatgttgtgttatatcacaaagatatccaaaattgaaagcaattcacaacaaggagctatgaaaggtaattctcctgctcgttgtgttatatcacaaagatatccaaaattgaaagcaattcacaacggatttccatctttatctctaaaatttacggttgtgttatatcacaaagatatccaaaattgaaagcaattcacaacgatactccgcctttagttatagattcacaagttgtgttatatcacaaagatatccaaaattgaaagcaattcacaactgtacatttaccaaaacggtaaagttgtagttgtgttatatcacaaagatatccaaaattgaaagcaattcacaacacaccaacagcagaagctttatcagatattgttgtgttatatcacaaagatatccaaaattgaaagcaattcacaactaagtaaagaaacatctggaaatattccaagttgtgttatatcacaaagatatccaaaattgaaagcaattcacaacagtattaaaaacttggaaaaaaaaacggaagttgtgttatatcacaaagatatccaaaattgaaagcaattcacaaccaagacatattggtggagaaggtgagcctagttgtgttatatcacaaagatatccaaaattgaaagcaattcacaactcaacatacgctcctgtaccaaattcagcagttgtgttatatcacaaagatatccaaaattgaaagcaattcacaacaagctggaggaaggccaggaacatgcagctgttgtgttatatcacaaagatatccaaaattgaaagcaattcacaacgctgccggaaaaggtgacagcccgaatgatgttgtgttatatcacaaagatatccaaaattgaaagcaattcacaacagtgccgacgtaaaaataataaaaggagaagttgtgttatatcacaaagatatccaaaattgaaagcaattcacaacaacacagcatccattgccaataatccaaacgttgggttatatcacaaagatatccaaaattgaaagcaattcacaacctaaataaaaggtagaccacgaatctggaagttgtgttatatcacaaagatatccaaaattgaaagcttacaataaattaaggtgtttttattgtaaattagatttacataatgagccttttgtggttaaccctgtttagtcgataaagatcattataaaaaaacaaaacctttcagtactcctgaaaggttctttgtatggtttaggtttttaattttaatcatgcatttcgctttcgacatagccttcatcttcgatctggaaggtcgtatggctaattttgaaattactggtcgcctgatcggtgagtatccgaagcatttggttatgcggaatgctttgatcagagacaacatgggcgctcatcgcgttgataccagaggttagtgaccatacatggaggtcgtgcaggcttttaacacccggaactttttccatggtactgcgcagttcatcaatatctacatctttaggagtgccttccaataatacatgaatagcttccatcagaagtcgccatgttctcgggaaaatcagtaaaccaatacccgcagagatcagcggatcagcatagtaccagcctgttgtaagcataaccactccggcaatcattaccccgacagaggtcagcatgtccgataatacttcgaagtaagcacctttcatattcaggctgtcgccagagctttttctaagaatcatcatcccggcaatatttactaaaaggccaattccggcaacgataagcatcgccttgctctgtacctccggtgggttcaggaagcgctgataagcttcgtaaagcacataaatggaaatcgctaaaaggacaacagcattgataactgcggctagtatctcggtacggtaatagccaaaagttttggaggatgtcgcttttcgttcaccgattcggatggcaatataagccagtaagaggcctacaacatcggtaagcatgtgagccgcatcggctaacagggccaaactattggtgataattccaccaatgacttcagcgataagataaagaccactgaaggaaagtacaatcagtaagttttttttgtgcttactggaggctgaggctgtttgtatattcgtttcactcatggtattgggtattacatttcgtagtataaaggatttctctttttctgcggtacattttgctcaccagtcatttccctcaggttgatttctatggtctgtgccagggaagtcattggggtatctacaggagtgttttcaaacggatcctgcatgataatagctgttttttcaatcgcgataaagagggtagggatcaggatggtgattccaatttctatgattaacaaagaaagctgagaatcgtcgaatccaaatggcagaatggcagcaaatacatagatgagactatgtaccaaaatgctgtaagaacgtggaaatacggtatttttgattctttcacattttcccatgctgtcgcataaacgtgctaatgtttcattcaactgtatgagtctgaactcactgatcagccctttgtccgccaattgctttagctgcaaagaatgttcatccagtaatgcattgggaatattagcagcttctattctgtgatcgataagataatcctgaacacgatccgagaaagggagctttctgagggattccccaagagcatagttccagataatctgacgctgagcaaattcccggataatagtttcacttcccaaaggaagtgcctgggtaatctgacgtataaatgagcgggaatcattgacaatagcgccccatactgttcgggcttcccaccatctttcgtaggattgtgaaatccggaaggccagcaggagagatacagctgtacctaccaatgcaggaatggtaagaggaagtgaaattttctgaaaagctggaagcaaatctaaaataccaatagcgactgcaaacatggagatcagtaataactgggatttgattaaattaatgaaataccagatggatattttcttttttagcagcatagtgtatttgttatggtttgtgatgtataaaataaaaaggtgtttttttaatgaaaaaatgtcagtccgggattttaatggaaatgacgataaatgataattatagcgtaataattaataatactaaacaatataaaattaaacttttgaaatcatattcaattataaaaatgattcaaaatattacacctggtttaccccggactgacgtgtttacattagcgtgtgtgtttttgggttaatgtaaatttattttaatgctcgtgctcgccaacattggtaagcttagcattgacaaagaaggctccttttacaacaactttggcatcaggtgcaagctgccctacaggcgttattgccgtatagcccatgtcggatgttccttttataacctctactttttcgaagttgacggttcttgcatgtgacttttcagcaggagcaacttcttttttatcttttgattctgcttcctcatgagcttccggctttttgtctgtttgtataaagacatagaatttaccatcagcttctacaattgcttcggttggaatagcaggtgtagtgctgtgatccagacttaccactccggtaatattcatcccgtcgataagcccggtcttgttaccgattacagtacagtgtaccgcaattgttttgctttcgttctcaaaggaagatccaatgctgtataccttagcatcatattctgtttcaggattattagtaagtttgaagtgtacaatctgaccaatacgcattcttggcaggtctttttcaaatacctgtaaatccaggtgaagcgaagtgttgtctataatttcggctacgggagcggatacatctacatagctgccaatctgtgctctgatattgctaattgtcccgctgattggagcggtaatagccaaacctgttctcatacttgcattggtaacagaagccggattaatacccatcatttgtagttgtcgggctaaagaagctttttgggtagacaatgttctgagttcggaagaagaactctgcaggttctttttggttcctgcatcgtttttatacaactcgttctgtcttttaaattcctgttcggcaaaagcaattctgctgatggtggtaaggtactgctcctgtacgcggatgtattccggattggtaatggtggcaataacctggcctttgcgaacatagtcaccctcaagaatattaagtgtttttacaaccccgctgaaaagagctgctacagttgctttattgttattgggaacacgaagcagaccattggcttttacggtagccgttagttccttcatttctattggacctgtagtaacgccgactgactgtatctggtcttcggtaagactggcaatagtaggtgctgcctcttcatggtccttagctttagccgtctgttcggttttactctcgggagcggcttcttttttgccacagctggtgaagattaaagaagcggttatcaggtagattatggtttgtttcagtttcattttattgattaattatagaattaataataaccacagattggtttacttgctgtatggattccagatatttcagctggatattggttgatgtctgcagagcgaaaagatattctacataagaaatatctccggtgcggtaaccgagttgtgcggctttagcaattttttcggcattaggaatggcctgttgtacataataattgtactggtccacgtcctgtcggtattggcgcatagcagtatcaaactgtgtagtcagctgttgctgttgtaatttggcattgttttctgcagcctgcctttggtattccagtgattgtattctggctttggttgcgccaaaggtaagcggaatgcttacaccaacgtttaccgaattaaaacggttccagccattgtagtatttttcaccaccattattggttgggtgcatacccgtaagggactggctggtgacgcctaatgtgaattccggtaagccctgagctttttctatttttttgtttttctcagcaatttccatttcctgataaaaagctcttaccgatggattattggcaattacactactgtccagtacatagtctatttttaaagggagatactcctctttaggagctacttctatagattctgaagtgttcagtaaggttttcagattcttgtaagcattgtccagatagacctggttctgtttaagcaataagttaatttctcctttttgggtttctgcagtactgatttcaatcttcttgatatcgccggcattataccttacagtagcaatacggatgaaatcctgatagagattgtccaggctctccagtttagttttgttaaactgaagatattcaatctggtaataataggatcttacctgtctcaacaactcatttatagagacttctttctcaatctgtctgcttttgatgttggactctatcagctcctttctcgccttgaagattgtagggaagggtacagtctgagagatcgcaaatgaattgtcgaacttcggactgttgtattgccccagctgtgcggatacacttagctgtgggagctctttggctgtaggtcttagtgctttggaagtcataatattcagatctttggacttcaacaacaagttgttttcaacagccatttgggtggcctgctgaatatcgatggttctggtctgggctttcaggccttgccctgccaatcctgataacatgatgaatagtacaactacagtagtcttagttttcatctttagaatacggccttttactttttcactgaaaataatatataacatagggagtacaaatagggtaaggaaggttgctgtaatcagtccgccgataactacagtggccagtggtttttgtacttcagcacctgctcctgtagatatagccattggtaaaaaaccgatagaagccacggtagcagtcatcagaaccggacgcaatctggttttggttccttcaataactcttttcagaacatcggtttcgccttcttttttcagctgattaaaggtgcctataagaacaataccattaagaaccgcaacaccaaacaaggcaataaatccgattccggcactgatgctgaaaggcattccccggaccagaagggcaaatacaccaccaatagcactcatcgggatcgctgtaaaaattaaagcagcctgtttgaaagagtggaaggtgaagtataacagcataaaaattaaaagtaatgagataggtacagcaatcataagccggtcgctggcttctttaaggttctcgaactgacctccgtaggtaaagtaataaccggaaggcagttttatttctttatcgagtttttgctgaatatcttttaccacgctggcaacgtctcgaccgctgacattaaatccgattacaattcttcgttttccgtcctcacggcttatctgtgctgcacctaatttgtaatcgatgttggccacctgtgaaagcggaatttgcaaaccggattttgtagagatcatcaggttgttgacatcgtctatattagtacggcgaaggctgtccaaacgtacaacaagatcgaatcgtctctcgttttcgtagacctgtccggcagctttaccggcaaaggcggtactcaggacatcgttgacgtcctgaatgctgagtccgtagttggccatacgtgtacggtcgtattgtacattgatctgtggcaggccgcttactctttcgatctgaggagcggtagctccgggaactgtctgaataactttgcctactttatcggcatatacagcaagggaatccaggttttcaccaaatatcttgaccgctacatcctggcggatacctgtcatgagttcgttgaagcgcatctggataggctggttcttttcaaagaatacacccggaatagtttccagtttctcactgatctcatcagccagttcatcataagactttttggttttccattcgctttgtggtttcaggaccacaatcatatctgtagcttcaggcggcatgggatcggtaggtacttcggcagcaccggtttttccgactaccatttttacttcatcgaagcttttgatgattcgagatgcctgcatagaggtttcgatactctggctgagtgaacttccctgcggaagaatacagtggtaagcaaagtcgccttcctgcagctgaggtataaactcaccacccatatttttaaagatgataagtgtaccaaagaatataaaagctgtacctgctaccagccagtattttattttaattgctttcaatagtaaaggctgataaatactttgtagtttattcatcatcttatccgagaaagtttctttgtgggaaatcttcttagacaggaacaaagcactcatcatcgggatatatgtcaaagagaggattaatgcccccagaatagcaaaacctactgttttagccattggtgtaaacattttaccttccacacctgcaagggtaaggatcgggatgtatacgataaggataataatctcgccaaaggcagcgctgcttctgatcttggaagccgaaaggaagacctcttcatccatttctttttgggtaagcctgttgacagactttctgagaccgaggtggtggagtgtagcctctacaataataacggcaccatctacaataagaccgaagtctatcgctccaaggctcatcaggttggcactaacgccaaaaacattcatcattcctaaagcaaacaacagagacaacggaatagcagaagctacaataaggccggctctgaggtttccaaggaatacaaccagtacgaaaattacaataagagctccttcaataagattcttctccacagtgcctattgctctttctaccagatctgtacgatccaggaatggttctataacaacgtcatccggaagagacttctgaatggtcgggattttagcttttacattgtttacgacctcgttactgttagcgcctttcagcatcataacaataccacctacagcatctacttttccgttgtaggttaaagcaccataacgtacagcgctgccaaagcgtacatcggcaacgtcctttataaagatgggtacactgccggtttcgtcttttacggctatatttttaacatcatccagtgatgtaacaaggccaataccacggataaaataggcattgggttttttgtctatataagcacctccagtattctggttgttcttttccagtgcattgaagatgtcggtaacactaatgcccatcgcccgcaaacggttagggtctatggctacttcatattgctttagttcgccaccaaagctgttgatttctgctacgccgggtgttccgtttagctgtctgcggacaatccagtcctgcatagtacgaaggtctttggcgctgtattttttctcacttccttttttagggtgcagaatatactggtatatttcccctagtcctgtacttacaggagccagctcgggagttcccactcctttcggaatttcttcggaagcagtttttagcctttcacctataagctgtcgg

SEQ ID NO: 1713 - DNA, 23810 bp, synthetic construct
  source 1..23810: mol_type = other DNA
  misc_feature 1..23810: note = Synthetic
gtgaaggatttcccttccgtaaaagtagaagtggtaaacggagagcttacccttaccggaaatgtttctccggagcaagcaagaaagatcaaaatgtcggtagacgctttgaaagttggaaaagtaaattacaattacactgttaaataattaattatgagtgcattacaagataaatacgcaggagtaatctccgcagctcaatcggcaggagtttctaatcttcaggtaactgagcaagatggaatcctttatgtttcaggaaacgcaggttctacagcagcgaaagatgcagtttggaacgctcttggagcaatcgattctacttattcagcttccgatatcaatgtggatgttcaagtagttggtttggctgcaggtgcggcattaaccgtagctactgaagattctaatcttaacatcagacaggaaccttctactgatgctgcagtcgtaggaaaagcagcaaaaggagaatccgtgactttggtagaacaaacttctgacgattggtggaaaattaaaactgctgacggagaagaaggttatgcctatgcaagatatttgcgagcttaattcaacatcctttcaaataataacctccgaaatattcgggggtttttttatgcttttaagtgaaacattcgactgaataaatatttccgtgaaaattctaatcgccttttgtggtttttcattttttttaataagaattaatcgtggttttagtgagatttaagattatgaaaatcagtgtgataatccataatttgttgttctttaccaataaatctgccgaaattatagccagatttacctcttcatgcacaaaaaacaaaaaaacatatatttgtaaatctttgaaaaaattaattggaaaccgtattgtttcacacggtttcatttataaatacaatataaaaactatgaaaggtcaaaacaaactcttctttgccatcattattgcgcttattttaggggtcattatgggcggcattgttcacacccaatatcctgaagatgtggaaggattttccaaaaatatcaaactactgggaacgatatttatccggttggttcagatgattatcgccccgttggttttcactactttggtggttggaattgcgaaaatgagtgatataaaaatgatcggaagggtaggaaccaaggcgatgctgtggtttattaccgcgtcactggtttcgctttttatcggattggttttggtgaactggttagaaccggggcacgttaccaaacttccgatacaagatgtttcttcagcagatgaactcctaaaatcaagcaaaggtttctcgatggacgattttgtaaaacacgttattccaaagagtttgtttgaagcatttgccaccaacgaagtgttacaaattgtagtattttcgataatgtttggagtcgctttagccaatatggatgaagagtatgtgaaacccatcatcaaagcattcgacatttgcgcgcacgcaattctgaaaatggtaggttacatcatgtggtttgcaccgttcggcgttttaggagctattgcggctgtggtggcgactaatggtttcgaaatttttagagtttatgccatttacctccgcgatttcttttttgcattggcagttttatggttgattttacttttagtaggttattttatcttaggaaatcgactttttgaattgttaaggagaatcaaagaacctttattgattgcgttttccactacaagttcggaggctgtattcccgaaactggttgaagagctcgaaagattcggctgcaacaatagaattgtttctttcattttgcctttaggatattccttcaatctcgacggaagtatgatgtacatgaccttcgcttctatctttatcgctcagatttatggtattgaaatgactgtagggcaacaaatcaccatgcttctggtattgatgcttacttccaaaggaattgcgggagttccaagagccagtttggtgattatcgtggccacttgtaccatgtttggcattccgccggaaggtattgcactaattttaccgattgaccatttctgtgatatgggaagaagtatgaccaatgtccttggaaatgccttggctacctcatctgtttccaaatgggaaggacagctcgaagatcatggtggcaatttataaaaaaaatggtctaagctgctgaatgctgttgaagtttaaatgatatgaaaaataagataagtactgcaattacattagggtttgcgctttttgccatgttttttggtgcaggaaatttaattctcccaccttttatcggactgaaaaccggagatcaatggttcaccgcaattgccggattttttaccacaggcattgtttctccatttttaggagtactcacagtggttcttttcggaacatcatttaccgatcttggtcgaaaggtaaatcctgcggtggttactgttttggcattgctgatcatgctttgcattggtccgttggtggcgattccgagaacgggagctacaacttatgaaatcggcatcaaacccctttttccggagtttaacaatattcttttttctttaattttcttcggaatcgtgttggctttatcgataacccaatccaaaatcgttgatatcattgggaattttctcacgccttttcttattctcagtttggggattttggtgacagtcggtttgttgaatcctacggcagctacagaaaatacaggagttaccgcccaagaatcttttatttttgcgtttcatgaagggtatcagactttagatgttctggcgtcggttatttttgccggaattattatttctgcagcgattgacaaaggatataccaacgcgagagaccgttttaaaattaccattgcggccggacttatttcgatggcagctttgctttttatttatggtggtttaatttatctaggggcgcattccggttacggattctccgaaaaggtttcgcgtacacaattgcttctgaatatttcacaaaatttaatgggcaaaaacggaaccttggtaatctctgttgcggtagcgatggcatgtttgacgaccgcaattgcgcttacctccgcgatgggaagttttcttcaggaattaacgaaaggaaaattgggctacaaagccggagtgatccttacctgcttggtttctggctatttttcggttaaaagcgttgatgaaattatcgaatatgcggtggtaatccttggcttcgtatatccaattactttcgcgctgattcttaccgttttattgttcgggaaaatcatcttttccagaacgccttatgtcgctgcggttgctacggcaggattcgttgctttgctttctgttcttgagaattttggtgttttagtagaaccaattcaagctttaaaaagttggttacctctttcggaacatcagttagaatggcttttaccatcatttgcggctttctttatcgctgcagcgttcaacagtggacgaaaatcccatcaggaagcgaaagttgttgattaatgaattgaattatatcaataaaaaattcctgcttttttgatgggctggaatttttttttatgcttttaggtgatcttacgcgctgaaacttttgggattttcaattaaaaatccatgaacgatagctgccgccgcacctcctaaaaccggagcgaccaaaaataaccaaagctgagaaaggacttcgccaccagcaaaaactgccggtccgatgcttcttgtcggattcactaaaacgagcgttcaatttaatcgtaacaacatgaatgaggacaaaggacaaaccaatcgccaatcctgcaaaaccgccattgatatttttggtgaaacttacattcatgtttaaatttttaggtgattgttattaaaagaattctcaatgttttatattttaattgaatttaaatgtaaaattgtcaatattttcatcataaaagtggatttttgtttaaaaattaacaaaatgatttttatcaattaagatttttaaataataaaggaatgatagaaaaatctaatagaagagaaagggtgcatcaatcgtcaaccaacaattatcattacttttacttattctaaataattaaaatatcgtaaatttgtaatctaatttattacatacaataatgttgacgaaagataaagttcaggcatttctgaaagaaatagaagtagatgatttggtgcacaatttccaggtgatgggaaacgatgtgtatattgatatgaccgcgcattctccggcaatgcacgagaaaaagaaactcgaagcagcaatgaagcaggcattcgcctctgaatttggagaagatgtagtgctgaaactgaaaattgcttctccggaaccttccgaagtacagcaaaatttaatcaaaggaaaacaaattccgggaatccagaatattatcgcagtagcttccggtaagggtggcgttggtaaatctaccgtagcagcgaatcttgcggtaacattgtccaaaatgggctttaaagttggaattttggatgccgatatctacggaccatctgttccaaccatgtttgatactgaaggagcaaaaccaatttcggtggaagtggacggaagaaacctgatgaaaccgattgaaaattacggcgtgaaaatgctttctatcggatatttctcaggagccaatcaagcggtggtgtggagaggaccaatggccagcaaagcattaaaccaaatgatccgtgatgcggattggggcgaacttgattttcttttaattgatttaccaccgggaactggcgatattcatttgtccatcattcaggaagttcctgtaaccggcgcggtgattgtaagtactccgcagcatattgcgcttgccgatgtaagaaaaggaatcgcaatgttccaaatggaaagcatcaacattcctgttttaggattgattgaaaatatggcgtatttcactccggaagaattgccggataacaaatattacatcttcggaaaccaaggcgcacaataccttgcagatgatttaggaattccggtattgggcgaaattccattaatccaaagcatcagagaagcgggagatgtgggaagaccggcatcattgcaggagggttctaagattgctgaaatctataccaaaaccgcccaaaacatgattgaaagtctggtggaaagaaacaaaaaccttccgccaactgaagctgttaaaatcacaaccatggcaggttgttcacctaaaaaataaaaataaagaaggatcatgctcaacatggaaatcacacaggaacaaatcgtaacaaaagtactcgatgctctggaaagcatccgaccgtttctcaataaagatggtggcgatatcgaattggttgatatcaaagaccacaaggtttatgtgaaactgcagggaaactgcaacggatgtccgatgagtttttcaaccatgaaattaggcgttgaaaacaccatcaagcaatttgcccccgaaattacagaggtgatcagtgtggaataatatctaaattccttcatgctataataaattaacgggcaaaagcccgtttttttagttcaatgtttttccaccgaaggggtaaagtgagcaatttctcacgcccatccatcctgatatgcataaaataaatgcttctttcagaaagggtttaaaattaaattaatattttagcagattaaactgtaaaacgtatgattgccattatcgacggcggatccacgaaatgtgactgggtcattctggaaaattccggaaatttgaaactcagaactaccactttggggttcaatccaaacatcatcaatcctgatttcatcatgcaggaaatcgataataatcaggaactcttctctctcaaaagccacatcgaaaaggtgtttttttatggatccggctgcggaactcccgataatagcaaaaaagtggctgatgaatttctcaaaacttttcctgccggcgatatttcggtaaaagaagatatgaccgcagcggcgtacgccgcctacaacggaactccggccatcatctgtatcctcggaaccggatccaattcctgctatttcgacggaaataaaatccggaccgatttgccgtctttgggattccttatcggtgacgaaggcagtggaagcgccttgggaaaacagctgctacgaagattctttatgaaaaaattacctaaagatctcgaagcggatttcattgaaacctatcatttaaccatcgaagaggccatccggagcatgtaccacaacccaagagcgaatgcgtatttgggcgagttcaataaatttgtagcagaaagaaagaagcatccgtattttcagaacatggtgttcgacgagatgaagaatttccttgattatcaggtattgccttatccggaagcgggcgaagtagaaatcaatttcattggctatatcgcttatatttatgaagatattttaagagccgccgccgcagaactcaaccttaaaataggtaaagtagtacagaaacccatcgaaagtttggtagaataccataagaaatacctcctcaatttagaataaatcgtgctcgaagtggcccgatcaaccaaacacttgcactttgcaaaaaaccgtaattattatgtcaagcaaaaacaaccgagacgaaaaaaacttcaaccaggcagcactcgactaccacaaaagcgagccgaagggaaaaattgaagtcatcccttccaaaccccattcttcacagagagatttgtctctggcgtattccccgggagtggcgataccgtgtcttgaaatcgaaaaaaacccgaaaactgtttacgattataccggaaaaggaaacttggtagcggtaatttccaatggtactgcggtactgggattaggtgacatcggtgcggaagcatcgaaacccgtgatggaaggtaaagggcttttatttaaaatatttgcggatatcaacgtattcgatatagaaatcgacgaaaaagatcccgataaatttattcagattgtgaaaggaattgcgccgacattcgggggcattaacctagaagatatcaaagcgcctgaagctttttacatcgagcaaaaactcaaagaagaactcaatattcctttgatgcacgatgatcagcacggaactgctattatttctgcagcagctttaatcaatgctttggaaattgccaacaagaaaattgatgaggtgaaaatcgtggtgaatggcgccggtgcggccgcgattgcctgtaccaaactttatgtagaactgggattgaagaaagaaaacatcctcatgtgcgattccaaaggtgtcatcaaccacaaaagagagaatttaaccccggaaaaactcgatttcattgcgcaaaccgatactgaaactttggaagatgccttaaaaggtgcagacgtgttcatcggattgtccaaaggaaatgtgatgactccggaaatgctgctttcaatggccgagaatcctattgtgtttggattggcaaatcctgatccggaaatcgaatacaacctcgccatggaaacccgaaaagacaccatcatggcgaccggacgaagcgactatcctaaccaggtgaacaatgttttgggattcccatacattttccgtggtgcgcttgatgtgcaggcaacgggaattaacgaagccatgaaactcgctgctgttcatgcaattgcaaaccttgccaaagaacctgttccggaagcggtgattttagcttataatttaaagaatttaagttttggaagagaatattttatccctaaacctttcgataaccgattgataaccaaggtttctatggcggtagcaaaagctgcaatggaaagtggaattgccggaaaacctattgagaatttcgaagattacgaaaatgcattgctcgacaggatgggccgcgacgaaaaactcatccgaatgatgcagaaccgcgctagatcgaacccgaaaagagttaccctcggaaatgccgaagaatacaatgttttgaaagctgcgcaaattctttatgaggaaggaattgcgcaaccgattttgctcggagataaaaaatacatccaggaacaaatgaaaaaattcggcatcgaaatcgatgttcagattgttgatcctgctgatgatgaccaggaagaaaacagaaaaatctaccgcgaatctttgtggaaacttcgtcagcgaaaaggaatgaacgagtacaaagccaagagatttgttcgccaaagagattattttggtccattaatgctgaaaaacggcgacactgatgcactgatcgtaggattctcgaaaaactattcctctactttgagaccggttcttgaagtgattgagaaagaaaaaggcgtggacaaagtatcatcgatgatgatgattcttaccgagaaaaaaccgattttcttcgcagatgcttctatcattcagaacccgacttctgaagatttggtgaatattgctaaaatgtcggaaatggtggtgaaatcttttgccatagagccgagaattgcgatgctttcctttgaaaacttcgcagcgatttccgaaacttccaagaaagtagcgaaagcggtttctattcttcatgaaaaatatccgaaaatgattgtcgatggtgaaatacaacccgattttgcgatggatgcggatctcctttccgactatccattctctaaactcggtaccactccggcaaatgtatttgtattcccgaaccttgaaagtgccaatctttcctacaaaatcatccgaggtatgaaggttgcacaagtagtaggaccaattttaatgggactgaaacaaccggttcacgtgcttcagatgcgcgcaagtgtggacgaaatcgtgaaccttgctaccatcgccgtgctggatgcccaaaaaagagaggctgccaataagtaattgttcacaacgatcatattaaacaactgcatttcctggatttgcagttgtttttttataacttgttgttaaagcaaatccaccggtacttctctaataaaaaatgaaatggctaaatgtgatggattggagtgattatttttcatgaaaaattttgagtaaatggttgtttttcaataatattgtaaagcatagcacatcatggaaaaatttgcggaaaatacatcatttaggttaccggatcaatttcaatattgtatgctgtcgcaatgtccgatcaattcttcctgtttgcgttatcaggcatttttaactgcgccagacgatatgcaatatttttctgttttgaatccggcttatctcctcaagcaggatcttaccgattgtaatcagtattattcccaaactttaaaggtttttgttgccggattgaatggtataatggaggaattgccgcttcgcaaagttcaggcaattagaacagggatgatcaacctattcggaagaagcacttattacagattcatgcgcaaagataaatggctgaatcctgacgaacaacaaaaagtacacgaactcttcgagaaccttggtatgctcgatgaattggtgtacgacgatgaaagaaaaggattctaaccttttcgttttcgatatcgataatcccaaaaaaaaacgtactgaagcgacaaaaatttcatgccggtggaacgccagtttcaaacgcatgcaactgctgtttcataggtatggaacaactgtcccaatttttagcccaaaatcaactgtacagtggaacagaggagtggttaaggaaaagatgttttttctctgtgggagtgggttttttttgctatttattggtctcatgaaatatttagacaaaaaaatgccccgaagatagtcgaggcgctaaatgttttcacaacggaataatccttattgtgaattgcttttaaaattattgtatcaaatatataaaaaaattctaatccaatcgtattttttataattatttctaaataaatttattaatttaggaaactattataatacaaatatgaagagaattttaggattagacttgggagtatcatctgttggatgggcactaatagaagttgatgaatttacatttaaacctattcgcataatcggaatggggtctcgtataattccactttctactgatgatcgaacacaatttgaaaaaggacaatcaattactaaaaatcaggataggacaaaatctaggactcaaagaaaaggttatgacagaaagcagcttaagaaaagtgataattttaaatatagcctaaaaaaagaattagaaaaattcaatatatatcctgataaagaattatttaatcttccaatgctggatttatggaaattgcgtagtgatgcaacttccgaacctatcgatgctaaacaattagggaggattctatatatgctcaatcaaaaaagagggtataaatctgcgagaagtgaggctaatgctgataaaaaagatacggagtatgtagcagaagttaagagtaggtatgcacggcttaaagatgctaatgaaactattggacagcatttttataaagaactttcaactgcattttcaaataattcttattacagagttaaggaacaagtttacccaagagaagcttatatcgaagaatttgagacaattattaatactcaaaaagaatatcattcatttttgacagacgaagtaattgacagattaaaaaatgaaattatatattaccaaagaaaattaaaatctcagaaaggattagtaagcgtatgtgaatttgaaggttttgataaggtaacaaaaaataaaacaactaataaagaaaaagtagtttttgtaggaccgaaagtcgctcctaaatcttctcctattttccaattatgtaaaatctgggaaacggtaaataatatatctctaaaagttaaaaatcccgaaggcactaaatataaatggggagacagattcccaacaatagaagaaaaaaaacagattgcagactatcttgcagtaaatgcacatctttcttttaatgaattaatcaaaattctcgatcttaaaaaagatgatgtttatgctaataaacaaatcttaaaaggaatacaggggaatattacttatcaagaaatctataaaataataggagaaaacgatctgttaagatttaatacgtcagtaattgaatctaatgaagaagctattttagtcgataaaaaaacaggcgaaattttaaagcaacgtaatagattggttattgcatcatctttcgaaaaagaacctttatatcaattatggcataccatatattcaataaaggatttggatgaatgtaaaagtgctttaatgagtaggttttcttttgatgaagaaattgcggataaactttccagaatagattttaataaacaagcctttggtaataaatcaaccaaagcaattcgtaaaatacttccttacctaatggatggatttgattattcacagtcttgtagtttggctggttataatcattctaacagtttaactaaacaagagaacttggaaagagagattaaacctaggctagaattattatctaagaatagccttcgccaaccaatcgttgagaaaatcatcaatcagatgattaatgttgttaatgcaattattgatgctcacggaaaacctcacgaaataagattagaacttgccagagagctaaaacaaagtaaagatgagcgtgatgctgccgataaatctaatatcaataataaaaaacaaaatgatttaataggttctcgattagaagccatgggcttacctgcaacaaaaaagtatattcaaaaatataaattcatatttcctacaaaagataaaaagtggaaagaagcagacgttgtaaatcaatgtatttattgtggggaaactttcaatttaactgaagctttaaggggagataattttgatatcgatcatattgtgccaaaggcattattgtttgatgattctcaaaccaataaagtcttggttcatcgtcattgtaactctaataaattagataaaacagcttatgattacatcgcccaaaaaggcgaggttaaactaaatgaataccttcagagagttgatgattggtttgcaaggggagtattgtcttatggaaagatgcaacgtctgaaagtttcttttattgaatatcaagaacgtaaaaaattgaaaaaggaaacagaagcagataagaaactttgggaaagcttcatcgatagacaattaagagaatctcaatatatcgcgagtaaatcaaaacaaattctagaagggatttgtcacaatgtaactgttacagaaggtacagtaactgcgagattaagaaaagtttggggatgggatgatgttttgatgaatcttcagatgccgaaatatcgagaactaggacaaactgaaatgaaagaatggactagcgaacatggaaaaagaaaacataaaaaagaagagattatcaattggactaaacgagatgatcatagacatcatgctgtagatgcgttggttattgcttgtacccagcaaggatatatccaaagaataaatacattaaatgcaagtgatgttagaaatgaaatgctgaaagaagttgaagatgcaaaaactcaatatagcgaaaagctgacacttcttgataaatattttattactaaaaaaccatttacgacttccgaagtagaaaaagaagcagataaaattttgatatcatttaaagcaggtaagaaagttgctactacatcaaagtttaaagcaaaaggaattaataaagataaaggtgtaattgtaccaagaggagctttgcatgaagattctgtttatggtaaaattaaagttgaggatttaaacaaacctattaaatatttattcgaaaaccctgagaaaattgttcatcaaaagataaagaaattaatcaaggaaagattaattcaaaacgacaatgatgtaaaaaaagctttgtctacaattaagaaagatccaatttttttagatgaaagcaaagaagtagttttagaaaaagcttcctgctataaagatgtaacggttaagaaatatgatttactgtcactttcttcaaaacagatagacgatattgtagatgaaaaagttaaagagttagtaaaagagcgactaaaacagtttggtaacaaagaaaaagaggcttttaaagatgttttatggtttaatgagaaaaagcagattcctattaagactgttagattgtttgctcgtccggatgctaattcattacagccaattaaaaaagacgaaaatggaaaagatattggctttgttgtacagggaaacaatcatcatattgcaatttatagaaacaatgaaggtaaacaaattcaacattcgtgcacattttggaacgctgtggaaagaaagagaaacaaattgccggttataattaaagatactacagatttatggaataatatttctgaacaaaagctgtctcaatcatttttatgtttgttacctgaagatggtttaaccttagaattcagtatgcaacaaaatgaaatgtttattcttggtttaactaacgatgaatttaatgatgctattaggaataatgataaatcaactttaagtaaacatttgtatttagtttggagtatttcaaataatgactattggtttagacatcatttagaaactaaaaattcggaattgaaaagtattccaacagcgaaagattcaaaaagatattttagatttaaaagtgtgggtgctctaataggaatgaatccaattaaggttaggttgaatcatttgggtgaaattataaaattaggcgagttttaaaatgatcacccgctccatctacatcggcaatcccgcttatctcaagttgaaagatgagcagatgaaaatactttgccctgagaccaaggtagaaaaaggaagtattcctgtcgaagatttaggattgctgatgttggatcattttcagattacaatttcgcataatctaatacagaagatgatgggaaacaatgtagtgatagtaagttgcgacgcacatcatttgcaccatgggattatgttgcctttgtatggtcatacggagcattcggatagggtgaaagatcaattggaagccagcgagcctttgaaaaagcaattgtggaaacagactgtagaatgtaagattgaaaatcaaaaagaagtattgttgaggttaggcaattattacgaaccaatgattgaatatcagagaaatgtaaaatccggcgacattacgaatatggaaggcattgcggcgcagcattattggaaatatctcatcagtcttgattttctgagacaacggtttggagattcacccaatcagttttttaattttggatacgctgtcttaagaagcattgtagcaagagccattgtagaaacaggattgttgccagtgctaggtatttttcataaaaacaaatacaatccttactgtcttgccgatgatttaatggaaccttatcgtccgtttgttgatttactcgttatgcagtggctgaaaattcatccggataccgaagaactgacgaaagaatttaaagcacatattctccagattgcaaccaaagatgtgtgtattgatgataaaacaagaccgttgctggttgctgtaaaaatgaccacgtcatcgctttacaaatgttacacgggagaaaaacgacaggtttcttatcctgaatttttataatgagaagaaatacatctaaaaaaatatgaatgccgaaaggtttaatgcctaccgaattatgtgggttttagttttatacgatttaccgaccgaaaccaaagccaatatgaaagccgctaatcttttcagaaaaagactgctggatgatggttttgcattgtttcagttttccatgtatatgaggcattgcccaagtagagaaaatgcagaagttcatatcaagagggtgaaatccatcctgcccaaggcgggaaaagtagctattatgtgcattaccgataaacaatttggcgatattgaaatcttttttgcccgaaacaaagaagaacctccaccaacttatcagcaattagagcttttttagcatctgtaattaaaagactccatcagtatagaaaaagagctgcgtttaaaccaaaacagaacgatagaaagcggaattttaaatgctggaaaaacctcaaaaacctcctgtgctaggaggtttttcaatttgaggttgcgtcgtgtcacgaagataataatttttgaaatccgcaggattcggcgaaatggattgggaaagttatggctgagccaaagcaatcacgaaataaaaaaggataaatctatagaattctaaaatggaaatttaaagcttttgaaattctgaaaaccccgttaaaaacctccatatcaggaggtttttcagtttgaggttgtgtcgtgtcacgaagataataatttttgaaatcctaaggattcggcgaaaaacgcaggacaaagccaggctgagccaaagcaattcacaagccatcaagaaagacgacaaaaataatttcagctgtgatcaatcacgaagatatcaagctcaacctcgatgaaattatcaggattaatgccatgaaagattatatcatcatttataccgtcaccagaaaactcatcgtacaccaaaccatgaaatcaatcatggagaaaataaatttagagaatttcattagggttcataactcgcacatcatctcgctgaatcacctgcaaagtgtaggcaaaaacagcatagtggtcgccaacgaacgaattcctgtgagcgaaaaatacaaagcttttttaacggagtttattgatcgttttaagtaaaagccgattttattttttgattatggtgaggtcttttgatccgaattttctttcaagccaagctttcaactttgcttcatctatggatttttcggcttggtaaaggataatatttcctttcttaagggaatcatttttggaataatcggtaacggtgccaaatgaaattgcgtcgatatctggaaaaatgattttaatttcttcgtccaacgatttatttccgatctggtaagtgtcgatctcacccagtaaattctgaatttggatgtctttatctgaaacctgattgctggatttattaatttccgataaaatttcctttttcaaatcggaattgtttgctttaataatcagttccgtgtcggaaagtccataagcgttgagctctttgtttaatttttttatttctaaactatcaaattttttcgaaagaaaagccaactccatttgtttgggattggttttatagttgatgtttttgtaaatcacagtatagccgttcttcgtaaattgatcttggatgaatttttcagcattttggataaattttttttcttgtaataagctgtaagccaaataggaactcggaataatcatcagtaacattaataccgaaataatcacccgcacttttttatcaaaacccgtgttttcagttttcacggcgggatatttaagatatttaatcaccaaaaaagtagaaatcccgataaaaaaacaattaatgctgtaaagatagagcgcgcctgctacaaatttcatgttgaaatgggcaattccaaatcctgcggtacacagaggtggcatcagtgcggtagcgatagccactcccgggataggatttcctttttcaattcttgtgatggaaaccgcacctacaataccaccaaaaaatgcgattagaacatcgtaaatagtgggcgaggtacgggataaaatttcagactgcgcatctttgaacggacttagaaaaaaatataaactcgatacaatgagtccaaccaaggtagcaatcagtagatttttcacggatcttttcagaaaattaaaatcatacgttgcaagcgcaaaaccggaacctacgataggccccatcagtggtgaaattagcatcgccccaataatcaccgcggtagaattcatattaagaccaatagaagcaattaaaatagcacaagccaaaatccacaggtttgcccctcgaaatgagatatttgccacaatatcttcccttactttttccttgtcctctgctcctttgtttaagctaaacaggttataaaatacactcatgaatttattctttgcgactaagataaaaataaccacgataaaaacaatgtaatgacagataaaactcgcggttatatgctttgttttcttttataaagcccagcatccaattcaatgcttattattttaaaagaacggattttgaagatgaataataatgctacgcaggaattgtagtgcacttaaaattgagtggcttagcaaaagggaatttgctatatgcaatttgccataaaatttatgcagattatggattagtagttaaaaaatattcacaaacatcatcatcggctggcatcgaaaagctctaaaaaaaagttattttttgcttacaaacaaatgatcaaagattaaattttaaaaaacctatatttgggtttttcaaaaataactcatgatttattctttaaaaggaaacattcaggaactcaatccaacctccgtaatcatcgacgtacaaggcgttggttactatgtgggtatcagtcttcaaacctccgaaaaacttcatttagggcaacctgctttcctcaatatccaacaaattatccgtgaagatgcgcatttgctcttcggttttaacactattttggaaaaagaaatgtttaatctgttaataagtgttaacggagtaggtccggtttctgccatcataatgctctcttctttgagccttgaggagattgcttcggccatcctttcgaacaacagtgcgttgctgcaaaaggtgaaaggaattggtacgaaaaccgccgagagaatcattgttgatttacgggataaagtccaaaaattcaagaactctgaggaaaatatttccgcggcagtgaataataaagtgaaggaagaagcgttatctgcattagaggttttgggaattgccaaaaagatgagcgagaaaattgcagaccgagtccttaagcaaaatccggagcttaccgtagaagatttagtgaagcaaattttaaaaaatatttaacatttggagaagattagttttttttgtcgtcaatttttatatttattcgtgttttgttgcacattcgctacagtgaatgcgcaggaaaaaccatcagacagcgcttcggtgaggcaagatttttcgcttcccaatcccatgcggtacgaagctttttacgatgtaaccagcggtatgtattttttgtacccgaaagtggggaacatggtagtgggcaatcctgtttccatgacttctgcggagtatcatcaatatatgctgagtaatcagttgagtgaatattacaaagaaaaatcctcaacccacgatttaggatctcgaaaagatcaaacagatgccctgaaaaaaggacttttacccagtgtaaacattaaaaataaactctttgaatcactttttggagggaataaaattgaaattattccgcaaggtttcgcctctttcgacattggtggattgtaccaaaaaatcgataatccgctgattttaccacaaaacagaaccagttttgcgattgatattcaacagagaattcaattgggattattgggtaaagtaggtgaaaatctgcaacttaaagccaactatgatacccaaagtggtttcgctttcgaaaatagaatgaatttggtttggcaagcaaaaggaacgtggaaagacctgcaaaccaaagggttaaatgataaaacaaccggcggagaagataaaataatcaaaaaagtagaatttggtaacgtaaatatgccgctttctaccagtttaattcgcggttcagaatcgctttttggtttaaaaacggagttccagttggggaaaactaccggaactttggtcttctcgcaacagcaaggtgaatcccgaaccatcgtggcacaaggcggtggcgtgatgaacaccttcaaactcaacgcgattgattatgaagacaatcagcactactatctcggtcattacttcctgaattcttacgacaatgcgttgctcaattatccgcaaatcaattccagagtgagtattaccaggattgaagcgtgggtgctcgatcagggttccgggaatcttcaggatcagaaaggaatcctcggaatccgagatttgggagaaggtatttccggctttccggacaactcgcataataatttatatcaagggattgcgaaccttggcgcgggaattcgggatgtgaataccgcttacaacaccatcaacggacaatcttttccgaacgccaacggatctattgaaaattataccgatggagagcagtttatcttcaatagaaaagccagaaaacttacccaaagcgaatttacctatcatcctcagttgggatatatttccttaaatcaaagactcaacgataaccaacttttggcggtgtcgtacacctacaccttgaacggcgacagaaaggtgtataaagtaggggagttctccgaagaaagcccggtattgattaccaaattattgaaatcgaatatcaaaaccactaccacaacgccgatgtgggatttgatgatgaagaatatttattcattaacctccaatcaaatcaattcggaaaactttttattgaatgtatatttaagagatgcccaaaacggaaaggtgaattatcttcctggaacggcggttcaagatactaacctccttaaattgttcaactgggatcgtttgaatatgaacaacgatttacagcaaaacggcgctaccacgggagatggaattttcgatttcgttaacggcattaccatcgatcctgaaaatgggaaaatcatcttcaccaaagcgaaaccatttggagcttatcttcaaaatgttttgggaagcagtgatccgaaatttgtattcaatgatttgtatgataaattcaaaaatgtagcctccgaaaaccgtctggctttggcgtacaccttggaaggtcgcttcaaaggctctcaaggaacagggatttctcttggcgcaatcaacgttcctcaaggttcggtgaaagtaacggccaatggagtacaacttcaggaaggtattgactttaccgtagattatatgctaggtaccgtaaacatcattaacgaagcggtgaaacaatccgggcaagccatcaatatttctcttgaaaatcaattgactttcaatacccaaagaaaaagattccttggattgaatttggaaaggaaattcaatgaacatttgaccatcggaggaacagtggtaaattattctgaaacgccattaacccagaaagtaaattacggccaagaagcggtgaacaacaccatggctggtttcaatattttgtataataatgagctgccattcctcaccagattaaccgataaaattccgttggtaaatacagaagcgccatccaatttgagttttatggcggaaggtgcctatctgattccgggacagaataaaggaattggcgatcaatcttatatcgacgatttcgagcaaactacttccaaaatttctttgaaagaacccgcaatgtggagtcttgcttctaaacctgaacacaatccggaaccagtattctcgaatgctaattccaatgatgatttgtctcacggcaatggaagaggtttgctgacttggtacaatatcgatccgagattctacggaattggaggaaaagcaccaagcggaattaatgctgaagcggtatccaaccacgcttcgcgaagagtacaaacccaggagctttacaattccagagattttgtagcgggcgaacaactctataccaatactttggatattacttatttccctacagaaagaggtccttataatgtgaatccgaacaatgaaaccacccaagaaagatgggcaggtttgatgagaccagtcaccgtatccaatttcgtgaattcgaatatcgaatatgtggagttttggatgatggatccttatgctgatggtaaaaatttaggaaccaatccgaaattattgttgcagttaggtaatgtttccgaagatgtgttgaaagacggaaaattacagtacgaaaacgggttgccaactccaaatgttccggcaaataccaccacgaccaattggggaactcagccgaaccaattcccaattttgtatgctttttctacggaaaatgaagaaagagccgcacaagacttagggtatgacggccttgatgcgcaaggtgaaagtgccaaattcggaactaattttatcaatccggtgaccaatacgcccgatcccgcatccgatgattttgtgttttacctctcagatcagttccaagatccacaagcttcatcacttctagaacgttacaaatattttcgtggtccggaagccaattcccaaagcaattcattggaagtggccacccaaactccggatgcggaagatgtaaacagagattacaacctcgaccaaagtgaaaactataaccagtacaacattagccttgataaagcaagccttgcgcttggtcagaatttcatcgtggatgaaaaagaggtggacgcaaaattccaaaacggacaaaccggcaccaacaaatggtatcttttccgtgttccggtttctcagtttgttactgatgccggagatcacgatcctgcggttcttaacaatgttcgttttgcaagaattttattaacaggttttgatcaaacttcaaccctgcgtttcggaaccctggatttggtacgaagtgactggagaaaatataccaaagatatcgcgactaacattaatgataccgaaggagtgaatcctgtagatgattccgaaaccaaccgaatggatgttggaagcgttaatttagaagaaaacggattgaaccagccgccgtatgtattgcctccgggaatcgatcgacaagttcttagcggaaacgccggtgcgcagagacagaacgaagcttctctttacctgaaaacttcgccaatcgcaccgaaaacttcaagagcggtgttcaaaaatgtggcgttggatatgcgcagatacaagaaattggaactttttgttcatgctgaagatgtaagagcaggagcaatcagcaatggtttggatccaaacgcgaaattctttatccgatttggtagcgacgccaccgataactactatgagtacgaaacttctttaacttatactccgaaaaatgcgacttcaccattggaaatctggcctacagataacactgtgaatttggaagtgcaaaacttcatcgatgctaaattgagaagagacgaaaatggttccgtggtcatcgatcaaagaaccgaagatttcgaatatggcgcattggatcctaacaaaaaaatcttcatcaaaggaagaccgagtttaggaaacgtaactaccattatgttgggggttagaaacaaagatcaaagcagctcgaaagatttagttctttgggtgaacgaaatccgtctttctgaaatcgaaaacaaaggaggctacgccggaaatgctagcgtaaatttcaacctcggagattttgccaccgtgaatgcgaatggttcttattcgaccatcggatttggtggaattacccaaaaaccttcggaaagagcgcagtcaacgctttctgctttcaacgtaaacaccacggtgaatgtggataaattccttccggaaaaggtgggaatgaagattccggtgaattattcttacacgcagaccatcgaggatccaaaatacaatcctttggataatgatgttactttcgagcaagcgccgaaccgccaagagttgaagaaagtagcaagaacttacacccaacaaagaagtattggggtagtaaatatgcgtaaagatcgaatgaatccggacaaaaaaccgaaattctacgatgtggaaaacctttcagtgactgcggtttataacgacgattactacagagatgtttacaccaagaaaaactaccgccaatatctaaaagggtatatcgactataattattcgttcaaaccatgggttttgagacctttcaataaaatagtgagcgatactgcaaaatcttataaatatttaagattcatcaaggaaattaatttcaatatcgttccgacgagattctctttcagaaccgaaatcgatagaaactacaacgaattagagtttagaaatattgaagcaatactcaacggaaattcaggagacaatttcgatgtcatcaaaaaccgtaacttctatttcggttggcaatatggtttgggctttaactttaccaaatcactgaagttggaaatcaactctgcgatgagaacgttgaatgataatttgaacgtcaacgatatgaccaataaatcgattttcgaaaacccactgcgggcaggaagaccggttttatataaccatcgtgtgcagctgaactacaaattcccgttccaatatcttccttacctcgatttcatcaatgcggaactcggctacggatttacttataattggaatgcgagaagtaccgtgatgaccagcttcgtgaatccggaaaccaacgttgcggaaagtttgggaagtatcggacagaataccaacaatatcgtggcgacttctacggtggacattccgaagtttttcagcaagtttaagtatttccagaaaatcaataccacgatgcaaaagcgtaaaaaggaagtggattccctcaacaacgcttatacccaattgtggcaaaagccaaattccaagaaaactttcaaaagttatcaatttaaaaacaagttgaa

SEQ ID NO: 1714 - DNA, 23810 bp, synthetic construct
  source 1..23810: mol_type = other DNA
  misc_feature 1..23810: note = Synthetic
taagatcgatgctcaatctaaggttcttcctgatgctaaaagctttaatacaataggtatgattaaagggaaagaaaaaccggatgagtatgttattctttctgctcaccttgattcatgggatggtgctcagggagctacagacaacggaacaggaacacttacgatgcttgaaacgatgagaatccttaaaaaatactatcctaataataagagaacaattgttatcggactttggggaagtgaagagcaagggcttaatggttccagaggatttgttgcagataatcctcagattattaaagggacacaggctgcctttaaccaggataatggtacaggacgtgttatcaatatcagtgggcaaggatttataaaagcatacgattatatcggaaaatggctggatggtgttccaaaagcagtaagaactcacattaagactgatttccctggaatgcctggtggtggcggatccgaccatgcttcatttgtagcagctggtgtaccgggattttctttaagttctttgaactggggatatttcgggtatacatggcatactacaaaagatacgtatgacaagattgtttttgatgaggtgaagaataatgtgatcttaacagcagcattggcttatatggcttctgaagatccggaatttaccaacagagaaaaaagagtaatgcctaaggatgataaaggaaatccgatactatggccggaagccaaagaacccaaaagaagttctaaagattataaataataaagattctattttctagtagaatttttcattgaaaaaggttacctgaaagggtggccttttttgttttttatcggttttacttcacctattattgaaataatgggctttgaatttttctatgatctataagactttgcataaatacataaatgtgtaaagaggttgtatgcaaattatgagtttctactgttgaaaaaataataatgtattgatttataaaggggcttttattatcaataaaaacatagctacacctcctaaatgcagtctttttattttaactgtctcttgattttgtatccattttttcttgtacaagttatcccggttatttgcaataaaaaaacatgtgattataaaataatgtaaagtggggatttttaattttaaaaatcttcagaaataaaaaacacacattatgaaaaaagatattccggatgggaaaggtttggcttatggaaccaatcccattgaaaaacagaatttttatgttgtaaaatctggtgagaccctggaaagtatttcccaagatttgatgctagagaaccctcgttacctttacgaataccataatcaaagatgcagctttctggatattattcctgaaaatggaagattaagatttctacagaaactttgtattcccacttcggaggaggtggcaagaatgaattttctcatccggcaacagggagaaggcttatacaaacactttttgaacggaagaatcccttttaatgctaatgctttttcaggagattataaagttatacagactgaaagtgatgatggtgttcagaaaagtgaatatgcctattcgctgcattttaagtatataaagaaagaaaaggatcatcatctccatttttcaatgagtggttttaaaaaagatggtgaagaactggaggaaaaaatcaatagtctggcttctgcatttgtgaaaatcatttatccaataactttgattatagatcattcgggaggtctgctaactgcagagacggataaagagatctcagagatcattggtgagattgaagcattaaaaaaatattatcagggcaagtatgcctctttacacatcgatcagctgaaagataaaatggccaattcaaagagtatggatgctagtcttaaaaagctattacccatacaattgcttttcagttgtttttatcaggctcattataacatacaaggggtagcttctccttatatatcccggttttcatggatggctccagcttcaccgattaaaatggaactgctgaacaatacattgccggagaaagatcctcaattcatagaagttgtacagacaggaaaatcggcagattaccgaacggttgaggagttatatgaagaggaaaggaataatgatgaacacactaggcagaatctgaagtctctgatagccagtcatactgcagtttatacattaaatgcagagaatttttctgttcagaaaatcaaagcagcatttcaaattcaaattgctgactatgagaagtcaatgacctttgatttagaaaaattagcaggataaaagatcaaaattgtatcaaccaacacaaaaattatgtcaaaaaatgtatcaccacatgacgggaagcactttgttgtgcaaaagggcaaagcctgttgtaatcagggcgatgtttttcctcagtttaaagtgaatgctcatcagaaacattactggaatcataaagaaactacagcagattatcttgccgtgacagaggaagatatacagtttaatccttccggttcaagttttgggaaatgcaaactaaaaccaacatctggcggctacttaccttgcacttatgctcctgcaggaaaatggcagaaagtctatgaaaaggtaaaagtaatgggcaatagctgtctgtctgaaatttctgaactgatgtgcactacaggtggactcattacagtaaaggaacatggccagacttctacgatgaacagacagaatataaccttggccgatgtaaaaagctatcattttattaatccgtttatggatctgaaagaatctcaggaagaatgggaagaacctgatcctatctatgagtagaaaacgtttcaaaactagcagatatggcaaaattgactattacaggcagtacccaacctgttgttggaaatacggaggcttattcactttcggtatttgataatctgatctcttccaattccttttcttttcctcctcccaaaatacaatggaatgttcatgtacaagatcggaaaggatggcgggttacccatgggaatatcaaagaaggagaacatattacttataaatttacccttaaaagtttaaaatatagatctctaaagattgaagtcataagagggaaggatcgtggggagctgtatataaagccaagacaggctgaagaacctaaaatactccgtgtagatttattagatattaattctcagaggttacagaaaggaaagatacttcattatacagatactttaatagctaaggctcattgtgtgggaatgtttggatataaagtggcttttaccttatgggaggatgacgcattaggtaaaggccatgatccgatgattaacatgatgaatagaattaatcctgtacctctggttggcgaagtggatcatgaaggtgtggctaaagttattttcaggctgccaagctatacaatggcagtgcagatagccaatgctcaggttgccagaggagataaaagtgagggtagaacccatgaatattacgtaactgcagaaatgacttccaaacatattctaaaggccagttccaatgtaaatattgctaatcctactcatagtccggaatctcctaaaaagcaaaaaactaaagaaactaaccctcctcaaaagacatctcccgttgcaaccagagaaaaagaagtaaagcctgataaacccaaacctaaagacaatactccaaaatttcctcaaactccagccgccaaaaaacaggttgatcctgaagggaaaatcataagtgcagcctttacagatgctacaggaaaacctttgggaaatgctaaaacaggtgatgtcatatctattaaaatcgtcactcaaagtatgaaagggaaaaatgtaaaggtcagaatctgggaagaggacttttcaaggtatagcaatgatctggtatatgaaaaatcagtaacactggcttttgacatgaccaactttatcaacggtattatccttaccaaagatatgtacatcaaaagctacgaatggggagaaggcaacgaaagggagtatttcatagaagttgaacatctcaatacttctgtaacctctcaagtgatccctgtaagcccggatgcggagccgatgaaagtggatgctaatgattctgttgcggtgattaaggagaaaagggaagaaaggaaagtttgtatttgtgaagaaagtaaattgtattggggcaaacattttacatgtctggaacgcaagaaaatcatagaaatttcaaaaaggttgttatgtgacccaaatcatttgacttctgctatggcattggaaacaggaggtaagtttgatccaagtttggttaatgacttagggtatacaggattagttcaaattggaagtgatgctgcacatgatattaatagaagaaaagggacaaatatagaagctggtaagaaagggaacctaaaaaatatgaaaaagtttgaacagcttacttatgtagagtattatcttgagccttttagagcaaaattaaacactctggttgatttttatttagcaatcttaatgcccgttgattgcggaaaaggaaatcaagatcattatgttgtattcgataaatatttaattctagattataattctaaaggtgatgttattaaaaatactaaatggataagaaaaaaaggttatgctaaaaatcctgtttttcacaaagaaggaagcgaagaagatggaaaaacatatgtatgggaaatagctaaagaaatagaaggatggtatagaaaaggtgcgcttaataaagccatcgattttcaatgtcaaaaagatcatgaagataaaattgaaaataaaaaagattctaaatggcacgatcctattgataatccagaaatagcattgtttaatttcagcggaattgaaaaacccaaaggctcttcttttggccttgttagaacacatccgaatggaacactaaaaaaccatcaaggcttagatatttttgcaccaaaaggaactccagtaaaagcttgtttaaaaggaactgttgttttggtctcagaaaatgcaggtgcatttgggaagcttgtggtaatagaagtagataagggtgatttagataaagcaagaatggattataaactacaatatcaaggtgaaaaagaaaaggggcctagctttggggattctgataaacgttttttaagatatggacatctcagtgaaataagtgtggaaaataaacaggaagttacagcaggtatggaaattggaaaaagtgggaatactggtaatgcatctaaacaaaatatcaaggcaagacatttacattttgagattactgatgcaaagactgcaggtgaaggtctaaataatagagaaaaccctgcattttatgtaaggcttaaggctcctaataaaaataggcaagaaaataataaaagatgataaagtacctctatatattgatggcattaggaatgctttcatgtgtaaaagatagaacagtaaaaaatgatagagcaaaggattctatacccttattagccccagaagttaataatattaattcagaaaacagagatacgttgaagttggaaaatgaattagaaggagaagatgaatttatttctaaaaaattatttcaaaagtggaaaggcttatatattatggaaaataatgatgtaattgatggttgggggagagaatctatttcttatgcagaactaaatatggtaaatccagatagttgcatatttaaaagttggttggcggataataatggtaaaaggtataataagcatgataactatcaagaatatattggaggaatatatgctactgccaataatgattccattgaattttttacaaaaaaaataatagaaggcggaaatgagaatctctcacctctattaacattgattaaaagaaagaatgagtattttatatctagttttattacctctcctcctcataatgggattattgaaatgccaatacaaaaggtcacatcaaaataaagccggctcacaaaactgtaaaccggcttttatttaaatataattttttaaatcagagaatgctgaaatctgagcttcatgtgggctggacagctttccaaatccatattcgcagaaaataaagggcaattcattggaagtcgcagaatcataatcggtttgggtatctccaacataaacagaatcttcaatagataaattatttctttccatgagaagctgtatgttttctgacttcgttttttgagtgcgcccatgagactcaaagtctgtaaagagatggttgaattggtaatattctaaaaacgattcaatatagccgtcctgacaattgcttacaatgaaaaggttgtgagtagccgccaggcttttcaatgtattctcaacattgggataaagaataccgccttgtatacgcaatacctggttttcctgggctactacttcagaaagaagctcatcaatctgcagatctgaaattccgggaagcatatctttcagaatatcatgagccagtaagcccatatactgattcatatcgtccgatttcagttcatgttggatcaattgatgcttacttaaaacatcattccatattttgataatcgttgctctggaatcccataatgttccatccagatcgaaaattagatttttataactcaaagtcttttatttaatgataatgaataattgtttttttcaaattttatgaagtaattatgtaaccattaaggtgagtttagaagttaagtttgattaacaaaacgtaagcaaaaaatcttaaagcgaagcttaacttgttattctaaatcccttaccacatcttaatggttagaaaatgaaacagccttataaaatcatactcagttgcactcttttccttgcctcattcacttccgttacctttactcttacatgctgatgcaattttactacttcattcacatccgaaacaaagccgtctttaagctgtgaaatgtgaaccaatccgctttctttaattccaagatctacaaaacatccgaaagctgtaatattgttaacgattcccggaaggatcatgcctgtttttaaatccttaatgctttttacactaggatcgaactcaaatactttggccgctttcctcggatccaaaccaggtttttcaagttcctttaaaatatctttaattcccagaattccgatatcttcggtgatatagttttccggttttatctgagcaattttttccttgttggcaatcagttcatcggttttgatccctaaatctttagccattttttctacagttttataggcttcaggatgtaccgcagaattgtccagtggattttttgaattggtaatctttacaaatgctgctgcctgttgaaatgctttttcgccaagtcttggaacttttttaagctgttttctatcctcaaaagcaccgttttcagccctgtaattcacaatgttttcagccattttttctccaattccggaaacatagcttaataaagatttgctggctgtgttcaggttaattcctacagagtttacacacttcatcacggtagaatccaactcatttttcaattgagtctgatccacatcatgctgatattgtccgactccaatagattttggatcgatttttaccaattccgccaacggatcagaaagtcttcttccaatagaaaccgcaccacgtaccgttacatcatagattggaaactcatcccttgcaattttgctggcagaatacaccgaggcacctgcttccgaaaccacaaatacctgtaaaggtttatcaaaagcaattttcttgatgaaaaactccgtttcacggcttgctgttccgtttccgatagaaatggcttcaatattataagcatttaccatagaacggatctttttcatcgccattcccgattcattctgtggagcgtgagggtagagggtttcattatgcagcaaatctcctttttcatctaaacaaaccactttacagccgcttctgtatccaggatcaatagccagaattcttttttctcccaatggcggagccaaaagtaattgactcagattctcagagaaaatctcaatcgcttttttatctgctttttccttagcctcctgcaatgcttcattggaaatagcaggctccagaagtcttttataactgtctttaatcgctaaagcaatctgatcagaactttcattattagatttgatgatggctttttcaataaaatcaatcgcctcttctttgtcaattcctacattggtttttacaaagccttcagcttctgctctcagcattgccaaaagcctgtgagaaggagttctgctgaggttttcctcccattcaaaatactgagaaaacttttgagcatcttcttcctcctttttagccttcaccactttagaagtcactactgctttacgctggaataaacgacgaaggttcttacggacatacatattttcattaatccattccgccatgatgtctcttgctccctgaagagcttcttcctctgatgtaacatcgttattcagatatttggaggccaaaaattgtacatcattgtttttctggctcattatgattttggctaaaggttctaatcctttttccttggccgcatctgctttagtcttcttacgttttttaaaaggaagatataagtcctccaactcctgcatatcaaagctttcttcaattctttgtctcagttcaggcgttaaagcatcctgttcttctatagattttaaaatagattcctttcttttaacaatctcatcaaactgtttgctgatcttggcgatctgctcaatctgtatttcatccaggtttccggttttatccttacggtaacgggaaataaaaggaatggtacagtcttcggctaataattgtaaagtattgttgatgctcttctcagaaatatcgagctgcttctgtataaattctacggtcgtcattgttctgttttcgaatagctaaaatagggttttaaaacgaaaaaaggcgagttgcccccgccttgaataatttttcctttgaattataatttaattgacaattgctattgccattccatcatattctttcgcacctacggtttgcataatcgtggcagtaacttttggattatcggccagcatttgattaaaacgctgtactcctctcactttttcatcattgctgtttttatctaaaacctgaccttcacgaatcacattgtcacaaatgatcattgttccgggatgagacagttgtaacgccagttcaaaatattctgtataaggaggtttatctgcatcgataaaaataaagtcgaacgtttcttcccccacagcaataagttcattcaatacatccattgctttaccgattcgtaaatcaatccgatcagaaagccctgcttttgcaatgttcttactggcaatctgagcgtgatgaggatcaaattccacagtaatcactttaccatctgcaggaagtgctctggccatccaaatagtactgtagccgcctaaagttcccagctctaatacacgtttagccttacaggtaaggagcatcagttgcagaaacttcccttgtacaggcgttacactgatttgaggcatggaagcgtcatctaaagattgaatggtttcctgaagtaccgtatcttcaggagctaccaaattactgatatagtcatctactttttcaaataattgctgattcatatttttgatttgattgaaacgaaggtagtgaattctgaaagctgttacaactgagaaggtatcagttacaaataaaaatcccccgtattggaagacgagggggcttaaatgttttcacaacggaataatccttattgtgaattgcttttcaaaattattaagacaaatataggagaaaaaatcttttaggtgattacgggaatcctcattttaaatattttttttatttctatttttataaggtatataaaaattaataatgatgactaaaaatatacttggattagatttgggaaccaattccattggttgggcattggtagaggttagtgaaaataatattcctgttcgcattattgcaatgggctccagaataatccctttgtcaacaagtgataaagaagaatttcaaagaggtttgtcaatcacaaaaaatcaaagtagaacaataagccgtactcagcgaaaaggttatgatagaaaacaattaaagaaaaatgatttaaagaaaattctaaaaaaatacaatattttcccatcagaagaattgttaaaacttccaatgcttgatttatggaaactgagaagtgattctgctaattctaatgaatatatttctgcagaacaattaggacgtattctctatatgcttaatcagaaaagaggttataagtctgccagaagtgaggctaattctgataaaaaagatacagattacgtgcaggcggtaaaaggacgttatgctcagttaaaagacagaaatcagacgattgggcagtatttttatgaaggactttctaacgcattttcagacaaaaataatcagcagtatttcagaatcaaagaagaagtttatccaagagaagcttatatagaagagtttgatactattattaatgctcaaaaagacaaacacgattttcttacagataaagtggttcatcaattaagaaatgaaatcatttattttcaaaggaaattgaaatctcaaaaagggttagtgagtatctgtgaatttgaaggctttgagaaaactgtttttgataaggaaaaaaacaaaaataaagtggtatttgtcgggccaaaagttgctcctaaaacatctccattgtttcagctttgccgaatctgggaagttgttaatacgattactctaaaaataaaaaatccagaaggaagcaaatataaatggggtgaaaaaattccggatttaaaggagaaagaaattttagcagattatttatttaaaaatgaaagtttaagctttactaaacttctcgaaattttagaattaaaaagagaagatgtatatgtgaacaagcaaatcctgaaaggcattaaaggaaatgaaacatatgcagctcttcatagtgttttaggctataatgaacttttgaattttgatgtatctatcattacttcaaatcatactgccatattagtagataagaaaacaggtgaaattcttgaagaaagagcaggtcttgaacttgatgcatcattggaaagagaaccgttgtatcaactgtggcataccatttattctctgaaagatttagatgaatgtaaaaatgctttgattaaaaggtttggttttgatgaagacattgccgaaaagttatctggtatagattttaataagcaggctttcggaaataaatcgaataaatcaatgagaaaaattcttccttttctgatggaaggctatgattattctcaatcctgtagtttagcgggttataatcattctaattctctgacaaaagaagaaaaagaacaacaaattactttagaccgattggaacttcttcctaaaaatagtttgagacaacctattgttgagaaaattctgaaccagatgattaatgtggttaacgcaattcttgagcaatacggaaaaccatctgaaattagagttgaacttgcccgtgagcttaaacaaagtaaagacgagcgaaacgagaccgatttacaaaattctaaaaataaaaaattgaatgaagaaatcggaaaaagattagcagaattggaactgccggtaaccaagcgatatattcaaaaatataaattcatatttccatcacttagtaaaaatctgaaagatgctcacgtcaataatcaatgtatttattgtggagaaaccttcaatttaacagaagctttaagtggagatgcttatgatgttgaccatattgtaccgaaagctttattgtttgacgactctcagaccaacaaagttttggttcaccgaaagtgtaactcgacaaaaacgaatcaaactgcgtacgattacattgccacaaaaggcgatgaacaggttagggtatattcagaacggatagatgactggttcaagagaggaattatctcttacaataaaatgcaaaggctgaaagtttcacataaagaatatcttgaaagaaagaaacttggaaaagaaacggaaacggataaaaaactttgggaaaatttcatcgacaggcaattgagagatactcaatatatttcccgcaaatcaagggatattttacagaaaatatgcaataatgtaacaacaacagaaggtggagtgactgcaaaactccgtaatttatggggttgggatgatgttttaatgaatcttcaaatgcctaaatacaaagaattaggacaaaccgtcaccaaagagtggacaagcgaacacggaaaaagaaaacatcaaaaagaagaaatcgaaaactggacaaaaagagatgatcaccgtcatcacgcgattgatgctttggtaatcgcctgtacaagacaaagttttattcataggataaatactttgaattcgagtgaaacaaaagatttaatggtaaaagaagttgaggaagctaaaatagaatttaatgaaaagaccacacttttagaaaaatatctaaaaactcagaaaccttttagtacacaagaagtgatgcaagaagcagacagggttttaatttcttttaaagcgggtaaaaaagtagcaaccataaccaaatttaaagcgacaggaaaaaataaagcgacaggtgtgattgttccaagaggagctttacatgaacaatctgtttatgggaaaataaaagtaattgagaatgataaacctttaaaatatttatttgaaaactcagataaaattgtaaatccggggattaaaaatcttgttgaaacaaggctttcagaaaatgaaaataattctaaaaaggctttgtcaacattaaagaaaaatccaatctttttaaacgaagaaaaatctgaaattctagaaaaagcatcttgttacaatgatgcaacggtattgaaatataaattacaaaatttaaaagcaagtcaagccgatgatattgttgatgaaagagtaaaatttttggtaaaagaaagacttgctcaatttggaaacaaagaaaaagaagctttcaaggataccctttggtttaatgaagaaaaacaaattccgattataacagttcgtttgtttgcccgccccgatgctaataatttacagacaattaagaaagacaaagatggtaaagatataggctttgttcttacaggaaataatcatcatatcgccatttatgaggataaagacaataagcttgttcagcacagttgtacattctggcacgctgtagagagaaaaaaatataatatttctgctgttattggaaattcatcagatgtttggagccaattattagataaagaacttccaggatcatttttgaataaattaccagccgataaactcaatttaaagttcagtatgcagcaaaatgaaatgtttattctgggtttatcacaagatgaatttgatgaagcaataaaaaataatgataaatctttattgagtaaatacttgtatttggtatggagtatttctgaaaataattattggttcaggcatcatttagaaactaaaaattctgatttaaagaaaactgatggagctaaagaaagcaaaagactttataatattagaagtttaggctctttattttctttaaatccaataaaagtcagattgaatcatttaggagaaattaccaaaataggagaataataactatgatcactcgttccatctacatcggcaatcctgcttatcttaaacttaaagatgagcagatgtatattttagaaccttccactaaagaaatgaaaggtaaagttccggtggaagatttaggattgctgatgctggatcatttccagattacgatctcacatcaattgattcagaaaatgatgggaaacaatgtggtagtggtgagctgtgatggtcatcatttgccacacggaattatgcttccgctgtatggtcacactgaacattccgaccggatcaaagaccaattagaagccagtgaaccgctcaaaaaacaactttggaaacaaactgtcgaatgtaagattgaaaaccagaaagaggttttaaaacggttagggaactattatgaaccgatgattgattaccagaataatgtgaaaagcggtgatataaccaatatggaaggtattgcagcacaacattactggaagtaccttattagtcttgattttctgagacaacgttttggagattctcctaatcagttttttaattttggatattcggttctcagaagtattgtggcaagagccattgttgaaaccggattgctgcctgtattgggtattttccacaagaataaatacaatccttattgcttggctgatgacctgatggaaccttatcgaccttttattgatttattagtgatgcaatggcttgcaattaattcagaagcggaggagttaactaaagagtttaaagcttttattttacagattgcaaccaaagatgtgaaaatagatgataaaaccagaccattgctagttgctgtgaaaacaacagttacatcactgtataaatgttatacaggagaaaaacgtctgatctcttaccctgaattgatatgaacgccgaaaggtttaatgcttaccgaattatgtgggttttagtattatacgatttaccaacagaaactaaagccaatatgaaagatgcgaaccgctttcgtaaatctttacttgatgatggttttacattatttcagttttcaatgtatgtaaggcattgtccaagtcgcgaaaatgctgaagttcatattaaaagagtgaagtttatgcttccaaaagctggaaaagtagctattatgtgtatcactgacaagcaatttggagatattgaaatattctttgccagaaataaagaagaaccacctccaacctttcaacagcttgaattattctaaaatttaaatcctaaaaacaaaaacaatctactgattttcagtggattgttttttgaggctgtgactaatcacgaagataataatttttgaaagcaattcacaactagtgtggctgctgggccataatcaatactgctgtgactaatcacgaagataataatttttgaaagcaattcacaacacaaaggggcttattgaattgaacccggaagctgtgactaatcacgaagataataatttttgaaagcaattcacaacttagtagcgtctttgcctaaacattccgtcgctgtgactaatcacgaagataataatttttgaaagcaattcacaaccagacctataaaggccaatgatacgaccaagctgtgactaatcacgaagataataatttttgaaagcaattcacaaccgtagatgatagagataaagcaattaaaccgctgtgactaatcacgaagataataatttttgaaagcaattcacaactgatataagccaattgtctgtgaaggtattgctgtgactaatcacgaagataataatttttgaaagcaattcacaactgttcgtctctgataatcaccttatctcttgctgtgactaatcacgaagataataatttttgaaagcaattcacaactttaaaccggcagatgttgctcctttccatgctgtgactaatcacgaagataataatttttgaaagcaattcacaacccgtataattctctcgccaattgataattcgctgtgactaatcacgaagataataatttttgaaagcaattcacaacggtacattttgagttaatttatgtagattagctgtgactaatcacgaagataataatttttgaaagcaattcacaactctgtaacactttcccccgttgaagaggaagctgtgactaatcacgaagataataatttttgaaagcaattcacaacagcggacagctcgtccacacccagagcaacgctgtgactaatcacgaagataataatttttgaaagcaattcacaactgctgaattgctattccaacagatccatcagctgtgactaatcacgaagataataatttttgaaagcaattcacaacaatgtctgaaagcgtatatcagtcgtctttgctgtgactaatcacgaagataataatttttgaaagcaattcacaacctgtttgattcatttattctttcagcttcagctgtgactaatcacgaagataataatttttgaaagcaattcacaacgatccaggaaaagaagtccaggatttctttgctgtgactaatcacgaagataataatttttgaaagcaattcacaacaaggaatactgcagacaaaaaggaatcagagctgtgactaatcacgaagataataatttttgaaagcaattcacaacagcgaaaacgatattcatacagtttcatgtgctgtgactaatcacgaagataataatttttgaaagcaattcacaactggccatgatatcggataaaattcaagagagctgtgactaatcacgaagataataatttttgaaagcaattcacaaccagagcatcctacaatgaaacctctggatagctgtgactaatcacgaagataataatttttgaaagcaattcacaacaaggaaataaaaagcctaaagtggaatttggctgtgactaatcacgaagataataatttttgaaagcaattcacaacttaatgagtcgattggtttttggcgagatggctgtgactaatcacgaagataataatttttgaaagcaattcacaactacaagatgcacggacttaatttttttaatgctgtgactaatcacgaagataataatttttgaaagcaattcacaacgctttcgttctttatatcatcctggaatgagctgtgactaatcacgaagataataatttttgaaagcaattcacaacaatgtggcaaaggggacaaacgttgctttggctgtgactaatcacgaagataataatttttgaaagcaattcacaactacaggatacgttatatagaattccttcaagctgtgactaatcacgaagataataatttttgaaagcaattcacaactgttacaacgcctgggaaaagcgggccgtagctgtgactaatcacgaagataataatttttgaaagcaattcacaactctaattcaggcttaaaatgtactgctttcgctgtgactaatcacgaagataataatttttgaaagcaattcacaaccgccggttattggttatgtttcttttttccgctgtgactaatcacgaagataataatttttgaaagcaattcacaacaaaagcctgtgaattcacttttaaacatcagctgtgactaatcacgaagataataatttttgaaagcaattcacaactataaatacagaactgatgaaagttggttagctgtgactaatcacgaagataataatttttgaaagcaattcacaacataatactggatgggtaggtaatatttatggctgtgactaatcacgaagataataatttttgaaagcaattcacaacggtttaatgctagaatatgaaaggcttaacgctgtgactaatcacgaagataataatttttgaaagcaattcacaacactccgagccaaacccagacacctgcttcagctgtgactaatcacgaagataataatttttgaaagcaattcacaaccgtttattaattctgaagaacaagcctattgctgtgactaatcacgaagataataatttttgaaagcaattcacaaccgtctaaaggctatttctgataaaataaaagctgtgactaatcacgaagataataatttttgaaagcaattcacaacgcattgttcactatggagacgaagtcacaggctgtgactaatcacgaagataataatttttgaaagcaattcacaactaggttcttcatctcctgttaatcgccaaggctgtgactaatcacgaagataataatttttgaaagcaattcacaacgcattgttcactatggagacgaagtcacaggctgtgactaatcacgaagataataatttttgaaagcaattcacaacgaggctagaaatattaatacaacagcagatgctgtgactaatcacgaagataataatttttgaaagcaattcacaactcgaagcctctaatgttatcaggtaatattgctgtgactaatcacgaagataataatttttgaaagcaattcacaacattcatttataccatctactgaatactcttgctgtgactaatcacgaagataataatttttgaaagcaattcacaacttaactaatagatctaactcaacaattgccgctgtgactaatcacgaagataataatttttgaaagcaattcacaacaaggtcttttagaggatcttaaaaagtatagctgtgactaatcacgaagataataatttttgaaagcaattcacaactcagtgtttgttaagcccttttcgtttttggctgtgactaatcacgaagataataatttttgaaagcaattcacaactatgaagttgaaagaaaagatattattaatgctgtgactaatcacgaagataataatttttgaaagcaattcacaactgctgtagagctcatccctccatttttaaggctgtgactaatcacgaagataataatttttgaaagcaattcacaacaatcgcagcattcgtttagaataggagcttgctgtgactaatcacgaagataataatttttgaaagcaattcacaactgaagagagcttcagaaccagactggaattgctgtgactaatcacgaagataataatttttgaaagcaattcacaacgctcgttaataccatctacagaatattcttgctgtgactaatcacgaagataataatttttgaaagcaattcacaacgttgaattagtccggcttaataccagataagctgtgactaatcacgaagataataatttttgaaagcaattcacaacagtaagcataatgatcaccgtgagttcactgctgtgactaatcacgaagataataatttttgaaagcaattcacaacgccactgtagtggactttgatgtagctgccgctgtgactaatcacgaagataataatttttgaaagcaattcacaacaggtaaaggacatggacatgaaagatcaaagctgtgactaatcacgaagataataatttttgaaagcaattcacaaccagccgttagcaggtataaactactgggaagctgtgactaatcacgaagataataatttttgaaagcaattcacaacattgacgaaacagctcagattacaaagaaggctgtgactaatcacgaagataataatttttgaaagcaattcacaacccggtagggaaaattgctgaaggtgactttgctgtgactaatcacgaagataataatttttgaaagcaattcacaaccataattcaaaatgaagatatgatcatattgctgtgactaatcacgaagataataatttttgaaagcaattcacaacacagcacaaagaaagatctatgatgacatggctgtgactaatcacgaagataataatttttgaaagcaattcacaacaaccggttcttaaatctgttttttagtctcgctgtgactaatcacgaagataataatttttgaaagcaattcacaactagaattgatccgcctggtacaaggaaccagctgtgactaatcacgaagataataatttttgaaagcaattcacaacgtaggattatgttttgtgaaacttacatggctgtgactaatcacgaagataataaattaggcagtaatacaaaatatttccacctctcatttaatgcttcccatgttacaattcctaacacgggtagcaaaatttacatttcttgatgtatgataagagaagacccataaggtttttctatttttgtatccgaaaacaataaacttttttaaacagttcaataatatgaaaaaaattagcgtaattgcattagtagcagtaggattactggcagcatcatgtactaataaagaaaaaacagatacagcagtggctactgagcaaacagtggctgaaggtaaaggagaagcattaacagtagatgcagctgcttctgtagttaactggaaagctttccacaaaggaggttttgctcctcgttggggaacgcttactgtaaaatctggagatctaaacattgaaggtggacaagtagtagctggaaacttcaatattgatatgacttctattaaagttgaccctgcttcagtaactgaaaaagataaaaaacctgcagatcttgaagctcaccttaaaaaccctgatttctttgacgtagagaaaaaccctacttcagacttcaaaattacaagtgtagcagatctgaaagaggcaccaaaagatgcagtagcaggagctaataaaacagtaagcggaaaccttacattaatggggaaaacgatgaatgttactttccctgctaaagtagatgtcgtagataatactgcagctattcaggctaaatttacagtaaacagaacagattggggaatcaaatttgggacttcagaagctgatcctgctgaatggatgattagcaaagacatcgaaatcgctattgatgtaaaagcaaaaaaataaggtattacactttatataaatcaagagctgtcttcatgaagacagctttttttgtggtatagggaagggtagcatttctttttttgatgtggaatccttttttactttgataaaggatctttaactttttttagaacttgataacagcccaacggcattattttttcactcaatgaaagataacacccaaaatcatcatatcatgtcaaaaaaaattgcaattctggcaactcatggttttgaagaaagtgaacttcaatcacctaaagaatatttagagcagcagggatggacggcacatgttgtaagccctgaaaaaggaaccatcaaatcatgggcagagagaaactggggaaaagattatgctgtagataaaacacttgatgaagtaaacgcgtctgattatgatgctttggttttacctggcggagtgataaatcctgatcaattaaggacaaacgggcaggctttggcatttgtaagggacttttttattcaaaataagcctgttgcagccatttgccatgggccacagatcctcatcaacgctaaagtggttaatggaagaaatatgacttccgtaaaatcaatcagtaaagatctgatcaatgccggagctcattgggaagatcgtgaagttgtagtggacaatggacttgtaaccagcagaactccaaaggatctccctgcatttaatgctaaaatggtagaagaatttaaagaaggaaagcacgtgggacatgcgctatagcttttataaaaaaatagagcctggaacttcaagattccaggcttttttatagaaatgagagcttattttcagacttttatgcaatgatcattaatgaaatggtattaattcaattcccaagaattctgaatccgtacacagtattcacttcccagatataaaggattgccatgcttttcagaccagaaaccatccagaatatccgggcttaaacagcgatatacagcaactcctttatagatcttttgatcatcaccttcatagttgaaattgagaaccagaatctggtctttataaaaccctgttccgttttgtatatgatttccaatcatccattgggcaatgatccgagcattttcatcaatagataagactaatgtaccgcgataagaaacctgatcagatttttcctgattacttcctttgatagaataagttcctgccaagtcatatactgtcatttatttatttttttatgggtggcaaatttaaaaaatcttatcctgatgctgctataaatattttgcaaacctgggtattaaagcttgaatattcctgtaatctataaattaaactttatttttgcagcaaattaatttaaaaaatgattccttttctactgatcgctaaccttattacattcggggtctttgggtttgataaatggcaagccaaaaaacaccaatggcggatttccgagaatgctcttttagggctttcattaattggaattattggtgcagcttcaggaatgatcatttttcatcataaagtttccaaaaaatcttttcttgtgaaattttttattgtcgttttaattgatgttgtgttgctatatcgattgataagacattgatatatatgaattcattgagcgctaaaaagtgttttcccacatttatcattcagctcaagaatacaaaatcactctttttattcctgaatcccaatcttatgataagagacattcgaagacctgccaataggatgttttgaataaaagggtcaatatacctcaggaaattgattagaataaaagtgaaaacaatgaaataactgaacctctgataccgtatgttttttagggattgtaaaaggaatttatctaaatttctcattatgaaattgttaaatattgcataaagattttaattaattcatttaaaatcactatttttgcacccgtaaaaatcctatatgcaaaacattagaaatattgcgattatcgcacacgttgaccacgggaagacgactttggttgacaaaatcattcacgctaccaatattttcagagaaaatcaggagagtggagaattaattatggataacaatgatcttgaaagagaaagagggatcacgatcttatccaagaatatttctgttacttataaagacacaaaaattaacgtaattgatactcctggtcacgcggatttcggtggagaagtagagagagtattaaaaatggctgatggggttattttgttagtggatgcgtttgaagggccaatgccacagacaagattcgtacttcagaaagctttagaattagggttgagaccattagtggttatcaataaagtagataagccaaactgtcgtccggacgaagttcacgatcaggtatttgatttattcttcaaccttgaagcaactgaagagcaattggatttcccaacattctacggttcttctaagcaaggttggttcaacacttcattagagcaaactgaagatattttaccattattggatggtatcttagagcacgttccagctccaaaagtaactgaaggtaaccttcagatgcagattacttctctagatttctcttctttcttaggaagaattgctatcgggaaagtaacaagaggagagatcaaagaatctcaatggattggtcttgcacaagctgatggtaaagtgttgaaaggtaaagtaaaagaactttacgttttcgaaggattaggaaagaaaaaagtaactgaagtacaagctggagatatctgtgctgtagtaggtttcgatgccttccaaatcggtgattctttcgtggatcttgaaaacccggagccattggaaagaacggctattgatgagcctacattgaacatgacgttctctatcaacaattcacctttcttcggtaaagatggtaaatatgttacttctaaccaccttaaagaaagattaactaaagaattagagaaaaacttagcattaagagttcaacaaactgatgatgcgaatactttcttagtattcggtagaggtattcttcacttatctgttttgatcgaaacaatgagaagag

SEQ ID NO: 1715 - DNA, 23807 bp, synthetic construct
  misc_feature 1..23807: note = Synthetic
  source 1..23807: mol_type = other DNA
tttgagaaatgcaacccagcaaacccgttcaagtgacgaattttatcttaatgacgggacgaaagtcggacaaaacaattctcgcgaagtgaatgaaaggctcaaagaaaatatcagaaagtataataatccgattgagctggataaggcgataaagtatccgttataaaaagaaacaagaaataagtaaaaaggtaaaagagaaaataccaaatgacatctgtgtaaatctgtgaaatccgtgggataaaattttgcctaaggattacacagatttttttagtgaaattttataaaaaaaacataaaaattgttccaagtttttttaccattaaggatattgaaattttaagttcttttaatgattgatgaaattgattaaaaagcgttctgctaaatcattaatcttgattaatcttaaaagatatttagcttatttaatcttgaaaactcaatattcttaatggtttgaaaattttaattacagatcaaaattttaatttcactaataaactttatctttatgccaatcaataaaaagtatgaagataaacacgttttttgcagttcctgcagtggttttggcgagtcagtttgtcaatgcacaatccacggaacagaaattaaatcctattgttcagaattttgttaatgaaacgaataaccattctcagttggaagatatggcattcgaattattagacggaatcggccctcgtcttgtcggaactcctgaaatgctgaaatctaatgaatggacggtcaataaattaaaatcatggggaattgaagctaatcttcaacagtttggaacttggaaaggttggcaaagaggaacaacacatgtcgatatggttcatccgagagtgaaatctctttccgcaacgcaattggcttggagtccgtcaacgaaaaaagcagtcgaagctgaagtgattattctgcctaaagtttctactaaagcggagtttgatcaatggcttccttcttcaaaaggtaaaatcgttttgatggcgcaataccagaaaattggtcgttccgatgaacagatcaaagaatttgctacccctgaattatacgaaaaattaaaggcagaaaaagagcaggcttcaaaagatttccgtgactatgtgaaaaacatcggttatgataacaacacccttcctgaagctttagaaaaagcagatgcggcaggaattgcgatttcaaactggacaggaattatgggagccaaccgtattttcggagctaaaacttcaaaaatcccaatgtttgacattgatgtagaagattacggaatgctgtacagaatggctgaaaaaggttcaaaaccaagaattaaggttgatgcacagtctaaaatccttccggaagcaaaaactttcaacaccgtaggaatgattaaaggtactggaaaaccgaatgaatatgtgattctttctgcccatttggattcctgggatggcgctcaaggtgcaacagataatggaacgggagttttaacaatgcttgaaacgatgcgaattctaaaaaaatattatccgaatcctaaacgtaccatcgttgtcggactttggggaagtgaagagcagggacttaacggttcaagaggttttgtagcagataatccggaaatcatcaaaggaacgcaggcggttttcaaccaagataacggaacgggtagagtagtgaatattgccggacaaggttttgtaaaatcttatgattacatcggaaaatggctgaatgctgtaccaaaaaatgtaagagatcacatcaagaccgattttcccggaatgccgggtggaggcggttcagatcatgcttcatttgttgcagcaggagttcccggattttctttgagttcattaaactggggatatttcggttacacatggcataccacgaaagacacgtatgataaaattgtttttgatgaggtgaaaaacaacgtgattcttaccgcaactttagcatacatggcttctgaagatcctgaatttacaagcagagagcgcagaacaatgcctgaaaatgacaaaggcgaagtcgcaaaatggcctgaattgaaagagccgagaagagattctaaagattttaaataaaagtaaaagtagcctgattttcaggctactttttttctgctaacagttttttgatttcaggaatcttatcttctttaacaataaaagttttagcaatttgattgttgagatgcatgctgaaattgagtctagttccagattttgcccagtattcatttggtccgggttcaaagtcagaaaaaacaggaaagaaattaatgaaagataaaaaatttcttaatgctgattttagaattttaggatttttaccaaaatcatcaatcactttcaatttaaaaaatttcttaccgacagtagttcctaaggttgattctgtaatcgttcctattacaagtacgcttaaaattgacagaagcaatgaagcgaaaaaaatcatgtgaaatccaagctgaaataataagaaaaaaggaagcaaatcaattatcttagcatacaaacgttctctttcatttcctatatgagtgggattgtaggataaatcatattcaaaagcattataaatacgttttccttcctcatcaaaattttgagtcggtctatgaataattttctttattttaagctccgatatttttttcatttcagtttggcttagtagtacaagagaaaattacaaaatcatactcaattgaattcttttcctctgttcatccacttccgttactcttacctgaacatgttgatgcaacttcaccacttcattcacatcagaaacaaaaccatctttcagctgagaaatatgaaccagtccgctttctttaattcctaagtctacaaaacatccgaaagcggtaatgttgttaacaattccgggaaggatcattcctgtttttaagtcggtaatcttttttacatttggatcaaattcaaaaactttggcagcttttcttgggtctagtccaggtttttccaattctttcaagatatctttaatacttaaaattccgatggtttcggttatatacttttcaggttgaattagattgattttctctttgttggcaattaaatcattggtttttatgcctaaatcttttgccattttctcaacaattccatatgcttcgggatgaactgccgagttgtctaaaggattttctccgttggtaattctgataaaggctgcagcctgttgataggctttttcacccaatcttggaacttttttcaattgttttctgttttcaaaagctccgttttcagcgcggtaattcactatattttcggccatcttttcaccgattcccgaaacgtagcttaaaagtgatttgctagcggtatttaaattaattccgactgaatttacgcatttcataacggtagaatccagctcatttttcagctgggtttgatcgacatcatgttgatattgtccgacaccgatggattttgcatcaattttaaccaactcagccaatggatccgaaagtcgtctcccgatagaaaccgcaccacgaacagtcacatcaaaactcggaaattcatctcttgcaattttacttgcagaatacaccgacgctccggcttcagaaaccacaaaaacctgcaaaggcttatcaaaagcaattttttttatgaaaaattcggtctcgcgacttgctgtaccgttaccgatagaaattgcctggatgttgtaagcattcaccatcgatcggattttcttcatcgccattccgctttcgttttgcggagcatgaggataaatggtttcgttgtgcagcaaatctcctttttcgtcaagacaaactaccttacaaccacttttaaaacccggatcaatcgccagaattcttttttctcccaaaggtggtgcgagtaaaagttgacttaagttttcagagaatatttcgatggctttcttatcggctttttcctttgcttcctgtaaagtttcgttggagatagcgggttcgagaagtcttttgtaggaatcttttatggctaaaatgatttgctctgaactttcatttttagatttaataatagcattttcaataaaatctaaggcttcatctttatcaattccgatgtttgtttttacgaaaccttcggcttctgctctgagcattgccaaaagtctgtgagagggtgttcggttcagactttcttcccactcaaaatattgtgaaaatttctgtgcgtcttcttcgtcttttttagcctttacaacttttgaggtaattaatgctttacgttgaaaaaggcgacgcagatttttacggacatacatattttcgttaatccattctgccatgatgtctcttgcgccctgcaaagcatcttcttcagaagaaacctgatcatttaaatatttagaagctaaaaactgaatatcctgagctttctgactcatgataatttttgctaaaggttcaagtcctttttcttttgcagcatctgccttcgttttttttctttttttgaagggtagatataaatcttccaactcttgaatatcaaaactggcttcaattttctgtttcaattcaggatgtaaggcattttgttcctcaatcgatttcaaaatgctttcttttcgttttatgagctcttcaaactgtttattgagtttaaatatttgttcaatctgaatttcatctaaatttccggttgcatcttttcggtagcgggaaataaacggaatggtgcagtcttcagacaataattttaaagtagcattgatgcttttagcggatatatttaattctttgtttacaaattctgttatggtcatgcggcatttttagaatggctaaaatactgacttttttcagatcattttaataggaatttgtaataaatttttgaattatggattttatatgtagaaaatagtaattattgtttgaatatgaaataggctgatttcgtgtttaatttttaattataacttgtgttagttttaatttctgtaatcatattgtctttttaaataaaaaaactatatttgttattcaaaccaaaatattttatgcctatgaggaaaaactctacttattctatctattttatcatttcaaattttaatctttttttgagaaaaagatacactcacaattttattaacttaccaaattccgattatatgaacagacttttaatggttctgggacttttgctgtgtatacagataaatgtctcggcgcaaacgtgtaatgcggttcccgtaccgtttttacaatcatttagtacgggagcagtgcccacttgctggaccaatcaaaatcctacaacaacatctacgaacgttaatgtaaaatggaaattttctggctcagcgggttatggagctacaggaaacggtggaaaacccgcaggaacttttgcctgggtggatgcaagtgctccttacgaggatgaaaataatgtagaattaataagtcctcagattaatcttacaggacttacgaacccatatgtgaaatttgagtggtttaaaaatcaccttacttcagcaacaggaaccgttcctgcttttgagcataatgtattaaagcttgctgtaaataacgggagtggatgggttcagatctggacagacaatagcaacagttctgaatggagaactgtaggtattcctttggcagcgagttatatcggcgcaacaattcagcttaaatttactgttgataaagatgttgctgacaatggaaatttctatgatgatgttttgctggatgaagtacaggtaattcaggctccaacgtgttttgtgcctttggtttctccggcaactaatattgcaccaacttcggcaacgcttaactggtcgcctcctctttcaccagctcctgcaccggcaggtggttatgaatattattatagtacgaccaacacgcctccgactgcggcaactgtcggtactattataccgggaacttcagcaaatatttcgcctttagtatctggaactacttattactggtgggtacgttccgtatgttctgcttcagataaatctcagtgggtggaaggtgacagctttataccgggacaaattggaggtggaacagcaacgcacggatttttaccggtatattcatgctcgggatataattattctcagatgatttatactaatgctgaaattgcaggtgccgtaggaacgaataatttaattacttccattagatattttgtatcaagtacagcagctactcaggcaaattataatcaatgggtagtgtatatggggaatacttctcagactgattttgccaccacaacaagctggattcctgcaggatctttaactcaggtttactccgggactttgcctgcaatgacggccggaacatgggtggaaattccgctttcaacacctttcctttgggatgggacgagtaatgtagtgattgctgtagatgaaaatacaccgggaacatcttgtaccgcaaactggggcagttattctgcgggagcaaacagaggaatgatttattataatacgacaacaaatccggatcctcttaatcctcctactgctacaagcagatatgcggtattgccgcgtcttcaacttgtaggaactgtacttcctccgtgtacaaatgtacctccttcaaatattacggtaaataatattacggctacttcagcttcggtaacatggacggcgtctcagaatgcaacttatgtcgtaaggtacagagtattgccttcgggaacatggcaaaccattaatgtaacaaccccttttacgaataatatttctcttccggggcttacagagcaaacacaatacgaagtagaaattgcgacaatatgtggaacacagggagtattttctccgccagttactttcaccacaccagcgcttacttattgtagttcgggaactgcaacggttaccaatggttttattaataatgtgactatgataggaaccaacgttccgatgacaagtaataattctggagcgagtacctatacggattattccaatgatcctaccaaaaccattacacttcttagaaactcagttaataatacactttctgtaggaagaacaattgcatcgagtacttatacaacgtacgcatggattgattttaacggagacggtatttttaacaataatccttctactacacctggtggagagagaataatgggtatggggctttcaaacacaactcctgtcacaggaaattttgatgttcctgcaaacgcttatgttggaacaagtaaaataaaaatgcgtgttattgtgtactgggtaactcctgcggatgcatgtgcaaaccttacgagtaacggagaagttgaggattatcaaattaaatttattgatcttcagccatgtactacgaatcctccaacaaacattgcggtgagtaatatgacacatacttcagcctatgtttcgtggatgccaactgcaaatgcgacctatgttatcagatggagagaaggaactacaggagcgtggttaccaagtgcagcaggattaacacttcctgtaggacaaagtttttatacaataccaaatcttactgaacaaactgcttatcaggtacagatcgctacaatatgcggaggtaatcagggtgctttttctccatcacttaattttacaacgccacctgttacttattgtagtatgataggtaccggaactaatgactacatatcaaatgttacggtaactccggtaaactttccggtgatgactaatacgactttgcaggataactatacaaattatacgacagctgcaacattgatcaatttagaaataggatcaataggaaatcagctttctgtttctaaaggatgggtaggaactacatttggagatgcggtacatgcctggattgactggaacagagatggtatatttactgattcagaaagaatcatgagtactgcttctaatactttaagtcccgttacattatcgttcgatgttccggcaaccggagtatataccgggccaaatacgacgaccatgagagtagtgctgaaaagaggaagtgctccggtaatgtgtgtagatccggtaaatggtgaagtggaggattatgctgtgaaacttagaccgtgcagcaatgatactccggctacaccaacatttaatacgataacccataattcagcgattattaattgggtttctgctactaataatactgcatttgttttagaatacagacctgtgacaaacccagcttctgcatggactacactgaatgtttccactttagcaggtaatccgcctgtaccggtgaatgcactcactccggctactacatatgaagtaagagtagctgcaacttgtggagccggcggaattggaatttttactccaactactacctttacaacaagatgtgatccgactccgccaaacgtgacggtaaccaacattacatcaaattctgcattggtaacctggaatccgattgtaccgaatgcaacctatgttttacagtggcgtgagcaaggaactatactttggaatactcctgcattaccgccgccgccaattaatacttatacgattccgaatcttgattcttataaaacatacgaagttgtagtagcaagtatctgtaatggtgaaactacaccaaacccctggtcaaatactcaggtatttacaacagaaagagtgtgtgaagttcctcctccaggatttacaattactcagctgaaccctacaagcgttgaagttgtgtgggatccgttcccgggtgcaacgtatattttaagatacagaaaagttgggattccgagctggacaaatatttcggtaaatacaaatacgtacaccattacaggattattagaagtcaccaagtatgaaatgcaggtagctaatatttgtaacggtgaaccgggaaatttcacaccattgtattatttcgtaactcctacagtaatatattgtcctatgcagtctgcaaattctgctaatgaatttatttcaaaagttactgctaagccaaccggtaagcctgaaatgatcaatgaatccacaggaactacttattctgactttacgggagatcctaagaaatttattgaaatggttcaaggctctgcaggaaatcagattattattgataaaaacctgagttcaggaggaaaagctggtgtagctgtctggatagatttcgatagaaacggaactttcgatcttgatgagagaattctggcagacgggccgaatacaaatgcaactgcaagtgcagtatttaatgtaccttctgatgcatttatcagcatgacagatcataaatatgtggttatgagagtggcaatggcaaaagatgcaattcctgtaaactgtattagttttgctgatggggaagtagaggattataccgttagaatttcaaaagttccggcaccaaattcattagatcagacttctataatgatttatccgaatcctgtaaaatcgatactgaatgtaaagaatatcagtgaaaaggcgagctataaaatttacagtgcagctggaagattaatttcaagcggatttattgttaacaataaaattgacgtaagtgtactcattagtggagtttatattattgatatagaagatgtaaaaggaaaagtacagaagaagtttatcaaagaagaataatcaaacaattcataatttaacaaaaagagctctcagaaatgggagctttttgattgatagaacgttttgaattccaaccccaaatattgataggtatattgtattcgaaatatttttttaattaaaaatgccccgcagataggcgaggcgctaaatgttttcacaacggaataatccttattgtgaattgctttcggttacaaatctataaattatttttttaaacgttttatggttttccgtaaaataattattttttttctctttatttttatgctttatcaaaactaaaatagctatgactaaaaatatacttggattagacttaggcacgaactctattggttgggcattaatagaagttgacgaaaacaatacccctattcgcattattgcaatgggctctagaataattccattatccaccagtgataaagaagaatttcaaagaggtttgtcaattacaaagaatcaaagcagaacggtaagccgtactcagagaaaaggatatgacagaaagcaactaaagaaaagtgatttaaaaaaaatcctaaataaatacaatatttttccatcggaggaattattaaagctcccaatgctcgatttgtggaagcttagaagtgattcagctaatcctaatgaaaatatttctgctgaacaattagggcgtattttatatatgcttaatcagaaaagaggttataaatctgcaagaagtgaagccaatgctgataaaaaagataccgactatgttcaggccgtaaaaggtcgttatgctcagttgaaagagagaaatcaaactattggacagtatttttatgaagaattatacaatgcaaacacaaacaattcttatttcagaatcaaagaagaagtttatccacgagaagcttatacagaagagtttgatactatcattaatgctcaaaaaaataaacacgattttcttacggatgaagttgttcatcaattaaggaatgaaattatttattttcaaagaaaactaaaatctcaaaaagggttagtcagtatttgtgaatttgaaggttttgagaaaactgttttcgataaagaaaaaaataaagataaagtggtttttgtaggaccgaaagttgcgccgaaaacttctcctttatttcagctctgtcggatttgggaagttgtcaacacgattagtttaaaaataaaaaatccagaaggaagcaaatataagtggggcgaaaaaattcccaatttaaaggagaaacaaatattagcagattatttatttaaaaatgatagtttaagttttactaagcttcttgaaattttagacttaaataaaaatgatgtttatgtgaataagcaaatcctaaaaggcattaaaggaaatgaaactttttcaactcttcatacggttttaggtgataatgaacttttgaattttgatgtttccattattccatcaaatcatacttcaatgttggtcgataaaaagactggagaaattctggaagaaagagctggtttagagttggatgcttcattggagaaagaacctttgtatcaattgtggcacaccatttattctctaaaagatttggatgaatgtaaaaatgctttaatcaaaaggtttggttttgatgatgaaactgctgaaaagttatctcacattgattttaataaacaggctttcgggaataaatcaaacaaatcgatgcggaaaattctgccttttctgatggaaggctatgattattcccaatcctgtagtttggctggttacaatcattctaattcgttgacgaaggatgaaagagaacaacaaattactttagatagattagaacttctttctaaaaatagtttgagacaacctattgtcgagaaaattctgaatcagatgattaatgtggtcaacgcaatccttgaacaatatggaaaactatctgaaataagagtcgagcttgcacgagaacttaaacaaagtaaagacgaacgaaatgatgccgatttgcaaaattcaaaaaataaaaaactcaatgaggaaattggaaaacgattagctgaactgggattacctgtaaccaagcgatatattcagaaatataaattcattttcccgtcgcttagcaaaaatctgaaagatgctcacgtcaataatcaatgtatttattgtggtgaaacatttaatttaacagaagctttgagcggcgatgcttttgatgttgaccacatagtgccgaaagctctgttatttgatgattctcaaaccaataaagttttggttcacagaaaatgtaattcaacaaaaaccaatcaaactgcgtacgattatattggtacaaaaggagaggagcaagttagggtatattctgagcgaatagatgattggttcaaaagaggaattatttcttacagtaaaatgcaaaggttaaaagtttcgcacaaagaatatttggaaaggaaaaaactaggaaaagaaacagagaccgataaaaaactttgggaaaactttatcgacagacaattgagagatactcaatatatttctcgaaaggcaagagaaattttacagaaagtatgcaataatgtgacaacaacagaaggtggagttactgcaaaacttcgtaatctttgggggtgggacgatgtcttgatgaatctgcaaatgcctaaatacaaagaattaggacaaaccgtaatcaaagaatggacaagcgaacacggaaaaagaaagcaccaaaaagaagaaatagaaaactggacaaaaagagatgaccaccgccatcacgccattgatgctttagttgttgcttgtacaaagcaaggttttattcaacggataaatactttgaattctagtgatactaaagatttgatgcaaagagaaattaaagaagcaaaaaaactcttaggagaaaattataacgaaaaagaatttgaaaatgataatgagtttgttaaaaatcacaaagaaagactatctcaattagatgattatttgcgtttgcagaaacctgttaaattcgatacaaagtatgtggagcaagaggctgacaaggttttagtttcttttaaagcaggtaaaaaagttgcgacaataactaaatttaaagctaccggaaaaaataaagacactggagtaattgttccaagaggagcattgcacgaagctggactttatggtataagaacgatatattctaaaggaggaattgcagagaaacatattattaaaaaatataaagtaggggtttctgcacaagaccacatatttacaggaaaagaaacttattcagtaaaaaaagataaaaatgggaatgaaaaagttgatgataaaataaaaatagttttagacagtatagtagataacaaagttaaagaagtagttcttaatagactaaatagaggatttaataatgaggaagattacagaatagatgtcaaaaaagcattaaataattttaaaaatcttgatgaagacccattgtggtataatgaaagtaaaggaataaaaattttgtcaataaaattaaaaacaggtttgaaagattcggtagtaccacttcgtttgaatgaaaaaaatgaagttataacattggtaaaaacaggtaataatcatcatattgcaatatacgaagataacgacggaaaacttatacagtatagttgtacattttggcacgctgtagaaaggaaaaaatataatattcctactgtcatcaaaaactcatcggaagtttggaatcaagtattagacaaaaaacttccagaatcatttttgaatagattacctgctgataagctcaatttaaaattcagtatgcaacaaaatgaaatgtttattcttggtttattagaagaagaatttgataaagcaataaaagataatgataaatctttattgagtaaatacttgtatttagtttggagtattgcagaaggagattattggtttagacatcatttggaaacaaaaaatacagagttaaagaaaaccaatggtgcaaaagaaagcaaaagatactttagattaagcacaaaaggacttattgatttaaaccctgtaaaagttaggttaaatcatttaggagaaatcactaaaataggagaatattaattatgattacccgctccatctacatcggcaatcccgcttatctcaaactcaaagacgagcaaatgtgcattatggaaccttcctcaaacgagatgaaaggaaaggttcctgtggaagatttgggtttgctgatgttagatcattttcagattaccatttcacatcagctcattcaaaaaatgatgggaaataatgtggttgtggtcagttgtgacaatcatcatttgccacacggaatgatgttaccgctttatggccatactgaacattctgatagggtaaaagatcaattggaagccagtgaacctttgaaaaaacaactttggaaacaaaccatcgaatgcaaaattgaaaatcagaaagaattattaagaagattaggaaactattatgaaccgatgattgattatcaaaacaacgttaaaagtggagatattaccaatatggaaggtattgcagcccaacattactggaaatacctcatcagcctcgattttctgagacagcgttttggagattcacccaatcagttttttaatttcggttactccgttctcagaagtattgtagcgagagcaattgttgagacaggattgcttccagtactcggaattttccataaaaataaatacaatccttattgtctcgcagatgatttgatggaaccctatcgaccatttgtagatttgttggtaatggattggctgacaaagaatccaaatattgaggaactgacgaaagaattcaaatcacacattctacaaatcgcaacaaaagatgtattgatagaaagtaaaacaagaccattgttggtagccgtaaaaacaactgctacttcgctttataaatgttacacaggagaaaaacgactgatttcttatccagagctgatatgaacgccgaaaggtttaatgcgtaccgaattatgtgggttttagtattatatgatttgccgacagaaactaaagccaatatgaaagatgccaaccgctttcgtaaatctttgttggatgatggttttactttatttcagttttcaatgtatgttcggcattgtccaagccgtgaaaatgctgaggttcatattaaaagagtcaagtttatgcttcctaaagcgggtaaagttgccattatgtgcattacggataagcagtttggggatattgaaattttctttgccaggaataaagaagaaccaccaccgaccttccaacaacttgaattattctaaattttgaatcctaaataaataaaaaatccgttgataatcaacggattaaattttgaggttgtgtaatatctcaaagatactcaaaaatgaaagcaattcacaactcgccagaattcatagagtgtaacccaagagttgtgtaatatctcaaagatactcaaaaatgaaagcaattcacaactggatggcttgacgaaatatctaatgaattgttgtgtaatatctcaaagatactcaaaaatgaaagcaattcacaactgtgcatccaaaatacttttattatataaagttgtgtaatatctcaaagatactcaaaaatgaaagcaattcacaactagagaaaagaattggcaagttatatgcaagttgtgtaatatctcaaagatactcaaaaatgaaagcaattcacaactatctcgttaatgtcttctatatctgtttcgttgtgtaatatctcaaagatactcaaaaatgaaagcaattcacaactggatgaagaaaatttatatatgcaaatttgttgtgtaatatctcaaagatactcaaaaatgaaagcaattcacaactaattttttcgataactcgtcttgcttggtgttgtgtaatatctcaaagatactcaaaaatgaaagcaattcacaactatgtatgctgatggtaattcaatactattgttgtgtaatatctcaaagatactcaaaaatgaaagcaattcacaacagtattcatagcgtaccatggagattgaatgttgtgtaatatctcaaagatactcaaaaatgaaagcaattcacaactagcatgaaaagtttaagcacaaaaatattgttgtgtaatatctcaaagatactcaaaaatgaaagcaattcacaactgaaaaacataaagaatttagattaaaaatgttgtgtaatatctcaaagatactcaaaaatgaaagcaattcacaacggtttacttaaactttcaaatttacttatagttgtgtaatatctcaaagatactcaaaaatgaaagcaattcacaacaatccaaaatcaaggtatattatccgctgagttgtgtaatatctcaaagatactcaaaaatgaaagcaattcacaacggtttacttaaactttcaaatttacttatagttgtgtaatatctcaaagatactcaaaaatgaaagcaattcacaacaatatagagtcatctgttccgttagctatggttgtgtaatatctcaaagatactcaaaaatgaaagcaattcacaactgtcaacaaggagttgaattaacactggtggttgtgtaatatctcaaagatactcaaaaatgaaagcaattcacaacttgatcctagcagacatatagacaacgggtgttgtgtaatatctcaaagatactcaaaaatgaaagcaattcacaactttatttgcatatatagaaatatggttatagttgtgtaatatctcaaagatactcaaaaatgaaagcaattcacaactcactgtcgcaaaatcttggcaggaactcagttgtgtaatatctcaaagatactcaaaaatgaaagcaattcacaactataaatcttatgcaggcatttagtgggtcgttgtgtaatatctcaaagatactcaaaaatgaaagcaattcacaacttgaatttcaaaacctttcaaaattggaatgttgtgtaatatctcaaagatactcaaaaatgaaagcaattcacaaccttttttaggttgttttttatctggtatttgttgtgtaatatctcaaagatactcaaaaatgaaagcaattcacaacccaattttcaagtttgtaatacaaagctctgttgtgtaatatctcaaagatactcaaaaatgaaagcaattcacaactatcaaacattcattatccagaataaaagagttgtgtaatatctcaaagatactcaaaaatgaaagcaattcacaactcaagagcagtgattaataaacttgcagaagttgtgtaatatctcaaagatactcaaaaatgaaagcaattcacaactgtggtaatgaagaagatctccgcatgactgttgtgtaatatctcaaagatactcaaaaatgaaagcaattcacaacttggtgacgtgtcaataggtagtagaataagttgtgtaatatctcaaagatactcaaaaatgaaagcaattcacaaccatgtaaacaccatgctcatttttaattaagttgtgtaatatctcaaagatactcaaaaatgaaagcaattcacaactaacattgcagtggagcaacattcaaggtcgttgtgtaatatctcaaagatactcaaaaatgaaagcaattcacaactgtatcgcttgtgtagtaaattattattttgttgtgtaatatctcaaagatactcaaaaatgaaagcaattcacaactaaagcttgtgtttcctggagcagtcattagttgtgtaatatctcaaagatactcaaaaatgaaagcaattcacaactaaaaaattatggcgacaaaagaagtaaaagttgtgtaatatctcaaagatactcaaaaatgaaagcaattcacaactgatgattgattatgttgaaatgtcattgcgttgtgtaatatctcaaagatactcaaaaatgaaagcaattcacaactgctaaatggcgcttcatcttctttcgttggttgtgtaatatctcaaagatactcaaaaatgaaagcaattcacaacagggtctgtagagatataatatttatcgtcgttgtgtaatatctcaaagatactcaaaaatgaaagcaattcacaactgattatcggaaatatcattcttgtttacggttgtgtaatatctcaaagatactcaaaaatgaaagcaattcacaaccgctaagtgaggattaatattagcatctttgttgtgtaatatctcaaagatactcaaaaatgaaagcaattcacaactctagcaaactgtgtgtatttagctacacagttgtgtaatatctcaaagatactcaaaaatgaaagcaattcacaacttgaatgaagtttttcaaacctccttttctgttgtgtaatatctcaaagatactcaaaaatgaaagcaattcacaactataccgttaggattagaatactatcactcgttgtgtaatatctcaaagatactcaaaaatgaaagcaattcacaactgttcagtatgattatataccagatggagagttgtgtaatatctcaaagatactcaaaaatgaaagcatcttaaattcacaaaatgattggcaatatttcatgcgttgatcatcaaggcatcaatttatcataataaaccggtatatatttttcagcatcgaatcccataatcataaatcggtattttttcgctgaatcattattgtaaaagttaattatggcaggagcggattcatcaatttcaagagtaggattccaaaacaatacagggcgataatcggtgctgatttttgagagctcagaattaccataatcggaatcaggatatttctcagattcattataaccttccatcacgaaaaaatttaaatcgaccatcgtagaaagtttattttcaatgggactctgggtatctccacgcttagtgtaaattagcacaccgccatttccgccgccgctcatcccaagaccaccatcttttatgattttaaccatagcaatattggcaacagctattccgttgagagaactagcatccactaacatttcatccagataaatgtttgctttgctttgtctaatgtaaggagttggatttccgttttcattgttaattgttaatcctgcaacacgtccctgaagccattgcaaaatattcggtgaacttgctgcagactgattatcatttacaaaatcgaaaacaacttcattcatgctttgataaagcggactgctgagttttttgttaagatcttccgtaagattttttcttttggcttttagttttacctcttcaatattgatgattttctcgtcatattcttttttagactttttcgcctcaatgatttttgtcaattcggcgggctgagaagtttccgatgttgtatttctttccacaagttcatatccttctacttcaggtaaatcttttttcaaagggataaatgtattaagtggatttacaaatacgttcgttctgcttttcaacgaagcatttgcgccatttagttgataagtgacttttattggtttttcaaaaatcatattgtcaaagaaaaactctccgttgctgtctgtttctgcctgaagaatttcgcggtcagatttgtttccctccacaaacataataagggtttgctgtggagccggttttgcattgatggtaacttttcccttgtaagaaatatattttgatgaattattaataatttcaggatatttccccgatatgatctctttccagtcaaacattttccactgttcggaaatcaaaagcgcatccaaagcttccgggttcatcttgtcggaaaaatattgtgcgggacggtctattttagatttaatgacgctggtcagccataaagaactcaaaaagttttcgtcctgtaatgattttttatattcaggatcaaatacagctatagaataactcggaacatcctttaaaggtttaacgtcaaaagaattcaaagctcttttttcggtgcttaatttttcgggctttacttcaggagcggcaatatgtaaattttgtggcatcacaaagcacattctgcttactaaaggattttcgttatcgtcaaaaaccgtgatttgcataacgctattgatgagctgatctgttggtatagactggaatgcatctttcagctgattcactttagccttatagacaacctgttctccaatatttgcaattactgtaagataaggatacgcttctccggagttttttattttgtacttaatattgtctttttcactgatcacctgtagacttactcctttttcggaggctttgggaagtactgcggatttctgtaatccattgttgtcggtcactacagcttcgtaaattttgtctttttcaggtgtaaatgagaaaacaccgacatttccgtctaatcctttgaaggttgtaattttcttttcaggatgatctttttcaataacataaccttcccactgagaaggtggaatacctttactgtgaagtcttacagcaattttggatgggttgccctgtataaaggtatttgcttccgggtgtaatgttacagaccacgatgaggttttatcttttatcagttttttcgttgaagacggattgtaaaccggaatttgtttcagatattgaaattcttcgctcagattactcatcatcggagtataagctcgtacaaaatagatgtcttcattaaggttttccgcaagttgaaagctgccctgaacagagccattgaaaactggaaatctctttcttaaaacctgctttttatttcggtcgtacagctcaataaagaaatttgttgaaatgtctgatatgctgaagtttctgagaaccattgcattaaaccagaccgtttctcccgaaagatacaaatctttatcagtgagtacataaatattctcctgtgagaagttttcgtttaaatattgaagagccttatcggcagattgttgtgaataaacatggctataagaagccagagcaaaacagaatataattattcttttcatgatctacggcattatgagtgcgcaaattagtgaaaaagaggttaccaatattcaattttatgattaaataacactttcgtttttaatttacatatgatttatactaaaccgttgttattacattataagtttccataagaattgatttaattatttaagttttaataaattgagaataggataaactctcaataaactaaagtattttttatcttaaattaatgattttcaaattcagacaattccgttgaaggcaaatctctcattatgaatttgttaattaattaatattgatgatggttaattcattaaaaatcattaattttgcacccgtaaaaatcattcatgcaaaacattagaaatattgcgattatcgcacacgttgaccacggtaaaacgactttggttgataagattattcatgctacaaacattttcagagaaaatcaggaaagtggagaattaataatggataacaacgatcttgaaagagaaagaggaattaccattttatcaaaaaatatttctgttacttataaagatacaaaaattaacgttatcgatactcctggtcacgccgattttggtggggaagtagaaagagtattgaaaatggcagacggtgttatcttgttggtagatgcgttcgaaggacctatgccgcagacaagattcgtactgcaaaaagctttagaattaggtcttagacctttggttgtcatcaataaagttgataagccaaactgtcgtcctgatgaagttcacgatcaggtatttgatttgttcttcaatcttgaagcaactgaagagcagttggatttcccaacgttctacggatcttcaaaacaaggatggttcaatacttcattagagcaaactgacaacattatgccattattagatggtattttacaatacgttcctgaaccgaaagtaactgaaggaaatcttcagatgcagattacttcattagatttctcttctttcttaggaagaattgcaatcggtaaagtaacgagaggtgagcttaaagaatctcagtggatcggtcttgcccaggcagacggaaaaattgtgaaaggaaaagtaaaagaactatatgttttcgaaggtttaggaaagaaaaaagtaactgaagttcaggcaggtgatatctgcgctgtagtaggtttcgatgctttccagatcggagattctttcgtagatcttgaaaatcctgagccattggagagaacggctattgatgagcctactctgaacatgactttctcaatcaacaattcacctttcttcggtaaagacggtaaatatgttacatcaaaccacctgaaagaaagactttacaaagaattagagaaaaacttggcactaagagttcagcagactgatgatgccaacacattcctggtattcggtagaggtattcttcacttgtcggttcttattgaaacaatgagaagagaaggttacgaaatgacgatcggacagccacaagttatcttgagagaagatgaaaacggacaaaaattagagccttatgaatctttggttgtagacgttcctgaagaatttgcttctagagttatcgatttggccactcagagaaaaggagatcttcacatcatggaaactaagggagaaatgcagcacatggaattcgaaattccttcaagaggcttgatcggattgcgttctcaaatgttgactgctactgctggtgaagctatcatggcacaccgtttcacagaatacaagcctttcaaaggtgcgattcctggaagaagtaatggcgtattgatttctaaaactcaaggtcctgcaactgaatattctattgctaaattacaggatagaggtaagttctatgttgatccgggcgaggaaatctatgcagggatggttatcggtgagcaaaacaagccgggagatttggttgtaaacattgttgaagcaaaacagttgaataacatgagagcttcagggaaagataaagatacaggtgttgcaccaaaaatcttattctctcttgaagaatgtatggaatacattcaggctgatgaagcaatcgaggtaactccgaatttcatccgtatgagaaagaaattactttctgaagaagaaagaaaaagagtagaaagaggagcgaaagcttaattttaactctaataatatatctaaagcctcgatttttcggggctttttttattagccacaattttaaactcgtgtatattattgttttaactaaattttacagtatgagatttccgaaattacctttatatcattagttttgtcttttagcaactttgaaattctttcttagaataaaatatgaaaatcactaaaataaaattaatctgtatactaggtttgttcgcttctttcactacatcatgtgctgtaagagaaaatgctccaaaaaacaagtctggaaaaacgacaaacaattcaaaaagtacggttaaaaaaccagatccgaaatctgttccgccaattgcagcaatacctgttgaagaagattttaaagtaaatcttccggcgattaaccgcgaatttcgcggagtctggattgcgagtgttgccaatatcaactggccatcaagaaataatctttctgtagagcaacaaaaagcggaagcgatcaatatgttgaatatgcttcaggaaaataattttaatgcggtaatttttcaggttcgaccttctgcagatgcattgtacaccagtgaattagaaccatggtcgtattttttaacaggaaaaacaggtgaaccgccatacccgaattacgaccctttacaattctggattgaagaatctcataaaagaggtttggaacttcatgtttggttaaatccttacagagcgcatcattctaacggtggggcagtaaccagtcaatcgatggcgagtaagctttctgatattacgatcagattaaaaaacgggatgtattggtttgatcctgcagatccgaaaactcaggggcacgtttcgaatgttgtaaaagatattgtgaaaaggtatgatatcgacgcagtacattttgatgattatt

SEQ ID NO: 1716 - DNA, 23807 bp, synthetic construct
  source 1..23807: mol_type = other DNA
  misc_feature 1..23807: note = Synthetic
gctggttttattttaaatagaatttttcaatgattaatttatgttaaatcataacctataatattgctgttaaacaatcctttggtaaatttgtgcctcgaacaatatagaatatgaatttaaaaggtaaaaacgccatcatcacaggcggtggaagaggacttggaaaagctgtagctcagattcttgccaacgaaggtgtcaatattggtatcacaggaagaaacgaaaattatctcaaaatagcagttaacgaactgagacaaaccggggtgaaagtagcttacgccgttttcagcgtcgataacgaattagaagtaaaagcaggaatcgaatctctggcaaacgaattaggcggaatcgatattttggtcaacaatgcaggaatcggtgactttggaagcatcgaggaaatggcttctgacgtttgggaacaagttatcaaaaccaatcttttcggtgtttattacacaaccaaagcggtttatccctatttgaaagaaaaaggacaaggtgacattgtgaatgtcgcttccacagcaggattgaaaggcggaccaaatatgtcggcttacgcagcttccaaagcggcggttgtttctctttcgcagtcgatgatggcagaatggagaaagcagaatatccgcgtgattaccttgactccgagcacgattgcttccgatatgagcatcaatggcggtttgacagacggtaatccggataaagttcttcagccagaagattttgcagaatgggtgagagacatcctgaagatgaacagacgcgcattgattgcgaacggttctattttctcgactaatccttagttagaataaagcaattctacatatcaaccctttcagagtttcaaactttgaaagggttttgttttatattaagttctatttaagtatctgttataaggcttcgactccgctcagcttaacaactttctcgatagatataaagatgtcaccctgagcggattcgaagggtttttagcttaggaatggtttcgttatttaatctttgcttttaaatacaattatccctatctttatcggaatcaaataaaagatatgaagagaaactcaattttagcaatgtctgctgttttctttgcagcacaaatcaccttagtcaacgctcaaaacaaatccgaagaaaaactcaatccaatcgttcaaagttttgttaatgaagccaatgataattcccagttggaaaatatggctttcgaacttttggacggcatcggaccgcgtcttgttggaacacctgagatgttggctgcaaacaattatacggctgacaaactgaaatcttggggcatcgatgctaatcttcagcaattcggaacgtggaaaggttggcagcgtggaactacacacgtagatttggtttatccaagaaccaaaaccttgtctgcaacacaattggcgtggagtccagcaactaaaaaagcagtagaagcagaagttgtaatccttccaaaagtatcttccaaagcggagtttgataaatggttgccttctgcaaaaggaaaaattgttttgatggctcaatatcagaaaatcggtcgttctgatgaacagattaaagaatttgcaacaccagaattatacgaaaaactgaaagctgaaaaagaacaggctaaaaaagattttgcaggttatatcaaggctatcggttatgataatacaactttgccagaagctcttgaaaaagcaggagctgctggaattgccatttccaactggacaggaatccatagcaccaatcgtgtttttggagctaagactaaatctattccaatgtttgacatcgatttagaagattacggaatgttgtacagaatggctgaaaaaggggcaaaaccgagaattaaagtagatgcacaatccaaggttctaccagaagctaaatccttcaacaccatcggaatgataaaaggttcagaaaaaccgaatgaatatgtgattctttctgctcatctagactcttgggacggcgcacaaggtgcgactgacaacgggacaggaactttgacaatgctggaaacaatgagaatcctcaaaaaatattatcccaatccaaaacgtaccattgttgttggactttggggaagtgaggaacaaggtctgaatggttcaagaggttttgttgcggataatccggaaatcatcaaaggtgtgcaggcggttttcaatcaagataatggaacgggtagagtagtagatatcagtggacagggtttcaaagattcttatgcttatatcggaagatggctggatgcagcacctaaaaaagtgaaagaccaaatcaaaagtacttttccgggaatgccgggaggtggcggttccgaccacgcatcgtttgtggcagcaggagttccaggattttctttgagttcgcttaactggggttacttcggttatacttggcatacaaccaaagatacctatgacaaaatcgtttttgatgagttgaagaacaatgtgattctaactgccactttagcttatatggcttcggaagacccagagtttgtaagcagagaaaagcgagtgatgccgaatgatgacaaaggaactgctgtgaaatggccggaagctagagaaccaaaaagaagcagtaaagattattaatctaaaagaaaattgatattggagtttacaagttagatttcaatcaaaaataaataagaaagcgacaatattttgtgtcgctttttttgattttgaaatttagataggtagtaatggtcggaaatgtacatatacttttttctctcggatataataacagacaagcaaaaacaaaattgctatagaaaaccaaatcatcagagaataataatccataatagatcttagcagaatctgattgtccagttgtgctttgaatactttttgtgttactagaggaacagttttctcttctaaaccattatttccgagataggctataatttgattgattttatccagataatattgattgttataattgatataatccaagaatctgttgtaatgaaggttgtaatgataaacgctgaaatatttagtcaaaaaagtactggttgtgtatcctaaaaatcttataaccagcccaaatgcagcggcagaaggcgcaagataataaggaacaatactgatgataaacaaaatcgtaggaaccattataagcccaacacccaatccgtgtgcaaatagcagaatactgtagtagctttcatttcctgcattatccagcatctgtgtcatacaaatgtgataaatcatcaatgaaacaaaaccgcacatccagagccagatgacattcgattgtttgatttgatgccaagccgctaaagccacaccaacgattattccgataagattgaagacaaacatataagaaatatgccttgggtccatatgaagcacacttttgtaaaaactcccgacataggtaaaagagaatcgctcgatgtacataaagaacaagagcattgcgccccacagatattgtttttgtttgaagatagaaagatcaatataaggtctttttaaagttaactgacggactgcaaataataatattgctaacccaaccattaccgaaacctgaataattttaacactttcaaaccaataatattgttgtccatagacactcaaatagcccaatccaattaatattacagccagcaaaataaaactgctcatatccaactgaatcaacgtgtgtcgatgaaatactttggcagaagagatgcaaaccaaaacaatgattacgctcacagcaaacatcaccatcgatagtttatagacaatgtcaaaattatactggtcgatgaggtctgctgtaatcaggttgttaaaagaggttgtacaaagcaacatcccgaaaaacaaactataagtaacttctttagctctgtaagatttcataaatctgatagccattgacatatagagattcacggcactcgcaaaaagcatcccttgaacaaacctgaccatgaaaaccactagcagaatgtgagaggagaacagcagataacaacacaatagttggaacaactgaaactggataaagtattgcttggaagtaaagtaattgtagaatctcctttccaaacaatagaatgatgcaaaccctgcatagtaaagagaaatcgtaaactgaatgtcattgggttctatgccgtaataacccgcagcaacatcctcatttgccattggtaggaagaacataataatattgggcaacagcaatgtaaaaagaatcgtttttgccagccagttcggaacccattctttgaataaagtcatcttatatgttggattaatgatgaggaattgtgacagttacattcatcccagaaagtattttggaacgccattctttgctaagatttaggatttctatcttaacaggaatacgctgtactatcttcacaaagttcccagtggcgttatctggaggaagcaaagaaaaactagaaccagttgctggagaaaatgccaatatctttccttcgaatttttcatcaggataagcatctaccgtgatagaaacttggtcaccaattccgaaatgtgaaatctgagtttctttaaaattagccataatccatttaggattttcatcgttcacaatgtagcagaggtgttcttcatcatcaatcatttgtcctttttcgattttacgtttcccgagtcgtccgttgtacggagcagtaattacggtataacttacgtccagatttttgcgttgttttacctcattcaaccgtgatttttcggcacctatgatggctttttcttgattaaggtcttctgctttttcttgtgcaactctgtaatgttgttctgcttgtgataagtcacttttatagatgttaagattagcttctatctgttccagtttttgtgcggtggcagatttttctttgtatagttgtttgtatctttcatattccagattttctttccatacttttattttggccgcttctatagcttgataagcttcttttgcttcggcttccagcgtttgtctttgttgattcagaacttgggtattggcattttgtttctggagttctgcgcctacttggttagcatccagtttatattctcggctatcgatgatgaataatgtgtcgcctgctttcacttggtcataatcattgaaccgcacttctcttacatagccactcactcttgcaatcacaggattaatgtattctactacctgagcgtcattggtggtttcattatgaaggaagtgatagatagagatggcggcttttatcataacaaaaagcacaaaaatccacgccacagcagaggtgaatttcactaaggttttacgatgagatactttcattttatagggttccggtttcgtattttagagagtagtagcttttcaggacattcattttggattgttccagttcaaattgggcttgcacttgcaatagattagcatccaaaaggtctgtgataagagcggtctggttgaaataagcatttttcagaatcctcgcattttcattggcatattgcagattttgttcaaagactttttcgtgtttcagagattcgtcgtattcgtaataagctttgtagattcgggttcgtatgttatcattggtgaattgatgatgaagttgggcagaactcaattctattttagcttcctgaacttgatgtttgtttcggtagatactgctgatgtcgtaagacgcttgcaaacctacaagtcccagactgtaccaacttggattgtagttgtacaagaacacttgcggattggcaaattggaaagaacctatcagacctattttaggataataattacctttatcaagttttaattgagtttccgccacttgggtgtgttgttcagataattctgcgtcgtagcctttttccagagctatttcgatgtagtcatctactgataaagccgttgtttcttcttcaatagacgctatttctggttcaatgatggttttgtcgtcttcaccagttaagacattaatctgttgttgcaaaacgatgatgctgttatcaatctcggtgagtgtcatttttcttttactaagttccagctcggtgcgcagaacatcgctttccagaatgattccggctttgtagatatttttgatttcaagcaattgatgttctttttccgcaatatcgctttgcattgtggttttccattggtattgcagatagaggtctatgaagagattggtagctttcagttttgtcagactgattaatttctctttatcggttaccgaaatatcagaaagaatcttagccagtttgatttcgttttttagtttgaaaccatcaaagagattcatatacagattagtctctgtgttgtaaagggtgtggatgatgtcgtgctgagcaggtttgtgaagaataccattcacatagacaggcatattggaggcgtgtcttatagaacctgtgatacttaagcttgggagctgattagattgagcttgtttaattttggtttcggctaattgtagtttcagttgttccagtgcgatttctttgctgtgggcttcaactttactaaagagttgaggaagcgttagttgttgttcttgggctttcaggaaaggctgacacaaacaggtaaatagggctagaataagcctgtattttttacaaaacattttgcgtataattttaaaatgcaaaactaaaggcttttgtttgatgtaattttatacaaaatagactaatttttgcttgttcctgccatttttatttacctttgagtatgaaattattggatatccttcaagagatagatgactcacccaaagatgtttatctggtgcacgagcggtttgagcggcattatgatatgcatactcacaagcgtgaccagttgagttttgtagaaggtggtgtggcgtatgtcacgatagagaatgagtatctagtggttccggcaatgcactttttacggattcctgcaggggtgcctcataagcttaatgtgtcacatcgcgccactcagttgcattctttttatttcaaaagttcagagaaggctttttacaaagatttgggaatctatcctgccaatcgactgattatcgaattgattaacttttcccaacgctggtctcatcagtttgtggactataatgagccttacgctgctgcacttttttctttgtatgacattcttcctttgatggcagagcagcaaatcaagcttcagcttcctacttccgaacatcccaagatagagcaggtcttgcagtatatccatcagaacttccatacgccgttgaccttgaatgaaatgactgagcagttctatatgagtgagcggagcttctgcagattattcaaaaaagagcttcatatttcttttattcagtatctcaagacatatcgcattatccagtcgattagttttttacagaagcggaaagatagctctatcgaggaaattgccaatgcaacgggttacgaatctctcgcggctttcagcaatgctttttacgaatatacagggatgcgaccgtcgcagatgcggaagatgattacttaaagctttggtaacagataaaaatagaaatgtcccaataataggacattttatcatttaataaaagaagtattggcgctgggttttcatcagaaaaccatcgtcagctggattctctttctggcttcatccacttccgtcactttgacctgcacgtgttggtgaagctttaccacttcattcacatccgagacaaaaccatctttcagttgtgagatgtgtaccagaccactttctttaatgcctaaatctacaaaacatccaaacgccgtaatgttattgacaatgccgggaagtatcatcccgattttgacgtctttgatggattttacattcgggtcaaattcaaacactttggcggcttttcttgggtctagtcccggtttttctaattcttttaagatgtccttaattccgagaattccaatatcattggtgacgtatttttcaggtttaattaaacttattttttctttattggcaatcaaatcagtgatttttatgcctaaatctttcgccattttttctaccagtttataagcttccgggtgaaccgccgaattatccaaaggatttttcgcattatgaattctgacaaatgcagcagcctgctgataggctttctctccaagtctcggaacttttttcagttgtttccggtctataaacgcgccattttccgaacggtaattaacaatattttctgccatcttttcgccgattcccgaaacatagctcaataaagacttgctggctgtattgaggttgattcccacggaattaacgcatttcattactgtagaatccagttcgtttttcagtaaggtttgatctacgtcgtgctgatattggccgactccgatagattttgcatcaatcttcactagctctgccaacggatcagaaagacgtcttccgatcgaaaccgcaccacgaacagtcacgtcatagcttggaaactcatccctggcaattttgcttgcagaataaaccgaagcgccggcttccgaaaccacaaaaacctgaatcggtttatcaaaagcgatctttttaatgaaaaattcagtttctctgctagctgtgccgtttccgatggaaattacttgaatattgtacgcatttaccatagagcgtatctttttcattgccattccgctctcattttgtggggcgtgcggatagatattttcattatgaagcaagtcgcctttctcatccagacaaaccactttgcagccactcttgaatccgggatcgattgccaaaattctcttttctcccaatggcggcgcaagaaggagctggcgaaggttttccgaaaatatttcaatggcttttttatccgctttctctttagcttcttgtaatgtttcgttggaaatagcaggttctaataatcgtttatatgcatcttttatagctatggtaatctgtccggaacactcattattagatttgatgatggctttttcaataaaatcaatagcctcagctttctcaattacaatgttggtctttacaaaaccttctgcttcagctcgccgcattgccaaaagacgatgtgatggaattcggctgaggttttcttcccaatcaaaatattgggaaaatttctgcgcagcttcatcatcttttttagttttcacaacttttgagctgataactgcttttctctgaaaaagacgtctgagatttttgcgaacatacatattttcattgatccattctgcaataatatctctagcgccttgcaatgcatcttcttcagaattaacattttgattaatgtattttgacgctaaaaactgtaagtcgtcagatctttggctcattatgatttttgcgagaggctctaaccctttttccttagcagtgtctgcttttgttttttttctttttttaaaaggtaggtatagatcttcaatctcctgaagattaaagctgttttctattctttgttttagatcctctgttaaagaattttgttcttcggcagattttagaatggtctcttttcttttaataatttcttcgaattgtctattcagcttagaaatctgctcaatctgagtttcgtccagatttcctgttgcatcttttctgtatcgggaaataaatggaattgtacaatcttctgaaaggagttttatagtggcagtaatactgttatcggagatgtttagatgttgctggatgaatgtggttgaggtcattaacgagaaatattaaataaaagaaggcgagttgccccgccttaaatgttttcacaacggaataatccttattgtgaattgctttcaaaattattgatacaaatataaaagaaaaattctttgaatggtttacggaaaacctcatttttaataaatttttttttcctatttttatttacttcaaaaaactgatacttatgattaaaaatatactcggactggacttaggagtttcatcaattggttgggcgttgatagaagttgacgaaaataatattcctattcggattattgcaatgggatcacgaattattcctttaacagcaagtgataaagaagaatttcaaagaggtttgtcaattacaaaaaatcacagcagaacagttagcagaactcagagaaaaggttatgataggaaacaactgaaaaaaagtgatttaaaaaaacttcttattaaatatgatatttttccttctgaagaattattgaaacttccaatgttagatttatggaagttaagaaatgatgctgctaatccaaatgaaaatatttctgctgaacaattagggcgtattttttatatgcttaaccaaaaacgtggatataaatctgcaagaagtgaagccaatgccgacaaaaaagatacagattatgttcaggctgtaaaaggaagatatgctcaattgaaaaatgaaaataaaactattggacaattcttttacaatggactgaataacgccaatcttaataattcatatttcagaattaaagaagaagtctatcctagagaagcgtatattgaagaatttgataccattattaaggctcaaaaagggaaacacaatttcattacagatgagtttattcatcaattaagaaatgaaattatttattatcaaagaaaactgaaatctcaaaaaggattggtgagtgtctgcgagtttgaaggctttgagaaaactgttttcgataaagaaaaagacaaaaataaaactgtttttgttggtccaaaagtagctccgaaaacttcgccattatttcaactttgccgaatttgggaagtagtaaataccattactctgaaaataaaaaatcctgaaggaagcaaatataaatggggtgaaaagataccaactttagaagaaaaagaactcatagcagaatatttattaaaaaatgaaagtttaagttttacaaagctccttgaaattttaaatctcaaaaaagatgatgtttatgtaaataaacaaattttaaaaggtattaaaggaaatgaaacttatgctagtattcataaaattttaggagataataatcttttaaattttgatgtttccatcattccaacagaaaaaacttcaattttagtagacaaacagacaggagaaatcttggaagaaagagcaggattagaattggatgcgagtttagaaaaacaaccattatatcaactttggcataccatctattccctaaaagatttagaggaatgtaaaaatgcacttaccaaaagatttggctttgatgaagagatctcggaaaaactctctaaaattgattttaacaaacaagctttcggaaacaaatctaacaaagcaatgcggaaaattcttccttttctgatggaaggttacgattattctgaatcttgtagtttggcgggttacaatcattcaaattctttgaccaaagatgagagagaacagcaaaaaactatagatagattagagcttcttaccaaaaacagtttgagacaaccgattgttgaaaagattctaaatcaaatgattaatgtagttaatgcaataattgagcaatacggaaagccatctgaaattagagtagaattggcgcgagagctgaaacaaagcaaagacgagcgaaatgatgcagatttacaaaactcgaaaaacaaaaaactcaatgaagaaatagggaaaagattgacagagttgggattgcctgctacgaagcggtatattcagaaatataaatttatttttccgtcactaagtaaaaatctaaaagaggctaaagttaacaatcaatgtatctattgtggagaaagttttaatcttacggaagcattaagtggcgacgcttacgatgtagatcacatcgtaccaaaagcattgttgtttgacgattcacagactaataaagttttggttcatagaaaatgtaatgctaccaaaaccaatcaaactgcttatgattatatggctacaaaaggcgatgaagcggtaagaatatacgctgaaagagtggatgactggtttaacagaggaattatttcttatagcaaaatgcaaagattaaaagtttcgcataaggaatatttagaaagaaaaaagctaggaaaggaaacggaaaccgataaaaaactttgggaaaacttcatcgacagacaattaagagatacacaatatatctccagaaaagcaagagaaattttgcaaaaagtatgcaataacgtaacaactaccgaaggtggagttacagcaaagcttcgtaatctctggggttgggacgatgtcttgatgaatttacaaatgcctaaatacaaagaattaggacaaacggtaactaaagaatggacaagtgaacacggaaaaagaaaacaccaaaaagaagaaattgaaaattggacaaaaagagatgatcatcgccatcacgccatagatgccttggtcgttgcgtgtacaaaacaaggttttattcagcgtatcaatactttgaattcgagcgaaactaaagatttgatgcaaagagaaattaaagaagcaaaaaaacttttaggcgaaaattataatgaaaaagaattcgaacaagataatgcacttgtgaaaaatcataaagaaagattatcacagttagatgattatttgcggcttcaaaaaccaattaaatttgacacaaaatatgtagagaaagaagcggataagattttagtttcttttaaagcaggaaagaaagtagcgactgtaacaaaatttaaagctacgggcaaaaataaaattacaggcgtaattgttccaagaggagcattacacgaagcggggctttatgggataagaacgttatattctaaaggggggattgcagaaaaacatataattaaaaaatataaggtaggagtttctgcccaagatcacatatttacaggaaaagaaacttacacagttaaaaaagataagaatggaaatgaaaaaattgatgataaaataaaaattgttttagatagtatagttgataacaaagttagagaagttgtattaaatagattaaataggggatttaatgttggcgatgattacagaaaagatgtaaaaaaagcattaagtaattttaaaaatctggaagaagatcctttatggtataatgagagtaaggggataaaaattttatcaataaaattaaaaacaggtttgaaagattcagtagtgccgattagattaaatgaaaaggatgatgttataacattggtaaagactggcaacaatcatcacattgccatttacgaagataaagataataaacctatccaacacagttgtacattttggcacgctgtagaaaggaaaaaatataagattcctaccgttattaaaaactcatcaggcgtttggaatgaattattaaacaaagaacttccagaatcatttttgaataagttacctgctgatcaacttactttaaaattcagtatgcaacagaatgaaatgtttattttgggattatcaaaagaagaatttgacgaagcaatcaaaaataatgataaaccagtgttgagtaaacatttgtatttagtttggagtattgcagaaggagattattggtttagacatcacttggaaactaagaattcagaattgaagaaaacggaaggagcgaaagaaggaaagagattctatcgattgagtacaaaaggttttattgatttaaatccaataaaagttaaattaaaccatttaggcgaaatcacaaaaattggagaatattaattatgataacccgctccatctacatcggcaatcccgcttaccttaaactcaaagacgagcaattgaaaattctctgtccggaaaccaaaacggagaaggggagtgttcctgtggaagatttggggttgttgatgctggatcattatcagattaccatttcgcaccatctgattcagaaaatgatgggaaacaatgtcgtggtggtgagttgtgatgcccatcatttaccgcacggaataatgcttccgctgtatgggcataccgagcattccgatcgcgtaaaagatcagttggaagccagtgaaccgctgaaaaaacagctttggaaacagacggtggaatgcaagattgaaaaccagaaaaatgtcctgatgaaactggggaattactacgaaccgatgattgaatatcagagaaacgtaaaatccggcgacattacgaatatggaaggcattgcggcgcagcattactggaaatacctcatcagtctggattttttgagacagcgttttggagattcacccaatcagttttttaattttggatatgccgtgctcagaagtattgtggcaagagccatcgtagaaaccggactgttgcctgttctcggcatttttcataaaaataaatacaatccgtattgccttgccgatgatttaatggaaccttatcgtccgtttgttgatttactcgtgatgcagtggctgaaaattcatccggataccgaagaactgacaaaagaatttaaagcacatattctccagattgcgaccaaagatgtgcgtattgatgacaaaacaagaccgttgctggttgctgtaaaaatgacagcgtcatcgctttacaaatgctatacaggagaaaaacgactgatttcctatcctgaacttatatgataaaaagaaatccatcttactttttacattattcattttactaaaaatatgaacgccgaaaggtttaatgcctaccgaattatgtgggttttagtattatatgacctcccgaccgaaacgaaagcgaatatgaaagatgcaaaccgtttccggaaagctttgattgatgacggatttactttattccagttttcgatgtatgtgcgtcattgtccgagccgcgaaaacgcggaagttcatatcaaaagagtaaaatttatgcttccgaaagccggaaaggttgccattatgtgcattaccgataaacagtttggcgatattgaaatcttttttgccagaaataaagaagaaccgccaccgaccttccaacagctcgaattattctgaattttatatcctaaaaataaaaataatctactgaaaatcagtagactattttttgaggttgtccttcatcacgaagataataatttttgaaagcaattcacaactgataggagattatttaggcaatactttgggttgtccttcatcacgaagataataatttttgaaagcaattcacaacgtcggagactataaagatcaaatcaaagaagttgtccttcatcacgaagataataatttttgaaagcaattcacaacggcaacggaattagtttccaaaattcaacagttgtccttcatcacgaagataataatttttgaaagcaattcacaacttgctactaataacaaaatcaaaggactgagttgtccttcatcacgaagataataatttttgaaagcaattcacaacatagctagaatcagaatcggcagagaacaagttgtccttcatcacgaagataataatttttgaaagcaattcacaaccctgccagctattttctgcacaaatttttagttgtccttcatcacgaagataataatttttgaaagcaattcacaacatataacaccaattaaaaaagatgctttttgttgtccttcatcacgaagataataatttttgaaagcaattcacaacatttgcagttatacaggcgcaaatggctgtgttgtccttcatcacgaagataataatttttgaaagcaattcaaaaatggattgtaagttttgatgcggaaggaagttatatcatgtgaggaaggtagtaatgtttaaataaatgctaactattagccattaaaaataacttgaaatgattgaaaactgttttttgcggtattatttttttcattttatttaattaaatccaatgttaataaaatccataatcagccttgacttacataaaaaaacagcctgtaaatatttacaagctgtttttattttttcagtggaaagaaaacttagtcaagaggttttctgccagagataatattaaacaataccactacaacagcgattaccaataatatatgaaccagataacctgtactcattcctggtactacgcccagcattcctaatagccatactacaatacaaatagcagcgactaaccataatagacttctcataattttattttttagtgtgattgatgggatactatcacatactgtgcctttttgtctcagttgtaaaaaaaatattttattgttgagaatattctaaaaggagagccaccggaaaatgatcactgtaaccaccgatatatcttgatccggagtaggttctcaaagggaattgactgttttttctgtctttgttgcaaagtttggcgctattgaaaattagggctttgtgagaggctttttctatctcggaaatgagaatttggtcaaacaaaacgccttttttaccgtgaaatgtagaaaatacgttgtgatcaaaaagtatttcaaaaggatttttaactacaatattattttcatcgtctttgcagatttccttaattatattttggtcaggattttcgttgaagtctcccataataatgattttttcacctttcttatgtagttcaacaaagatcgaccttaattttttcaggatatgaattcggagatttttcttgatatcaagatttctttttgaaggaagatgcaatacaaatacttggaatttttcattactaaccattacctcagcctgcaaaacatctctggaatcgaactccggattatcgtccagaggaaactttaaaaagctgaaacttcgcaaaatgcacttgtcaggatttagtaacaatgcaacgcttaaaccgcgagagtcgtcggatttttgataaataatttcatagctctgcaatggagaatgttccttggtcaaatcttccaaaacccgcaggtcgccaatttcagctaagccaataattgcaggcaactgacctagatcgtcttttataaaacgaaaagcctgacttattttcctgaccttgagttcatacttataatcatcccaattgtaaagaacgggattctggctgtcattaggaggaaaaaaattctcgacattataaaacaggaatatttctttgttcatcagtgattgttaccattttttccggcgtgtgtagataaaggtaatcactacaatcagaaccattaaacccaaagtaaaataatagccgtttttatgatgcagttccggcatattgtcgaagttcatgccgtaaacgccagcaatgaaggtaattggaaggaaataaacagaatagatagccaaaagtttcatcacctggttggctttctggtcagaaagagccagaaacatagaaattaggtttactgtctgcgcattcacgtggtcaaaatctgcaatcacatccttttgcttgtccagaagatccatcacttctacctcttccagattcagcgttttgaacttggagatccattctccggatatattcaggattcttgtgttgagtccagattttcttttcagcttataaaggcgtcttatctggttgctttggttggtgtttttaagaaaaatttcattctcgattgcatccataatttccagcagattgcggctttcatcatcaaaagttttgataattttcagagccagcctcagcgccagatgatctctggatatgttctccggattttcttttttcaactcgtcgcaaacctcgtaaatgcttttgctttttgaccggtgtgtagtgatgatgagtttaggaagcaggaaaatgcctagcttactactgatgtcgctgatgttgttcagcgttcttctttcaagatccgtagattcccttgccaggaaaaatttcacatcgcccacttcttcaaactttggaagatggttcggatctatcgtatcttccaataaaaggtaattaatatgataacgctcgtgcagaaaacggagatcttcatccgtaggcgcagtcacatcgatccattcccattgcgcagtcttatatttttgttcaattggcataaaacaaaactaaataaaatcttcctatcaattcaaatttttattgggccccgcttttttctgttattgctaacacctttttgcatcctttagatcttttatccatcgcaataacagaaaaagagcttcattcaggccgggctgcgtaaaattctgcctattttttataattcacattgttaaaaaataaatacctggtactgagtgttttattcgtttgatttctgtttgatttgtgattttttgaatataattatgtaataaataaaataattacttttgcggaaaattttaattcataaaaatgtttaaaagtgtgattgctggtgttgggcattatgtgccagaaaataccgttaccaatgatgatctttctaagctaatgacaaccaatgacgagtggattacggaaagaacgggtataaaagaaagaagacacagaaaaaaccgtatagattcggaagaaacaacgtctttctatggtttcaaagcgtctgaaattgctctgaaaaatgcaaatcttaccgctaaagatatagattatatcgtttttgcaacactctctccggactatttttttcctggttctggtgtgcttttgcaggaaatgcttggatgtgatactattggcgctttagatgtaaggaatcaatgttctggatttgtctatgcaatgagtgttgcagacgcattcataaaatcaggattatatcaaaatgtattggttgtaggagctgagattcattcgtttgggttggacttttcagatcgtgggcgcggcgtttccgttatttttggagatggcgctggtgcggttgtcctgtctgcaactgaaggcgatagtgcaagaggcatactgtctgtcaatatgcattccgaaggaaaatatgccgaagaactggcggttaaatttcccggaacaaagctcggctggagtgatgtactgattactaatccggattctatcgtagctgaagatatctatccagtaatgaatggaaattttgttttcaaacacgctgtaacacgcttcccggaaaccattatggaagcgctccaaaaagcaggaaaatcaattgaagatttagatttgctgattcctcatcaggccaatattagaatagcacaatatgttcagcaattattgaaattaccagatgaaaaagttttcgtgaacatccaaaaatatggcaatacaaccgcagcgtcaattccgattgctttgagcgaagcgattcaggaaggtagaatgaaacgtggcgatttggtttgtatgtcggctttcggaagtggtttcacttgggggagtgttttatttgagtattaattcaattcaaaataaaaaagagctattcgtttcggaatagctctttttttattgattgattttctgaacaactttgtcagacaattttttcaattgctccatttcttcgagattgaggttcattgcttttgctaattcaattgggatgcaacttgcatcttcttttagttttacacctttttcggttaaattaattttgacaacacgctcatcttccttgcttcgttttcgttccagataaccttttgattctaatcttttcaaaagtggtgtcaaagtgccgttgtccaattgtagaatttccccaacttgattcaccgtcacatcatctttttcccaaagcgtcatcatcgtaatgtattgtggataagttaacccaatatttttaagaataggacgataacactccatgatttcgcgatgtaaaacataaacagaaaagcaaagttgtttgtctaattttaataaatcttccatattgagtttagattgaagtcctctattcaaagataaataatttagctccctttagtgttgggaaaacaaatttaatcgttgctcacagtcagcttaacttcgatatttcctcttgttgcattagaataaggacagacttgatgtgctttctcaatcaattcctgagcttgttccaaagaaactccggggatattagcgtgcaattctgtttccagactaaatccaccattctcgatttgaccaattccgactttggcagttacggttgtttcgccagtttcgattttgctttgtttgataaccaagttcaatgcgctgtcaaaacaagctgcatatcctgcagcaaaaagcatttcaggattcgcaaaatcatcgtttgctccaccaaggccttttggcattctcacttccaaatccaaaattccgttatcgctttttacgtttccgtttcttcctcctttggctgtagcgccaatgctgtacaatgttttcattttgttgatgtttaaatattttttgatgagacaaatgtatggtgtaatattatattgttcacaatataaattgaagtttacatcaaaatcaatcattgatgtaagctataatgtgttttttaaattcaattttagataaaatcataataactataatcctttccaaggatttttggcgattacatttattttgcaggaagttatctctaaaatatatttgtcttttgcaaaaattttgcccattgaataaatcaagattgataaaatggcagtttttaatcttgacttaaatattttttttaaaattttaaataattgaaaattagaattttaatgtttcttttgttagaaggatgaaacaaaatatttttttggcacggaatttacaatgtctcctatgtaaaatttaaaaatatgaaaactttaaagcaattggtattaggtctaggaattttggctggtggagtagtttcagctcaaagtgctgatatgaccaatatgttcaaagtaggacttaatggtggtgtatctacaggtggtaatacatctgcaaatctaggagtagatctttcttatcagaatctgattacgccaggttttggtcttggtatcgcaacgggttataaccattatttcggtaaaaacgctacaattaataacgtaaaagtagataataatgacttcggagtaattcctgttgcagcattgtttagagtttatcctaaacagacaggattttattttggtgcagatctaggttacggtttcatcgtaggtgatgataaggtagcaacaagttctaatgcagcttatgctaatgtagatagaccagacggtggtttctacatcagaccagaaattggataccataatcgtgactggaacttctttgtacagtataataaaactttcactggagacaaaggacaaatagcagatcaggattacaatgctggagcaattggtgttggattcagctacaacattcctttaggaaaataatcatctgttgagaaaagcatactgctttttataatagagcaattaaactatgacttaattaacgcctgcattaacttgtgggcgttaatttttttaaaaacttatcatacatcaataccaattgtagatgattctatttacatttgcactgttaaataaaaaaaatgaaaaaagcattattattaggcgttttgatcagtggattagcgtttggacagaccaaaaaactgataagttctgatgtacactggtggggttataaaattgcaaaaacagaagcatcttcacacgatggaactgtgaatgtaaaatctggaaatcttgttcttaaaaatggttctgttgttggaggacaatttgtcttggatatgacaaccatcaacgcaacagatctttctggtgaatatcaaggaaaactgaatggtcacttgaaaaacggtgattttttcgaagttgaaaaatatcctacagctacttacaaaatcacttctgttaagaaaaacgcgagcaaagattacaatttcgttgtaaacgggaatcttacagtaaaaggaaaaacaaatcctgtttctttccctgcaaaaattactgctaaaaacggtgtggtaactttggagtctgataagttttcttttgacagacaaaaattcgatgtggcttacaaatctacaatgcaagacgttttggtaaaagacgatgttgatttgaaagtgaaaatcagcgtaaaataattaccacagtaatacagaaataccaagagcagaattttttctgctcttttttttattttaaatttgaatgttatttcaagtcatggctaagttttacgtctttgcgaaccttaaaaatgttttcaattaattcgaaaaatctttgctgactttgtgttcaaaaatcaagttaatgaaactatacaccataagcgggctcggggctgatgagaaagttctggaaaaattgactttcaatccagaaatagaagtcgttcacattccctggctcattccggaagaaaatgaagattttcatcattatgttagtagaatggcaaatacaattgatcattctgagccattttatcttttgggatattctttcggtgggatcatcgttcaagaaattcataaattaaaaccagcaaaaagaattgtcattttaggaagtatccgttgcgatgctgaaaaatcaaaactgattctcgcaggacaaaaaactaatgctgtaaaatatatcccactcagagttttcaatggaaatacaacattgttttattcattttttagaaaattatttgacccgaaaaatccaaaacttacccaatatttccgagtaaaagacccgtattatctcaaatggtctatggataaaattaccaagtggaaattcgataaattgccggatgtcattcagattttggcagacaaagacattgtttttcccatcaaaaattccaaaccagatttcgtgatagaaaatgccacacatctttttccagttaccaaatcgaaagaagtttccgacattttaaagaccatttttgtatagaatttttatttgggcagcttaatccgccagtagtttatcctgagcttgtcgaagggctctcgctattttttgccagaagtttacaatccaaaaagaaacggagtaatccgcaaacagtgaactccactcaaatcgaggaacgagattcatcgattcaaaaagggaaataaagaaaatgagataagtcgggctgcgcttcgccagaatcaacattggtctcaatatcaggatttaacaaaataatatttcagatgtagataatttgtaaaaatcaattacttttacaaccgataattttttacaatttaatggaatctatcagtgtttttgatattataaaaatcggaatcggaccttcatcttcccacacaatgggaccttggaacgccgcgaaaatgtttttggatttggtacagcgaaatcattctttacaagatgtgaaagaagtttttgtagaattctttggctcattggcaaaaacaggaatcggccacggaaccgacatcgcaggaatgctcgctctcagcggagaaaatttccgaaccattgatactaacaaaattgatgagaaaattgaaaaaataaaatctgaaaaaaaaatccatcttggaggagaagtttggttgccgtttatctatgggcatcatttgattcttaacaaagaaaaatctctagatttccatccaaacggaatgattttcaaagttatttttcaaaatggagaagagtttagtcaagattattattcagttggaggcggatttgtagcaaccagagaagataattctatggaggacagatgtgtgagaacgctttatccttgtcatcacggtagcgatattctgaaatattg

SEQ ID NO: 1717 - DNA, 23801 bp, synthetic construct
  source 1..23801: mol_type = other DNA
  misc_feature 1..23801: note = Synthetic
aatcaaaaaaaccgccgctgatatgtgcaaatatcttttggccgttttgcagttctttgtcgtgaatgactccctggaaaaggtttgtccatggctcccaggtgatcatcggtattgaaccgttatcgtaaacagccttcattattgagtcgttcaaaaaactttgcggtgcatcaccccagggaatatagagagaaagaatattgaagttgcttttatactgttgctggtattgttgcacttcctgtggagaaacaagtcctgctgttgttcccggctgatatatgccggtataaaacgttgacgcctgtgcttcaggttttatctttttggaagaaggcgccttggcatctgcttttaaaaaataccaggtaaaagaaacggtcagtatcagcaatagcaatccgagtttgcggaagccgctataaatatgtgtatgccgcagcagccaaaactttctttttaataataaagggaataccaatgccttttttacccattcatacctgtcgcgcaagcgtggggcaccggtttgctggctgatcaggacaacgaaggaaaggatcaggcagttgatggcggctataccggccattacccaggcgtaagggttccaatcgtagttgagtccatatatgatggctgccagtgtgatcgcgaccatgataatattaggaaggttcagcgaccaatggtccggtgttttattgtctttcggtgtcgggatatagggaactttttttcggaatagggtatacaccaatcctgtcatataaatccaccaggtaccgatctgcaataagccacctacaacatggaatcccctttctttttcttccatcacccatcgttgcacaaaatgccgtatcaatatggatgaagcgatcatcggcatgccgagcaacaagaaatctaccatatcaacccggaaagggatcaatcctgtgcaaagggaaagtatgggaatgataaaattgatcagtgcaataaggccggacaaataataaagcgggatagttccataatgtaatttttgcctccagttgaatttcaggaataatcgcggataggttgtaaaaagcagttcaaaagttcccctcgaccatttcagttgctgtgcataataagcagacaaggtagaaggtaccagtcctcttgccagcactgcgggtacatacactgacttccatccttttgcatgcaattgcatggcagtatgcatgtcttctgcaaggccggcagcgtgccctccgatagaatccagtgcagcacggcggaacgtacaattcgcaccgatagcgagcacggtgccgtagctgttcatcgtcatcataatggggccgtagaactggaaagtctgttgtgccgcacctttggcaatgaaagtatcatccaggttgctgtatgcctgcacgatctgcacaaaaccgatctccgggttattgaaatgcggtacgatcgggtcaaggaattccggttggggaacatggtctgggtccagcactacacataagtcgccggtggcatattgcaatgcattgttgatattgcccgctttagcgtctttccggttattgcgggttatatgatggatccccagttgttggcaaacctcctttagataaggatcattagcttcatcacagagataggttgtatgaggataatgtatcttttgcaaagccgtcaatgtttcaacgatcatttcatacggctcaccggcgcagaatgtagtgaagatatcaaccgtgaatgtttgttgcttctgctccggaacgcgtggaatggaaatagaaaaataatgataccactcatgcagtaaacgcagacaactaaacgtgatcgcaaacatcaaaacccagtaaaaaggcgcaaagctgatctgtgccttgttgaacaggcaatataataaatacaccatgctgccaacacctatgaagatcatcaggcgcagggttatcaattcctttcgtgagggtgccgatacggtgttaaagggtttcttcattttccggttacataaaaaggcgtattggcggtggagaaatacccttttttatcaaacactgttacaaataaacgatatggtccttcggcaggtggcgtgcggaaggaaacagttaatcctttatcaggtgaaagcaaattattataatcttgtggttttttgacattaagctctaatctggttttttgaaaccagtcttccgccatcatttcccaattcaggcggatcgagtctggcgcgggtccttccatgagcagctctgcatgataaatactatcggggttaagaagtatattatcttttgcgccctttccttccagcaacatatattttatcctgggtgcatgagatgtgggtgactcgcctgtccatatctgtttcattacatttacagtttccgaaacagcgctatcgccggaaaagagactaaaccaggtcggggtcccctcctgcttctgcccccaaaaaaagacaaaggccccaagaaatctcgggtcattgaccggcatgtacttatatcgttcagcatagtgttctgcttttttgttggatgtattttcaatcggtgagccccaggcggttttttctgattcccagaggccattgataccccactcactgaccaggaaagggccattccaaaaccaggaaaacctgttaaggtcatcttgtaaggaccatagtctgccaaatacattgatggaaataagatcgagttgcggaacttttattttgatattataaacgcagcgccggctgaaaccttccagtgctgtggtaacgggatgatccggatcttcttcatggatcatttttaccaggtcattgaacgctttataaaaccgcttgtaccggggtctgtaaggaaagtcgacttcattgcccaggcaccacattaacagggccggatgggatttgtatttgcgcactacttcgcggtaagccctgagctgtgccgccacttttgcagtatcattataaaaggaccaaatggaactgtgtggcaaggaaagaccggcaacaacagcgatattgtgggcagcagcgtcgttcagcaaagcagccatgttcagcgtatcccaggtacgcaaagtatttccccctgcttcctggagctcgcggagatgagaagtgcctgctgcaccttttataataaaaggttgaccgttgcggtagagtgtgtaatacttgtcctgcttcaggataaagacttttttgtcctgcatggttgtagcggtcctgtcgcggcggacatacataaaaaaaagaaaaacggaaaaagcaagaacgaagagggtacccagaaaaaaaagcacgctacggcgcatggagtcagcgattggtgtataaaataagctgcttaaatatagaatataaaaaagtcacaaccaattaaaaacgataaatatacgaaaggcgcaatgtcacattcctttgtgtgaacattgcgcctgacctgataggagtcgtacttattctacattttcttcatgggaaattttcgtgccctctgctgcccgtttacggtccctgatatttccgccattaatgaatcttccgtttcaagagtataggtgatcttttgaggaaagtcgtgtgccgggttttcaaataccagttgattggcagatgaagcggtcaacttaaattttaccggttgatcattgttctgaccttttacggtagggatataaaaaatatcgcttccttcttttttcagaacaatcgattccaggggaatggaatcagtagcggtgatcatgtagctcctgcctccataggtggaatcgttcaccggcgaccattcttccaccatttttccacgttgggtttggttgccccattttccgagaagccatttcgcattggaaagagaagaaacattttgagcaaataagttactggaaataataagagccaatacagccattaaataaggtttcatgcaattgatttatggtaactgcaaagctggttaatattccgtttttcaaattgtaaaaaagcgacttttaatcgaagctgaaaaatttaaccagtggcagatgttctgcaaagtattgctttgggctcaggccggaaaattcgcggaagtctttaatgaaatgggcctggtcgtaaaagccgctgttataagcaagatcagtgagtgtgttgtagcgtttttgttccgctaacgataatacgtattgaaaccggctgatgcgtgcgtattgtttgggattaagaccaactgcagcaatgaactgacgttcgagatgccggcgcccgatatttagtttagtggatagttgttcgatattaatagcaccattaacctcattgatcatagtaacacaccgactgattagggggttcatggttgttgatcgcaattgatacgataaaaattgctctatgatctgtaccctttgttcattgtcagcagcctccagcatgcgattttccagttcacgccccgctgcaccccagatatcagctatctggatattgctgtcattgatctcatgagtgctgatattggtaaagggcctcaacccatgcggctgaaaccggacactgaacatgcccaccttaccattgccaccaatttcgatgaagcgggtgagctggccatgaataaagctacggggttgaagatgggtggccccatccgggtagtatttttggaagagattgccatagtggaataccagctcaatgcagccatcgggaaatatgcgttgttgtgtacccggcagttcttctccctcaaggctccagtaacacttgataaagctggagagggatggatggggcgtgtaaaggcgatagtgcatgagtggtttgaagataatattttttggagtgggccgttgtagatttgaatttaagcaagcagtagttgtggcagtaaaccttaaattgtgccggttttttcgtaaattgaaacatgcttgcacggattcataaaagattgggggagcgtcctgctttttatgttttaccaaatatggaaaactgttttacctggtcttttcctgaattcatgccgttttgtgtccagctctactatttctcctctttaaaagatttttccacgttgccccaggtctgaaacaggcttgggatgggccattcattaaatttttagtagttaaaatttgggctatgcaacgtaatctgcagggtcagtccaccaatggtgtgctgatattcgttttggttttgataagtatattgatattggagcggggtatggtggggagtagtaagtggtattggtttttgttggtgacagtgccggggatggtggttgtttgggtaagagggagaagggagtagttttgggttagatatgtaaaggggctggtgaataaccagccttttttagaattatgcttaactatgagtagattgttgcccgctcaaaagtgatttatgaatttaaccgttattgaaggtgcctgggaaggcttttttacatatggacccgactatccgatcgaatatcaaagtgtacaagaagctttcacaatggaattaaacgttgttgatggaataattcaagggacttgtgttgattcgtttaccaaaaaatattttgatgagccggcgaaagtggaaggtactttgattgatggtgttttatcattaattaagaaatatccttacttccttggaacagatgaatatgagcaaacatttgttgacagaactcttccaggccatgaggttcactacataggccagatgaaaagaaagctgttttcaagggaatattttgtggaggggcaatgggatatttctgggtcttatctggatgaggatggaatagctaggtattatacagatgacggggattgggagatgcatcgggttagatgatgccgggtggaggttataactaacaacgatcaaagcaacccctctcagcaatattaattactgcatttttgtatagtatgcgaacgactgtggaggcattaaatcaaaatccttctgcagagattttggccgccgatatcgtttggtattttttatcttaatggcatatcctgcttctttatcaaaaaaatatttatcaaaatagtctttagatataccggagtaattactggtcattttccacaagctctccagttcttcattaatgatcgaatcgatttcaaactctccgatcacctttttcaccggcgacgaagcatacacaatcaccgtctttacattctcattcttaaaaatagaccgacggaattcaaacttctttgatccgtcaaagatcttatcagcaaattccggttttatagataatacaactttcattttccaactgaggggatcagttcaggtttaactttttgcggattgcagcagcctcatcaatactaaggtcccgtaagatgaaaaactcccgggaaccggacttcacttcagccaaccggatcatggaattatcaatgaactgatcgaaactaatacctactgtataagcctcaatctccattatggcatccataatatgcccgatccgttctttatcgccaattttgccacgcattgaggaggcaaaatattactggttaagcctcataaatcaactgcctgtctgattcgatataaggcaggagccttttactgactgcatcagaagacaccagatcaactgtttttttagcttttcttcgaggtcaaatttcatttgtacaaagccgaatccgatatttttggaatagtctaattcgacaagaatgccaatatcactgtcgttatcggcttcattccgggagtaggagccaaagagatatgctttcaacacaggtttgctggtgaaataatcccggatgatctgtatatcttttggctttaagcgcatagacaaatttactgatttttcgtggcttgccccacaacctctatcagggctgaatttaatccattgcgaggattaaattgaacatgataaacttcctggtttccagccccggactacgatccggggaaatgatcaggtgatccagtagtttgatgtttaagaaccggacgactttcaggatctctttttcttatcataaaaacgaatcaggccggcttcttttacggttttcttattaagctaaactcatctgcttattcctttccataaacagatcataatacacctgcacccgcaaccagtattcagctttgataccgagcaaatgctccagctttatggctgtagccgcactgacattacgctttccatggagcaattcgctgaaatgacctggtttcattcccaattgttcagcaaatactgatttcatcataccacgggcttccagttcatccataatgatatcaccgggatgcaatgcgatatcggtttggatctctttaccttttccgtttaacgttttatagttgttcattttcgcgtattgtattatgaagggaaggccggccttaatttccctcatgatattattttttagtttgattccctctgatcttactgataatgattagtaagatcatgaatcgaaagaatatctgtaatggtcacattttcgtctttgtcgaccgttaagatcaaacggtagcttcgatcaatcctcacagaaaaatatcctttgtaatctcccttaaggccttcgaaattcagacctttttgagattttatttccctgacattgtcagcgaactgcaatttcaggatcgttttcttgaacttcacgatgatgtcgttactatatcttggcttacccggaacagccttgccttgaaacaatgcttccaggtaagtattcttaaaatgtatgatcattgagtccaagaactttaaagggccggatctgaatacattatcgccgtatcagctccatttcccaaaattaggtaattttcttgcaaattcccattttttgggaaattgtaagactttgataagagcaaagaaataccgtccggaagaaagatcagcgggcttttagactagtaaactgtgctttttaacggtccttttaagaggtagacattcataggagccgttaatttcacgctttgattacgctaatttgaccgtatttgtacttagtccattgcaagaacggaattgaacatgatgaacttccttgtctccattcccggatcggagtccgggataagcgtttcaaatacgccttcatccaaaaagctgaaatattcatcttctgaaatgatcaggtgatccagcagtttgatgttcaggaaccggctggcctccacgagtttttccgttgccgtcttatctgcacgggagggctttaagctgccggatggatggttatggatcacgacgatggatgcagcccttctcagcagggcgcggtggtacacttccatgggatctatcaggacggtacgttgtgtgcccaagccgagtagctcaagcttgcgaaccgtctgggagccgtcaagtgtcatcatccagaggtgttcacggtcgcggtccagtttggagtagcggcggaagatgggttggaggatctggtagatatcggaagaggattggatgtggattttttgatggggtttgagacggacgttcatatagtaaggtttagggtgattaaatgttttgtaacccaaatatagtacttattagataataaaatatcaataaaatatattttattatctaaaagaggtgaaaaatgaagtgaaaatatcttctcgagcctgactaccaattttttatatttttactttgacaatcacttatggcaaagaaggattataacaggatcaaagttgtactagctgaaaagaaaaagacaaacaaggagctcgctgagtacctgaagatgggaactgttacggtctcacgatggtgtacaaatgatagtcaacctaatattgctacattgtttaaggttgcaaaattcctcggcgtgaaagcaaaggatctactggtggattaggattgttgaataaaccctctccggttttaatttttacctgacgaaaactgatgaagtaatgaagatgatttacgggaacccgtaatcttcttcattacttttcaaagtgacgagcatcgcgacgagtggttaaatacagaaagtaatcctataagattgtttttaatagacgactaaacaaatatccttctagcaaggcgtactatttctgtgcgaaaagaaataactaaggagaaaagatattctggagaaacagatacataagacaccgaaaaaggatcgatttctaaaacaaaaactataaaacaggatgatgtcaaaagataacaccttagatcgcgtccacgccgccgatatgcttcttaaagaaaaaatcaaagctgcacggaaacagctgggcggctctttaaaagataggcgtgagcaacttggaataagtgatgggatgctgggcagtcatgtaggcgtgactgctaataccatcagaggcgtagaatcaggccgctttgccatggatatcgacttgcagtttaaaatttataatgtgctgggtataaagtcatatttctctgttcaacgagatgacagagaaaataaaaaggaggatatggctattgaaatatccgtccagctcacacgctggcttgacgaacacccgctgattagtcgcaatgctctttgtgaacaggtaggatatgacgtaagcaacttgcataaagcaatacacggagatcaggatattccacataagtatcaccaggcttttattgaagcattaaagccgtatgggtttaattacgggaacccgtaataatcatgcgcggagttctattatctttaattgaacgaaaaatttagtgtaattcgcatataggttttggtaatcagatcaataggtgattcgttgttcttggaataattagcctgaagagtttatgggcaaaaggagagaaaataaaaaaagccccacattgtaaggcgaggcggcttaaatgatttctcaacggaaaaatccttattgtgatttgcttcaatgcaaatatagaattcaatttgataaaatatacaaatggagaaaaaaattcttggtcttgacttgggtatctcttctattggatgggctgtcatcaaagaatacgaaaaagaaggcaaagctattctcggcttgggcagtcgcattattccattaagcacggatgataaagaagaatttagcactggaaacactatttcaaaaaaccaaaagcgaaccgtaaaacgtactcaacggaaaggttatgatcgataccaattaaggagaggcgatctgataaaaatattgaacgaatgcggtatgatgccagaccaggccttgatggagcttaactcagtggaactttacggacttagggataaagctgtaagagataaaattgagatgaaagaaataggaaggatgttttatcacctgaatcaaaaacgtggatacaaaagtagccgaagcgatgccaacctggataaaaaggatacggaatatgtcatcgccgtaaagggcaggcatcaacagatcaaagatgccgggcttactatcggacaatacttctactaccaattattgcaggataaatactataaaataaaggagcaggtctttccgcgggaggcttacatcgaagagtttgatgctatctgcgctgaacagcaaaagcactatcaggttttatcgaatgaattgatcaacaaaataagaaatgaaattatttactatcagcgaaaccttaaatcacaaaaaggacttgtgagtgtctgcgaatttgaaggtaaggaaagggcggatattaagggaaacaaagtgtttacagggcctaaagtggctcccagaagttcccctatctttcaactttgccgtatttgggaaaatgtgaacaacatatcatttaagataaaaaatcccgaaggtgcgaaatacaaatgggccgattacattttatctctggagcaaaaaacagaaatagccaggtatttgaatgttaaccctttgctgagcacggcagagctcctaaaaatgctgggcctgaaaaaagaagatgtatacataaataaacagcttgccagaggcttaaagggcaacataacttatgaagaaattgcggccaggataaataaagaaacccttttgaagtttgaagtaaatatagagcagcttgagggtaaggcgtatctgctggacaagaagaccggcgaaatattacaggagcacaataaattaatagtagatgctaaaatagaaaaagagccattatatcaactatggcatacgatttattccattaaggatgctgaagaatgtaaagaagctttgacagttaagtttgggcttttggaagatgaagcaacagcactggctaatatagacttcaccaaacaatcctttggggataagtctgccaaagccatgcgaaagatactgccttaccttatgcagggttacaattatgcagatgcttgcagccttgcaggatacaaccatagcaatagccttactaaggaagagaaagccaatattgagacggaggactatctgcaaaatctttctaaaaacagtcttcgacagcctgttgtagaaaagatcttaaaccaaatgatcaatctcgtcaatgccattatcgagcaatttggcaagcccgacgaaatccgggtggagctggcgagagaattaaagcaaagcaaggatgagcgcaatgaatctgataagcaaaactcactaagcaaaaaaatcaacgacgaaattgctaaaaggctaaaagaaatgggtctgccggaaacgaaacgattcattcaaaagtataagttcatttttcctgttaaagacaagaagtggaacgaagccaatgccataaaccaatgcatttactgcggtgagagttttcaattatcagaagcattggcgggtgataattttgacgtggaccatatcattccgcaagcattgttatttgatgattcgcagaccaataaagtgttagtgcacagaaaatgtaacggggataaaaataatgctactgcatacgactatattgcttctaagagcgatgccgctctggcttcgtacattatgcgtgtagacgattggtattccagaggcatactttcttacactaaaatgcagcgtttgaaaacatcctacaacgaatatctggaacggaaaaaagtaaaaaaggaaacagaagctgataaaaaactttgggaagggtttattgataggcaattacgggaaacggcatatatctctcggaaggcacggcagattttgcaaaaagtatgtagccaggtgtatagcaccgaaggaagtgttactgccactttaaggcggctatggggatgggaagatgtgttgttacagcttcagttgcctaaatacaagcagctcaatctgactgaagttaaagaatggcagagtgatcacggccgaagaaagcatcaaaaagaagaaattaaagattggaacaaacgcgatgatcatcggcaccatgccctggacgccttagtaattgcttgcaccaggcaaggctttatacagcgaataaataccctgaatgcgagtgatgtacgaaatgagatgaataaggcagtcgaagatgctgctatcgaatacaacgaaaaactgactttattagagaaatatctcgtgcttcaacggccattcgacacacagcaggtaaaagaggagttagccaaagtattgatttctttcaaagcaggaaaaaaagtagctacaaccggtaatcgtaaagcgaaagtaaacggtaaaaaggaggtcgtgcagaaagatattatcgtgcctagaggaccattgagtgaggaatttgtttatggaaaaatcaggtcgctggaaagaaatttgaaaacaggcgaaattgtgaaacataagccgaaatacttatttgaaaatcctcatttgatttttaaagcgtatataaagaagcttgtggaagaacgattgtcggaatgtgacaatgacgtcaaaaaggcaacggcttcattaaagaaggaaccgctctttttaaataaagaaaagacaaaaatattagagtacgcgtcttgctttaaagatgagttcgttatcaaatacaaaattcagggtataacggcaaaagacataccgtatatagttgatgaaggagcaaaagaagcggtaaaaacgcgattagaacagtttaataacaaggagaaggaagcattcaaaaacatcgaagacaatccagtgtggtataatgcagaaaagagaataccaatcaaaactgttcgaatgtttacgggcctttcatcagttgagcctgtaaagaaggatgcagaagggaaagacattggctttgtgaagccaggtaacaatcatcacattgcattttatcaggatgaaaacggaaagaaggtagaacataactgcaccttttggcacgccgtggagcgaaaaaaatacaaattacctgttattattaaaaatccgaaacaggtttgggatagaattttacaagatgaagttaaatacccgcaaaatttcttaaaaaagctacctgatgacaaatggattttcgtcgaaagtttacagcaaaatgagatgtttattttgggactgaacccagaggctgcaaaagaagccttgatcaagaatgataaaagagtattgaatcagcatttataccttgtgtggagtattgctgaaggtgatttttggtttaggcatcatgtagaaacaaaaaattcagaattaaaaagcactaaaggagccaaggaatccaagcgtttctataggtgtggtttaagtgcatttgaaaacttaaatccggtaaaagtaagggtaaccattttaggagaaataacaaaacaataagctgaaatacccgataaagtctgagtagaatttatatttattactattatccaagccaatttcctatgataaaacgaaccctctattttggcaatccggcttatctgaaaactgtcaatgaacaactcgtcattgaaaccatcctacccgttcctattgttccggaaggagaagataaagaagtcaagaccattgccaaaacatttcccatcgaagacatcggactgttgatccttgataacaggcagatcacgatcacgcaggcattactggcgaaactgttggccaataatacggcggtgatcagttgtgatgaaacgcatcatcccacaggcatgttttttaatcttgatggtaacactctccagagtcaaaaattccagacgcagctgaatgcaaccgttccgctgaaaaagcaattatggcagcaaacggtggtcgccaagatacagaaccaggcggccgcgttagcgatcaggcgggaggagaataagatgttgctgaacctggcgaatgatgtcaaaagcggggatagtgagaactgcgaagcgcaggctgctgcttattactggaaaagggttttcccggatacgctgcaattcagaagagaacgatacggccctccgccgaataacctgctcaattacggttatgccattctgcgagccgtggttgcgcgaagccttgtgtcgagcggcctgctgccgacgctggggatccatcaccggaatcaatacaatgcctattgcctggcggatgatatcatggagccatacaggccgtatgttgacctggtagtgtaccagattgtccggaataacgggcaatacctggagatgagcccatccatgaagaaatcgctgctggaagtcccggcgatggatgtgatcatcgatggcaagaaaagtccgctgatgaatgccgtgcagcgaacaacggccagcctggccaaatgctttgaaggcgccagcaggaagatcctgtatcctgtgcttagttaggagccgccgaccgtcccttttaaccaccaatatgtttgaacgccttaatgcttaccggatcatgtgggtgcttgtatttttcgaccttccgactgaaaccaaaaaggacaggaagatctatgcccggttccggaaggatatcatggctgacgggttccagatgttccagttcagcatttatctgcggcattgcgccagccgggagaatgcggaggtgcatatccagcgggtgaagaagatcttgcctccgaaggggaatgtcgggatgatgtgcattacggataagcagttcggaatgatggagatcttcagcggtcgagatccggtggaatcaccggaaacggtgcagcaactggagcttttttaaggtgaaacgggtataaaaacaggagttttacaaacaaaaaactgggaaaaaattacagttttttgtttgtaaaacttaccccaaaacacttgaaatcagcgagttttgaggtttcagttgtcgaagatctaagctaagataaaaattgaaagcaaatcacaactgagaacggtgaagccggatttgggttatcgttgtcgaagatctaagctaagataaaaattgaaagcaaatcacaacccatctgagtaggcgggtgatacaacggtgttgtcgaagatctaagctaagataaaaattgaaagcaaatcacaacacaagaaacttgcaagcaatatgacgcaaggttgtcgaagatctaagctaagataaaaattgaaagcaaatcacaacaggaagtagacaggcttcacaaagaaataagttgtcgaagatctaagctaagataaaaattgaaagcaaatcacaactgctttttggtacgggctttaagttgaagggttgtcgaagatctaagctaagataaaaattgaaagcaaatcacaactaattgacctttgtttttactctttggtttgttgtcgaagatctaagctaagataaaaattgaaagcaaatcacaactagatgcatccactggtggccaagtttggagttgtcgaagatctaagctaagataaaaattgaaagcaaatcacaacacctgcgctttggtatcagtctgtgccgctgttgtcgaagatctaagctaagataaaaattgaaagcaaatcacaacagcccacagatacgtaatgaaggcgctttagttgtcgaagatctaagctaagataaaaattgaaagcaaatcacaacgtatatgaagtactggcaggtataggtttcgttgtcgaagatctaagctaagataaaaattgaaagcaaatcacaacatgttagacatcccacaaataactatagcgttgtcgaagatctaagctaagataaaaattgaaagcaaatcacaacttgccagcagcgggtcgtacagtctatgacgttgtcgaagatctaagctaagataaaaattgaaagcaaatcacaactaaaaaacctattgataatgctaaaaggctgttgtcgaagatctaagctaagataaaaattgaaagcaaatcacaacctattgcgtcaatatagtctatgaccgcatgttgtcgaagatctaagctaagataaaaattgaaagcaaatcacaacggcaatacagcaccgggagatggctggaaagttgtcgaagatctaagctaagataaaaattgaaagcaaatcacaacagaaactgacgcaggagcagatcattgctgttgtcgaagatctaagctaagataaaaattgaaagcaaatcacaactctcggcacaataagcaatacattaaaatagttgtcgaagatctaagctaagataaaaattgaaagcaaatcacaacacgataagcatacggtccggcagcggttcagttgtcgaagatctaagctaagataaaaattgaaagcaaatcacaacgtattcacgtaataccgcttacgaaaggaggttgtcgaagatctaagctaagataaaaattgaaagcaaatcacaactgttgccgccaactgtcacctcgcaaccttgttgtcgaagatctaagctaagataaaaattgaaagcaaatcacaacaggttcttgatcatggccacgatcgtttgttgtcgaagatctaagctaagataaaaattgaaagcaaatcacaacgataaccggtatgccgttgcacatggcttcgttgtcgaagatctaagctaagataaaaattgaaagcaaatcacaacagtaaagaagagattcagaaacagtcgtatgttgtcgaagatctaagctaagataaaaattgaaagcaaatcacaacttatccatgttggcggcaaagccaagcaatgttgtcgaagatctaagctaagataaaaattgaaagcaaatcacaacagaggtaacagttacctttgtagtggtaacgttgtcgaagatctaagctaagataaaaattgaaagcaaatcacaactagcaatatcagataataatattgcatcaagttgtcgaagatctaagctaagataaaaattgaaagcaaatcacaacataaaactgccgttcggtagatttatgtagttgtcgaagatctaagctaagataaaaattgaaagcaaatcacaacaaataattcggtatggcctgtaccggttatgttgtcgaagatctaagctaagataaaaattgaaagcaaatcacaacgctaggaagaacatcttcacataatcgccgttgtcgaagatctaagctaagataaaaattgaaagcaaatcacaacggtaaataaccgaatcagtaacatcaaaatgttgtcgaagatctaagctaagataaaaattgaaagcaaatcacaaccgggagcgccggcgtttatcattgaggcgagttgtcgaagatctaagctaagataaaaattgaaagcaaatcacaacacacagcacttgtttgctttgcgtcatccggttgtcgaagatctaagctaagataaaaattgaaagcaaatcacaacaacgatgctgtaggcattacggcgatccatgttgtcgaagatctaagctaagataaaaattgaaagcaaatcacaaccatcagtagcatcacagaaattgtagttgagttgtcgaagatctaagctaagataaaaattgaaagcaaatcacaacaatcccgcagcgcattgttgacattcaggagttgtcgaagatctaagctaagataaaaattgaaagcaaatcacaacgccacacgttcaccagcttccagcaaataagttgtcgaagatctaagctaagataaaaattgaaagcaaatcacaacatattccaactctaccgcatcagtaccggaacagtttttgattacttccctccattacccaaaccacaaagctcatgaaatcctgttttagatcagcatcatcacaatcatatatctttttattattttttacactactggccaatgatgccacttttgctcaacaagacaagtacatccacgccgcattcacaggaacgcgctgggaccccagctccatgatgggaggcggactggaaagaacggaaattatcctctatttccggccagatggaacttatggcaccacgttgggtaatggctggcaaaccgatgtcagcggccgttatacgatctccaacggcaccatcaaactcacggattccaaaaaccaggttgaatctatcccttatgacggaagcggcagcttctggtataacggcaccactatttttcaaaaaaaacccgccaataagatcccgccaggttattacagtttcagctattcttccgggagtggcggtattagttcaggcagcaatgccccttatgttgggaacagagcccacaaaggaatacaatttaaccccgacggcagcttcagttccggcgcatcaagctccacttatatttccggcgggaacgtaagcggccacggcaacaggaaaacagaggccgatggaacctatatcatcaaagatggagtgctcacccttcgtttcaagaatggagaaataagtgtgaacagttgctttacatcggatgctgtttcatccatcgttgtcaacggtactccttattatgccgatgaagacaaaaaaagcacaataaaagaacccaatacaaaaagcaaacccactgcatccccggagaatgtgcgcagcggtctggattttttgaaaaaggccaacctcgccaacggagggaaatatttagatgaaataaagacggtaaaacttgaatcttcactgggtaatggtgcattgcagataactaccctactcgatctgccacaacaaaaaatacgctgcgaatacaggaagcagggtcaactgatcggtatcgaacagtcagaaggaaatgcaggatgggaatggtccaacggtaaattcacaaccctgtctgcggacagggtcaaagaattacaaagtgcaaatttctcggggatattcagtctgcgggaaccggtgttgaacagcgcatctatcatatcatcaccaaaggccagtgataatcaaaccagcatcatcatttctatagatggcagctacacggccttgttatttgataaagagaatcgcctgacaggaaattccagcaaaataaacaacaagagcaccacccgttttttttcagatttcagaaaaacgaagcaggttcccttgccttacacagttaaggagatgagagataataaaacctttacttatcaatacagttcaattgagttgaacccttctttaagtgccaatgattggatgaagccaggattttaagtgcggaatgcataaacctgcagacaaaaattcttaaatccctgttgaagttgttatatttagttcccttatattaaaacgtcaacatatcgccatgttcgaacgcaatcatgtctgcaagaacacagctaaaaaagtgtatagtcttatctttcatcttgcttcccgcattactcctgaaatgaagcttgctgtttcaatgctccttctcttccatttctatgccggagctaccgacagcatttatatccggataaaccaactcggatacactccttcatcatcgaaaattgcagtagcaggaatcaaagcaaatacttctatcagcagttttgaactcgtggatgctgccacccataaaaccgtgcttaaaaagaccaccggtaaaaattttggtcaatacggaccatttaccaatacctaccggctcgatttttccacatatacaaaagaaggaacgtattatatcaaagcaggaaatgcaacttccggcttattcaaaattgcaggtaatgcttatacaggcacagcagattttgtgctccggtatatgcgccagcaaagaagcggttacaatccctttttaaaagactcttgtcataccaaagacggctatatcgtttacggtccaaatgaaggatcttatatgaatgttaccggtggctggcatgatgcttcggattaccttcaatacagtactacttctgcaaatgcaacctatcacttactggcagcataccgcgattttcccgctgttttcaatgatgcacataaagcaaacggagacgatggttccaatggcctggctgatgtgctggatgaggcccgatgggggctcgactggttgctgaaaatgcatccgcgggaagactacctgttcaaccagattgctgacgaccgtgatcataccggctaccgcctgcctacactggattcagttgattatggttatggaaagggcaatggaagacccgtttattttattaccggcgaaccgcagggtctcgggaaatataagaaccgggcaaccggcttcgcctccactgccgggaaatttaccagcgcctttgcattgggtgcaacgctgctcagcggcaaggatactgcactggtacctttattaaaaaagaaagcactgtccgcctatgcattgggcagagccaggccgggagtggcacaaaccgcccctatgcgtgctccttatttttatgaagaagataattgggtggatgatatggaactggcagccataaatctttaccgtatcaatcgcgatacaggcctgttgcaacaggcgctgcaatatgcggaacaggaaaaatcaaccccctggatgggtgctgatactgcaagacactaccaatggtatcctttccacaattttggccattatgaaattgccaggaacagttccggcagcatgaaacagcagatgatatcctattacaagcagggaattgaaaaggtatgggcgaaagcaaaccataacgcattctatcgcggaattccctttatctggtgttccaataatttaacgacctccttcgcgatacagtgtattttataccgtcagctcagtggggataatagctatctcgaacttgagcaggcctgtatcgactggctgtttggctgcaatccatggggcacgagtatggtctgcggcttaccggcgcagggcgattctcccgtagatccgcattcctctttgtcggaaatttatcattatcccattgatggtggactggtagatggaccggtttatggctccatttacagaaaccttatcggcattcaccttaaagctcctgatgaatatgcatccttccaatctgattttgtagtgtatcatgatgatgccggcgattacagtaccaatgaaccaacgatggatggcacagcttcgctggtatacctgatggcagcacttgaacagcaggctttaccgaaagcagagaaagaccgctatggtgctatcaggagagctgatactgcttctaaaaaaatggccatcgtgttcaccggtgatgaattcctggaaggtgcagattttattggcaataccttatcaaagcatcacctgaaaggttctttctttttcaccgggaatgcataccgcaatccatcatttaccaaagccataaaagagttgaatcgtcagggtcattacctgggacctcattcggataagcacctgctgtatgctgactggaatgatcgcaataaaacactggtcagtgaagaaacgttccggcaggatatcgccaataatttcctggcaatgcagaaagttgggataataacagataaggctaaattttttctgccgtcgtatgagtggtacaattccgcgatcactgaatggagcaggaaagccgggttaacccttattaatttcacaccgggcaccaggtcggctgccgactatacttttccggcgatgggtgataagtatctcagctcggaagctattttccgttctattaccgaatatgagcaaaaagatccttccggtctcaatggattcattctgctgatccatgccggtgcaggccctcagcgaaccgataagttttttcacaaactgtcagagctgatcaattatctgaaaaagaaaaattataagccggtgaggatagatgagctgttgagtgatcagcattaaagatatcgatgaggccctgccttcaatatttcctgtgtgctccctttcattcaaacgcctcttttcatttccgcttcaacgtcaatacggttatctccggccacactcctatccttcctttcaggccatgatatccgaaccctctgtttacataaagatatttcccttcctgctcataaagtccggcccattgcttatacacatacttgatcgggctccatttaaaaccaaacaattcgatcccaaactgcataccatgcgtatgcccggctaatgtaagatgcacatgttggtgatgatcgatggtcacttcatcccaatgcgagggatcatgtgatagtaatattttgaatgcttcattcggcacggcctccgtagctttttttaagtcgccatatttgtgaaagccgcctttaccccagttttcaacacctattaaagacaccgtttcttcctgtctttttatggttaccgcttcgttcaataacaacgtaaaacccatttccgcctggatctcttttaaacgatccaggttggcctcctttgcttcttttgtttcccagcggatataatcgccataatcatgattgcccagtacggaatatttgccgtaaggtgctttcagggttgtaaaagcagggatccagggttccatctcgatcgccatgtgattaacgaggtcgccggtgaataacagcagatcgctgttttgggcattcaccaggtcgatgcccttttgcactcccctggtgccactaaaactgccggaatgtatgtcagataattgagtgatcgtaaaaccgtcaaatgcttcaggcaggtcgtggaagtacaatgtttcccgcctcactttataaaaatgcctgccgcgtgttaatccaaaaagggttataagaaacatcagcaatgcgagggcagctgccatctcgctaacatagatgcttctcggaggaaaaccttgcagcaagcgaacgatatcttctgccagcaataccggcgaagcaactaatttgggaatgaagatcagcagcacgccggacatcagcccggctatccagcgctgagcattatgaccagctctgtgtatggatataatggatatcaatccgccgagcaacaataggtccagcagccagtagctgacatgcagcaacggattttgcgtcagcgttgtaacggcctggtagaaatagagatcggctaccaggaagaggaatagtatccacaaaagccttttaaccataaatgtgttcaggcaaacagcccgataagtaacagcaacatctgctccatgttcattgttgggtcaatttcatttttaacatataactgggagaaaaaataaggtgctcgttgtttttattcatgcaaatgatgtatctcttttcagttgacctttctccaaatcgaggtctgtagtaaaagcattttattgcctgtctacagggttaaatcaaggttatccatacaaattaatataatacttataaaagtgataaatgatatagattaggcaaaaatataactgtggagaaaattttcagcctttttagaaatatcccta

SEQ ID NO: 1718 - DNA, 23801 bp, synthetic construct
  misc_feature 1..23801: note = Synthetic
  source 1..23801: mol_type = other DNA
atctccttcgggtttcggatttttagtttatagtttgtggtttatagttgcatttcgttttcggatgtagggcttcatgcttcgtacttgaattttacctgtcctggaaaggaacgaatcatctgtatttgtttggttcttgctttttgtgatttggttctttcaacactcactattgactatgcaccactcactcctcccctctcacggaaaacgcatacacagtagacgttttatattccttacccggttccagtacaattgacggaaaacttttttgattgggcgcatcgggaaaatgctgtgtttccaaacaaaacgcggttctgaaatcatccttagccccgctcttaaaagtattttttccctgcataaaattaccgccgtaaaactggagcccgggctcggttgtatacactttcattacaatgcccgatttatcgcctgtggcttccgcagccacatgcagggaagccggatcattttcattaagcacgaaattatgatcataaccactgccgttctttaattgccggttatttaccgtatctattcttttcccgatagctgtaggctggcgaaagtcaaatggtgttccttctacagcttccagctttcctgtgggtattaatgtagcatcaacaggcgtatatttatctgcattgatctgcagcacatgatcattgatggttccgctgccttcaccattcaggttaaaaaaagcatgattggtaaggttcactaccgttttttgatcggcggtggcatgataatctattttaagcgcattatttgccgcaagggtataccgtaccgttatatctaaatttccgggaaagccttcctctccgtctttggatacatattttaattgcaatgtggaatcattgggctgactggcatcccataccacatcctggtaaccttttttccctccatgcaatgtattgggcccattgttggtaaataaggtataggtttttccatctaagctaaacttgccttttgcaatgcgattgcctacacggcctatcgtagcgccaaaataaggttcggtggaatttacataatcctgcacattcttaaaaccaaccaccacgtcaacaggctttccgtctttatcaggcactcccaggcttaccagtctgcccccgtaattggtaatggcagcgcaggccccggctttgttttttagtatgtacaagccggtaagtttaccatctatgctatcctcaaaatttttattctccaatgaaggcacgcatgcatttactgcagcagtttctgttccgtttttttgttccgcatcctgctctttgacgccctggttacaggccattaccaccataaggcaggcaattgtaaaggctttaatttttatcataacaatcgtttggtttatttgattttatggcatattactacggttcatcctggcattagtgctgtgcaggacagcgtcccggaagaacatatgctgtgcgaagtcagagacttcgcacagcagggctcgcacagccgcagacttcttacagcagagtcaaagacactctacagcagatttttccccgggctgtaatatttcttccgtgccatcagctatctgtaccgcatatgcgctgagtgttaagccggtagcctgcctgtattgagcgctcactttttcaactaatgcatctactgcctcttcttttacaaggttaatgctgcatcccccaaagccgccccccatcatcctggcgcccagcacatctttttcattgcgcacgtattgaaccagccagtcgagctcgctgcagcttacttcatattctttacttaagccttcgtgtgtacgaaacattttttgccccagtgcggctatatcaccttttttaagatcatcacatgcggcgagcaagcgaagattttcttccagcacatatttgcaacgcctgtatattaattcatcctttggcagcacgtgctgctgaagcatttcatgcgacacatcacgcagcgattgcacttccgctacctgctcccttacccatgctacgccctgttcgcattgttgcctgcgggtattgtacccggaagacgccagcgcatgtgatacattggaattaaaaagtacgatcttaatctcttccatgtgtaaaggcacatactggtattcaagactccggcaatctaactgtatggcatgggctgccttaccaaatacagatgcgaactgatccatgatgccgcattttaccccggcaaattcatgctccgctgcctgtgccatttttgctatttgtatcttagataaccctaatgcaaacagctcgttcaatgcatacaacacactgcattctaccgcggcggaagatgacagtcccgctcctattataatatccccatccaatgccaggttaaacccgccgatagcaaaaccctgtttcgatagttggtcaaccacgcccagcacataatccgtccagctttttaacgggcgcacttccgaaattttagaggtgtaggtttcgttaaatgcaagtgaagcgagctctatgctatcgtcgtctcttttgctaatggcaacgtaggcggctttatctatagccgcgggaagcacaaagccatcattataatccgtatgctcgccaatgatatttattcttccgggagaccggaacaacatgggcactgcatgaaagcgttgcctgaaattttcgtttaatagcgctgtatcataatttccggatgtcatctttctatttgtattttttcctgatgctcgattgccggcatatcagttccggctgaagcaccagtttgggcgacggcatttttgaccactctttattattcctggtttcaaaaaacagcttggctgcctcttctcccatatgaacggtttgctggttcacagttgataaggagagtgtaatatactcaccaaacgcttcatttgcaaaaccaacaatggcaatatcgccgggaatttttttattcgctgcttttatggactgtatggctcccagtgcagtaaaatcttccaccgcaaaaacagcgtcaatagtgtacgaaagcaactggttcatgcactccctgcccgattctatactcacctttccatacacgatcaggttatcgtctaccggtatgttatgcacattcaaagcatcaatataccctctcaggcgctgattaaagatagtaacatgctgctgtccgccaatatgcgcaatacacatacagccctgctgaattaaatgacgggtagcgttaaatgcgccctggtaatcatctaccactaccgaaggcacgccaagcgaatcattggcccggtcaaaaagaatgagtggcacattccgcttttttaaagcggcataatgatccaggttaatggtgttcttggaaattgaagcaagcacgccttccacctgcgaacgcaggaatgtttccactccccgtttttcaaattcgtataattcattagactggtatatgagcacattatacccgttttcgctcatcaccttttctatgccatgaataaccgatccaaaaaaattgatctcggcgcttggaataatcacaccaacgatcttcgaacgccccagccgcagcgaagtggctattttgttggggtgataattcagctttttggccatttgccgcactgcttttctcgttgaatcttttacagcagggtggtcattgagcgcgcgtgaaacggtagccacagctatgttcagttcctttgctatatcatggatagttgccggctggctcatggattaaaatataatggctacagagatcgttattttgctggttaaaagtactgtcattttacaataggaaaagctaagatcctcactttttgaatttatctacaagcaattttataaaatagcctcccactacgcctcttgcctggaagcccactttcctgccgtcggtagtttcgtgccagtcgctgagcggcacccggtcgggtgtttcattaacaaaatcatacacaggttttatcagcgctgtaaaatcaccggcattatcagtgagcgtggccgtccataatatccagtcagacttggtataggttttccggctatctaacggcaatccatacctgttctgtttggtgaggtaatattttatctccttgctataaaccgtttcaggaaataatttcaatcccagtatcttatcccaaaccaggttatatttctggctccatgttccgggattttcgaaagtaagtgaataatgatcgccgtcatcggccagcttcatccatttttccaccatcatagcggtactgttcttatattgttttgctatttccttttctcctaactgttccgccagcatggcatagcatcccagtgctactatggctttaaccgataagttggcgttgcgtgcaatatgaccggcaaaatcgtcggtacataattgattctccgggtcaaaaccttctttgagcaggtagcctgcccatatgcttaatgtattccagtgcttttttgcataaccggcatttccctccgctttggcaatcgcggctgtaagaatgatcatattacccgcctcttcaacgggcatatcttctccgtatgtttggccattagctaatggataggtgccgaggtcgtgcgctgcgaatggctttgtccatttcccgctctcactatagtaaaagatgccgttcagcattcccttcagcaggtcggggttatacaggagatacagcggcgcggaagggtaggttacatctaccgtattaatggagccattgctgaaattctctttcgataaaaacagtatttccccctgcgggcttttaactaatttatgtgcggctatgctttggcgataggcaagagcgcatagctgtgcatattcttctccacccgctttcaacgcagcattgtgtatattttcgttaactgctttacattgctttataatgatactataatccgaatacgcttttgccaattccttttcgatcgtggcatttttcccgtctctccaccaggcaggcagattttgaccgaagtactgcacagcgtatacatcatcatagcccagcatgatcagcttactaacggtatctccgcctacttttcccaaggccaataccgtattcagcatgagctgatttccttctgttgaggaggtattgaaccggtatgttcccgacaggaaagcattgaaggcatatcttgcaggtgtgatgtactgcacagccctgtctttccccggcacggctacatacatatagccccagtctattctcaggtcgtctccctttttctgtaacaccggctgatctttggttcctgccttcaatatattcaaatcacccgatttgtatccgctggcaaccactgcttcggacccgttattcacagccagtgcagttgacgcgccaaaataaagttccgcatcatgtttggcaccgtcgttggaaacaacagcagcgctgaggtaagaaacaggccgggataatacattaaggtcatgcattaacaggggagacgtgaagccaagggttaggtttaccgggccgcaggtaaattcatacagggtttgggtggcgttgagcgttacttttttttgttctgccggcactatcagcttgtttgtgggaagtattacttcctgtacaatgcctgcgtcgagcgaagcgccgccggcagtattggcaacgtgaacagccagcacatttttccctcttactaatttttttacggcagaccctggcaatggaatataatgatatttgctgagccatcctgtataactgtaaattttttcaccattgagatatacttctgcattgtcatcatgaaggagcttaagaaatagtccattcacatctccgccattccatacaaaactgcggcgcacccatatgtcatgcgatttccacaaggtttttgcagtggattcattatcgccaaatggcgccattccttttttccaggtggcatcattaaagccggtgtttatccacccgtcggcgggttgtgtttctgtatatactgcttcgaatggtttttcatcgccggaggcaacaagactattgtactgcttttcactatctccaaggaaacgataaacttttccatccaccttcagcaaacccagcaacggctgttcctttcccgtccagtgtttggcaggagcagcactcaactgatcggtgaaagaccatatgctgaaataaggatcatgcgttattaacggataagcgggagcacggagatcctgggctgtcaataatccaaaagaaaaataaacggagagcagggcaaaaacttttttcattttcctggtcgtattttgttcaaaaaaatatttgctatctccccgaaggaacgggcagcatcatttccgtttttacaggtgagccaaaccggggtgtgccgtcactgttccaggtaaaaggctgtgccctgggcgaacgatgcccgccacaaccctgtccgggcagggcattggcatggtataatatccagtcttctttaccatcaggcgatttaaaaaatgaattatgccccggcgcatataccctattttcttttgactgcttaaacacgggctggggcgcttttttccatgcagcactatcaagcaaattattattccccgtaaagcgcaataaacctaaggcataatagtcggtccagcagccgctggcagaatatacaataaacaatttatcgctattgaatagcgcctgcgggccttcatttacacttacatgtggtggattatccgcatcatttaagtcaccatgtgtttcccattccagttcgggtttggaaatgcataccctgctgccatcaatcgtccacgggtttttcattttggcgatataaatattctgttgcccgttcacgtctccttcccagcccgaccagatcatatacaattgctcccggtaaaagaaaacgtttccatcaatggcccatttatcagccggatcagcaattttccccttaaacttccattcaccggtcatgggatccgctgattcattttccagcacatacatccggtgattgttattgtttccatcatcagccgcaaagtatacataccacttgttttcaataaaatgaatttccggcgcccaaagctgctttgaatacagggtacctgcaggtggtgtgaaaatgtctttgcgttcggcatttttcagatcagccaggtctttggttttccatatggcaatccggttgcccaaagtatgggtataataataatagccatccttataaaaggaaaaaggatctgcgccggaaggcagcagcgggttgctgaacatacgcttatcattatcctgcgattgggttttgcaggaaatgagcagtgccgggataagaaatagtatcagaatgaagtgcttcacctgagtttgtggttttttatttatagtttatggtgtatgcggtctgacgctcttaaacctgttaggtctgcctggatgcttcgccgttcggcagacctaacaggtggtctacttcatcttcaccagccccttattgtacaattgctgatgcagttgctttagcttttccaaaggtattttcatcactttcctgtcgtaagtcatcagcccgtttatttccacttctacatctgttgtttgggtatatattgccgcggaaagacccagaggaatgagcggtgtaagatcggtgataagcccggtatagcgtttaaggagctcatcgctgtttttaaagctctggtatccccagttgtctttctgctgccaggtatggccttcaaccggcaggcccagtccgccaaattcgcccagcactaatatttgcttagcaccaaatatggttggtgcaggcatttgcggatcgggataattgtgaatatcgagaatatgacccgaaccaaaaaagttcccgccactggcttcatttaccagtcgcgaggggtcgagctgcacggtccattccgtaatttcttttgttttaaattgtccccatgcctcgttgaaaggtacccacactacaatggaaggaaaattatgcaaggcggtcatgatggctttccattcggcacggtaaatggcttcagattcagcactccgttctttatctaagtttttacctgacacctgtcctacccgcatatcccatttgtttccacccatatcgccgctgggcatatcctgccataccagcatgcccagcttatcacaatgatagtaccagcgggcgggctctactttcacatgtttgcggatcatattaaagcccatcgctttggtttgctccacatcaaatttaagcgcttcatcggttggcgcggtatacaagccgtccggccaccagccctggtcgagcgggccgtattgaaatacaaattcattgttcagcaacattctttttataccattgttatccggcgcttccgaaattttacgcatagcgaaatagctgcctgcctcatctatcactttccccctgcgggtaaccgtatatttaagatcatacaggaaaggatcggacggagaccatagctttggattgcttatggttaaagcaacttcctcttcacccttcaatgtttgctccgctacctgttgctgtccatcgtatgcaaccacttttacggcatcgcccggctgcaggttttctatatccacttttactgtaagcgtttgtttgtctatgtcgggcgtttgcaccgtagcggcaatataggtagaaggcacattttcgagccacacggtttgccagatacctgttaccggcgtgtaccatatgccgtgaggattcttgatttgtttaccacgcggctgcgggccgtcatcgctgggatcccaaacgcgtatggtaatttcctgctgctttccttttgtaagcgcggtgcttatatcaaatgaaaaaggatcatacccgccctggtgcgaacccaccttattaccgtttacatatacatcacactgccagtcaaccgcgccaaaatgcagcagcactttcccttttctgaatgcagcggatacttctaccgcgcgtttgtaccagagcacactatcctttcctaccgttttgcccacgcctgaaagggcagattccaccgcgtaaggaacaaggatattaccatcaaaagcggcaggtggggtttcgccggtttccttaggaagaatggcatattgccacagcccgttgaggttcacccagcttttgcgggcaagctgcggacggggatattcgggcaagggctgttgcgcttttatatccgctgcccattgcgttgtaattttgcccgcaacaggcttccacgcttcctgcgcatataatcccatactgatcgttacaaaaaaaacaaaagaaaaaaatggcttcatgattgattgctttgaatgataaactttacacaatattctgcaataatagtaataaccgggcgtacaaatataagggagccttcctttataccccgaaacagcagctatgcgaccggctttcaaccgcagaacaatttcggcaggagctttttaaaacagtttggcatgacgccaacggaatatgcgagggtgaagcgggatgaatacgaacaacatagccctaatgaacaggatctgctatggtatgggttagccggctgcatagctgctatgtacaactgttgcgatgctccgttcggggtttggaacactattctgcatgagggagaggaaaaatccaggtatgcagtgcattaccatgcaaatcttacagcacactaaaaaactttgcagtaaaataaaaagctgctgcaaaattcatccaaaattcgtaaattaacgtctcaacccgattgcctgcattacctgcaatatcactccatgaaccctgtccgtaatttcaagtaagcgcttcgggaataaaaaaaggcgacttgcgccaccttaaatgttttcacaacggaataatccttattgtgaattgctttcatagcgaaaataataaaggtttagcaatttttaaaataataaaatttcaaaatgaataaaacaattcttggattagacctcggctcgacttccattgggtgggtattaataaaagttgatgaaaataatattccaatagaaattcttgcaatgggcagcagaattatatcattgtcctctgacgaacgtgcccagtttcagaaaggacaagcaatttccaaaaatcaggatagaacaacagctagaatacagcgcagaggatatgacaggaaacaactgaagaaaagtgatgatttcaaatacagcttaagaaaagctttagagaaatatagtatttatccatccaaagagttacttaatctatctatgctggacatctggaaattaagaagtgacgctgcttcactgcccatagaaccgaagcaattgggacgagtcttgtatatgcttaatcaaaaacgaggttataaatcggcaagaaacgaagccaatgctgacaaaagggatacagaatatgtacaagccgtaaaaggcagatatacccaactgaaagatcgtaatcaaaccattgggcagtttttttataaaggattgaaaaacgctgttgaacaaaatcaatatttcagggtaaaggaaaaagtatatccgcgtgaggcttatattgaagagtttgatacgattatcaatgttcaaaaaaagcatcatccattcctgacagacgatttaatccattcgcttcgcgatgaaattatttattatcaacgcaaactgaaatcgcaaaaaggattattgagtgtatgtgagtttgaaggttttgaaaaaacaataaaagacaaatcaggaaacgataaagaagtatttgtagggccaaaagtagcggcaaaatccaacccattattccaattatgccgaatttgggaaacggtaaacaatatcaacttgaaagtaaaaaatccgcctgatgcaaaatacaaatggggcgaccgcacccctacacttgacgaaaagaaacaaattgctgagcacctttggaaaaacgaacagctaagtttcaccgatttattgaaaattttaacccttaaaaaagacgacgtttatagcaataaacaaattttaaaaggtattaagggtaatcccacatttgcagatatccataaaattattggcgacagtaaccttctgaactttaatacaaaaattatctccaatggaaaagacgcttacatttatgaccgtaaaacaggtgagattttggaagaacgacacggctccattatcagtaaagaaatagaaaaacagccactctatcaactatggcataccatctattccattaaagatttggaagaatgtaagcaggcattaataaagcggtttgcgttttcagaagaaattgctgaaaagctttctaagattgatttcgacaaacagggttatgctaataaatcggtaaaagctattcgaaaaatattgtcttacctaatgcaaggctataatctttatgaagcagaaagccttgccggttatgtttcccggtcacttaccaaagatgaattagaaaaaacaggtactgataaaaaactgacgctcttaccaaaaaatagcttgcgtcagccggtagtagaaaaaattttaaaccaaatgattaatgtggtaaatgccttgattgaaaaatatggcaagcctgctgaaatcagaattgaactggctcgcgaactcaaacaaagtaaagacgaacgcgatgcagctgataaactaaattctttcaataaaaagataaacgacaaagtggcaaatgccttaaaagaattagacatacctgctaccaaacgatttattgaaaaatataaatttatttcaccaacaagagataaaagctggaacgagacacaagtcgttaatcaatgtatctattgtggagaaacttttaatttaacagaagctttaaccggcgatgcttttgatgtagaccatatagtgcctaaagctttattgttcgatgattctcaaagcaataaagtgctggtacatcgtaaatgcaatggcaacaaaaccaatttaacagcttacgattatatttcgaaaaagggaaatgctgtactcaatcaatatttatcaagggtagacgaatggtttaagcgcggtattatttcttattctaaaatgaaccgtttaaaggtttcctttgagcaatatcaggaacgaaaaaagcaaaaaaaagaaacagaagcagataaaaagctttgggaaagtttcatagatcgtaatatcagggaaactcaatacatcagtcgaaaatcaaaagagatattgggaaaaatatgtagtaaggtaagagttacagagggtaatgttacggccaaactgcgtaagctatggggttgggaagatgttatgctgcatttgcagttacccaaattcaaagagctggagcaaacggaaatgaaggagtggacaagtgaacacggaagaagaaaacattacaaagaaggaattgccaactggagtaagcgcgatgatcaccgccaccatgcggtagatgcattagtgatagcctgcacacaacaaggattcattcaacgtatcaatactttgaatgcaagcgatgtacgggacgaaatgaaaaaagaagtagatgctgcaaaagttgaatataatgaaaagatgaccttgttagaaacttatttgcttataaagagaccgttcgatactgcacaggtttctaaagcgatagacgaaattttgatttccttcaaacccggtaaacgagtggtttccatcagcaagtttaaggcaaaaggaaaaaatattaatacaggagtgctaacgcctcggggtgcattgcatgagcaatccgtttatggaaaaataaaaatcatcgaaaaaaataaagctgcaaaatatctttttgagaatccaaaaactattattgataaaagcattcagcaaaaagtactggataaaataagcgagtttaacggtgatgtaaaaagggcaataaactcattaaaaaaatcacccgtgtatttagataatgaaaagcaaaaggttttggaaacggcagactgctttaaagaagaagtcgttatcaagtataagttggatagtttaaaagccaaagatgttccgtacatcgtagataaaaaggttaaagaacttgtacaacaaagattgtatgaacacgggggaaaggagaaagaagcattcaaaacaacgctttggcataatgaagaaaagcaaatccccattaaaagcgtcaggtgttttacaggtctgtcggcagtggaaggtataaaaaaagatgaaaaaggagaggatattggttttgttgtattgggaaacaaccaccacatcgctatttataaagatgcagacggcaagctgatacagcacgcctgcacattctggcacgcagtagaaagaaagaaattcaagcttccggtagtgatacaagataccaatgctctttggactactattcttgataagcaattaccacagccttttatagataaacttcctgtagataatctaaaattagaatatagcctgcaacaaaatgaaatgttcattttaggattaagtaaagaaaatgtaaaaaaagcaattgccgagaacaacaaatcacttatcagcaaacacttgtatttagtttggagtgtgggagaaaatcaatactggttcagacatcatttagaaactaaaaattcagatttgaagcaaacattaggagcaaaagaaagtaaaagatattatttgtttaaaagtgttggcgcatttttagctcaaaatccgcttaaattgaacattgactgcctcggcaatatttcacccgtaaaaaaaatcctttaatgaaataaaagaacaacacatcattttaccgaagtcagaagccattataaaaaacaactctaacaacatttgatacctttgaatggaccgccgggtcgtatgcgaaagcaaacctgcccctggaacaacatatcctgatatgtaacaaaatgaattaataaaacggatattgaagaacgaaaagaataaataaatacagaaaaaagtaataaattaggattccgtgagttactaatgcaatattttacgctccggcagtcccttttagaaagctgcaaactaacctcctggtaaacttaaagcgacaacaacccatttgcgataaaccctgctcccatgatcaaacgaacgctttatttcggcaatcctgcctatctcaaaaccaataacgagcaattggtgatcgagatgcacgacagcggcgaaaccaggtcggcgccgatagaggacattggcttactgatattagatcaccagcagatcactattacccagtccctgctggccaaattactgtctaacaacacggcagtgatcacctgcgaccacacgcaccaccctacgggtatgttgtttaacttagacggacatagcctgcaaagccagaaatttcaggcgcaggtagaggcatcggttcccctaaaaaaacaattatggcagcaaacggtaacctgcaaaatagaaaaccaggcagccctgttgttgcatgaaagggaagaatacaaattattgctcacctacgccaaagatgtaaaaagcggtgacagcgaaaatcatgaagcccaggctgcagcctattactggaaaaggatcttccccgattttttgcagttcaggcgcgaacgctatggcccaccgcccaacaacctgctcaactacggttatgctatactgagagcgctggtagcaaggggtttaacttcaagcggattattgcctacgctgggtatccatcacaggaaccagtataatgcctattgcctggcagatgatattatggagccatatcgcccttttgtagacaagatcgtttgccagatcataagaggcaatggaaaattcttagagatgacgcctaatatgaaaaaggcattgcttgaaattcctgccatggatgtgcagatagacggacaaaagagtccgctgatgaatgcggtacagcgcacaactgccagcttagccaaatgctttgaaggaaagagcaggaagatattatacccggagctgagctagatctatcaggtctgccgggaagccgcgctgcgccggagaccttatagatctggcccaagctggcatccggaacctcaattgcgcttatatgttcaatcgcttaaacgcctatcgcatcatgtgggtacttgtattctttgatcttcccaccgaaaccaaaaaggacaggaagatctatgccaaattccgcaaagatattatggcggatggattcaatatgtttcagttcagcatatacctgcgacactgcgccagcagggaaaatgccgatgtgcatattaaaagggtgaaaagctttctccccgccaaaggacatgtaggcattatgtgcgttaccgataaacagtttggcatgatggagatattccggggcaaggaattaacggaagcccctgccatagcgcagcaactggagctattttaagggtagcgccagatttataagatttgcggccctgggaagccgggcggcagacctataagatttgcagcccacggttgcagcagcgcggcaaatcttataggtcttggccaggccggctatgataatcctcaaacccttttattcctccaaaccagtccagcagctcaggtcgcaatagccaggtgggttcatttgagcgcatagcaggataagaagaccagttccatctgctcaggttggtgcaatagccatgatgcaccgggttgttatgaatataccgcaccgtggcccgaaattgctcatcactttcaatttgttttcgccgtaaataatcaataaacagagcccccttccggttatacattttattataggctttggcatagctgttgagcagattggaaaaccgctccattacaaatccgggaagcaattcgggcgaaaatcgcttattgtattttacttcatgaaagtgacgctccagttgcgcttcctcctttattttaaccaaacaatgaaaatgattgggaagcaggcaatagcaataagtatccgcgaccggtgaaatatgtttaatataacgggtgagaaaaaaagcataattattcccattccggaacaatttttcatttccaacggctctgctgagcacatggtattcttcgccgggcagcagcggcaggtggtaatcaggcatatagcaaatacaaaatagtatgggaaattacccaaaaacccgcaaagttccgggttgtttttgcagaacaggaacaaaaaaatggagccggagccccattttttcattgtaaaacttagtccaaatacattaaaatcaagcgcttaggcaacttgtggttgtataagaactaagctacataataatttgaaagcaattcacaacgacacggcgcatgaagatcagttaagcatcgttgtataagaactaagctacataataatttgaaagcaattcacaactattgtaatgtctttcgctgcactttccctgttgtataagaactaagctacataataatttgaaagcaattcacaactataccctgctgactgttccggaggttaccggttgtataagaactaagctacataataatttgaaagcaattcacaacgacgatgcaataaagtctgaaaaagaagcggttgtataagaactaagctacataataatttgaaagcaattcacaacaaagaggcgcacacttatttcaaaaggtgcgttgtataagaactaagctacataataatttgaaagcaattcacaactgattgtgcccttcaacgcaccagacggaagttgtataagaactaagctacataataatttgaaagcaattcacaacagagctatcagggaattcgtttcacgtggggttgtataagaactaagctacataataatttgaaagcaattcacaacgggctgagcgaaggaacctatgttttgcgtgttgtataagaactaagctacataataatttgaaagcaattcacaactcaataaaaaaggcattaaaagcgtatgacgttgtataagaactaagctacataataatttgaaagcaattcacaactctctttttcagagggatacttgaatccatgttgtataagaactaagctacataataatttgaaagcaattcacaactctctttttcagagggatacttgaatccatgttgtataagaactaagctacataataatttgaaagcaattcacaacttagagacagtaccggtaaccgccgcttcggctgtctattatgacacaaacacctcttatcccaaattatatttgtagccagacaacaatactattcattagaattactttactattatcaggtgtaataattttcttttatgaactgacaaaagcagtatttcgtaaacagcaaaaggacgaaaacaaaaaaaaacactaccgccaatgctgtccacactggcttttttcctaatttagccacagcgaaacagcattagcggtcttgctataacgacaactatctttaagcagacacgcagagaacaaacagaaagagaataaatttaaatggtgaacaacgacatacaaacaatctgactttggaactacatcccgatattcatgccaacatagtattaagtctgtatagcaatcaataatatgacatcaacaggaaaaactcccacttatggactgacacatattgctgttgcagtcaaagacctaagtaaaacaaagaatttctatcaaaccgtgtttgacatggaaataatgtatgaagaagcagattttattcaactttccacacccggttctcacgatattcttgtgtttgaaaaaaacggaaacgccaatggagaatctggtggcattaagcacttcggattcaggcttcgtaaaccagaagatatttcagtaatggaaaagaagatattgaacgcaggcgggcaaattgttcacaaaggagaatttgctcccggttcaccctacattttttttaaagatccggatggatatgaaatagagatatggtatgagcttgtaccctaagcatcaaattctaatggtgaatgcacaacatgcagttttgtgcaagtggggctaacggaataatcgccatatcccacggtagtaatggttgtacctggcccaataaatgctttgcggaatggagctgaacaccgcgttgtacctgaaccttattacatccatcagggagccgggaaaaaggtaaacaccaaaacaaaaaacaggaatacatacagcaccattattaagtgccatttgctatctttcaggcaaactgcataattatgcttcatacaaaatcattcctgctgctttgcctgcttatgtgcgggatgatagtaaaagccggttttttgccggatcatctgagttgcgaacaaaaaattaatccctccggcattgaaagtgcaaagcccttactgggctggtggatcagttcagccgaaagaggctttacacaattagcctggcaggtactggttgccacaagcccggataagctgaatgaaaaaaacgccgacacctggaactccggccgcatcgcatctgctgataataacaataatgcctttgcgggaaagtcattgcaatcgggtcgcagatactactggaaagtaagagtatggaacagtgccggcaaagcatctgcatggagtgaaaccgccacttttactaccggcatcctgcagcaggaagaatggcatgccagtaactggatagcatatgatattttacccgatagcatgcaagtaatgcccggcgtgcatggcaacggtgatgcactcggcaataaagccatacaacgcgctgtggttccctgcttcagaaaagaattcatattggaaaagcaggttaaggaagccttcgtttttgtttcgggtttaggacaatatgagctgcacctcaacgggggaaaagtaagtgacgacttcctgtcgcccggatggacgaattatgaaaagcgctgcctgtacaacacctatgatattaccagccgcctgaaacagggaccaaatgcaataggcgctattgttggcacgggatttttttacatcaatcgcgaaagatacaggaagctggttcgcgcagaaggatatcctatgctgcgcgctaaactgattgtacggtttacagatggcagctcaagagaaattgttacagatgaaagctggaaaacagcgccctctcctgtactgtttacaagcatctacggcggagaagattatgacgccaataaagaacaggcaggctgggatatgcccggctttgcagatgccggctggaaaaaagtattgatcacaaagggcccgggcgggcaaatgagggcgcagtatgattaccccttaaaagtgatggacacttttccggtgaaggcgcaaacagcgatagccaaaggaaaaacagtttatgatttcgggcagaatgcttccggcatcgtgcgcctgaaagtaaaaggcaacaaaggagataccattcgtattacacctgctgaattgctgaacgacaacggactgcccgaacaatccgcgtcgggaaaaccttattactttacctatatccttaaaggcagcggcacagaaacatgggagccccggtttacgtattacggcttacgctatacgctggtagaatacatcagcactgcccctgcgccgcaaatgccggaaataacgatgctgcatacccgaaacagctccccttcggccggaagctttaactgttccgactccctgttcaataatatttaccagctcattgactgggccataaaaagcaatatggcaagtgtggccaccgattgccctcatcgagaaaaattaggctggctggagcaaacccatcttgtgggtgcctccatgcgttacgcatacgatgtccggcatttatatacgaagatcattcacgacatgaaagaagcgcaactgcccggcggccttgttcccgatattgcgccggaatatgttccgtttgaagacggcttccgcgattccccggaatggggaagcgccgccgtgatcattccctggtatatgtatttatggtacggcgataaaaaagcattgataaatgcctatgatatgatgaaacgctatgtatcccatttaaataccaaagcgaacgatcatattttatcgtacggattgggcgactggtacgaccttggtccggaacctcccgggccctcgcagcttacgccacttgcgctaaccgcaactgccatatactactacgatgcggtaatactaagcaaaactgccgcgcttttagcaaaggatgcagaggcggaattatatgctgcgctatcggaaaaaattaaaaaagcctttaacgataagttctttgacccggaaacgcaggtatacgccaccggtagtcaaaccgcttatgccatgcccctgttcacaggcctggtagaagaacaataccgcgaaagggtttttaataacctggtaaaagccattcatgccggtaataaggcattaaccgcgggtgatgtgggataccgttacctggtacgggttttggaaaacggtaacgcttcccaactgctatatgaaatgaataacaggaacgacgtgccgggatacggctaccagataaagcatggcgcaaccgcgctaacggaatcctggcccaccctgaggcttgtatccaataatcacatgatgctgggacatttaatggagtggctttacagtggattgggtggcattaaccagcaggaagatgatcacgggtttcgcaggatccgtatagctccccaaatggtagatggtatggattcggtaagcgcttcgcattccacgccaaacggcattatccataccgcatggaaaaaagaagggaacaaaaccgtattaacggtaagtatccccgccaatacaacggcagcggttatcttacccgtttctcatataaaaaacataacagcagataaccaaccgcttatccaaaataaatggatcactcgtatacagcaaaaagcaggtaatatccattttgcgattgcttccggtaactatatatttacgatcaatcattaatgtatgaaccacaataggggtatgcgcttttcgcttttctgcatctgcatcgttatatggagctgcaaagcgcctgtgccctcaaccgtttcacaggaaaccatgcaaaaagtatacgaagcagtaaaaacgccttttaaatatggcatcgttgtttcagcgcccgatgctgcgaaaatggccgacagtcccaccgtttttcgtttgaatggcaaatggtatatgacctatattatttttgacggaaccggctacgaaacctggatcgccgaaagcaatgacctgctgcactgggatacgcagggaaagataatgtcctttaccgaaaacacctgggatgccagtcaaaaggcagggtatccggcactggtagatattacctggggcggaagctatgcgcccatgaaatataaccaaagatattgggtatcttacttaggcggcgccgataagggatatgaagcagggcgtttgggtgtgggcatggcgtatacagataacctgcaggcaaaagagctggaaagattaccgcagccggtattgtcggccattgattcatcggctaaatggtacgataataaaaccatctttaaaagttccgtaatacatgatgcagataaaaaaagcggttacccgtttgtgatgtattataatgcggcaggcgacagtacagatgctaagggacatagttttgaaagcattgccgtggcagtttccaatgacatggagcattgggaacgcaaaggccatgacccggtaattacaaaaggaaggggtatttgtggcgacgcgcaaattgtaaagatgaatgacctgtacgtgatgttttattttgggcataactggcaggatggcaacccctccgcttttgaccgcttcgcgtgttcatacaacctgctgaactggacagaatggaatggacccagcctggtagcgccatccgaaccttacgatcagcaatatgcgcataagccctgggtaatacaatgggaaggcgtagtatatcatttttataacgcagtaggtgaaaacgggagagtgatcgctttggcaacatcaaaagatatgaatgtcaaaccataattataatttttaaggatcttttaagctcctgcagaccaccggttcaaggctgcgccgtatttttgggagaatttataacagtttgcacccaatgataatactataaaaatagtatcttcatcaggtgtgttcagcaatttttattaaaagcattttttgaaatacccaactaaaaatagaaatatgaaagctgctcttgtatggatatgcctgctctttgccacgccaatgtttgcacagttaaccgtcagggaacagtttgaaaagatcaaaacactccaggaagcgcagaaattcattgacgccaaccagccgctcaaacctaccctgcttcacctcacactgggaaaagacacaacgcttatagacaagcggctgctgcggcaaaaaaaaggcgatgttttttccgttggctatgttacttacctggtgcttgacggaacggaagaagtgacttaccgcgccaactatatcttcttagacggctcatccttatccaacgcagaggtagacagtcttaaaaaagttattttacaaaaagcatctgaaggcacatcattcgatcagctttccgaccagtacaccatggatggcaacaccacgcatggcgacaccggctggttcttcggcgaagaaatgatgcccaaagaattccaggacgctgtacaaaaacataaaaaagatgatatctttttcgttgacgttcccgagcggcaatggcactatattgttaaaaaaacctacgacgaccaggtgaagaaagaaataaccgtgctgcgcgcaaacgggagataaggggttgaaagtatccctatacacctgtacatttacatttacttctaaaaaacggagatctccgccaacttgctttccaggtactgaagcagttcatcttcttcccaaccaccattatatttttttccattgacaaagaaagatggagtccggtttaccccgcttctgagtccgctttcaaaatcgcgctgaaccttctccgccagatcttttctttgcatatcacttttaaagcgttcctggtcaagtccgatggttgtagcaaatagaaaaaactttctgcctccagcgtttgctgtttttcaaaaatgatgtcgtgcatttcccaaaatttatcctgcagggcagcggcctctgttgcaacggctgcaggtaaggcaagaggatgaatttttgataaggggaagcatacagctcaaaatccggcgcagtgattcctgttgttaacctgtactttattttttgattactatttatttgatttctttatcagcactgttagaataacaagaatgcctttgttacgccaaaggcattcaataaccccaaaccctatgctgcaggaattgccatacgtacttcaacaatggctccatattgaataatcgggcatcccttcgcaatctccgcagcttcatcgtaatcttttgcttttatcagaaataacccgccgatagactcttttttttctgcgtaaggcccctgctgtactttactatctcctgcaattactcttccgtcaacatcccatcgctttggcggagcaaccagcttgccgctggacgcaatgcccgctatccagtcttgataaggttttaatgctgctttcatttgctccggcgaaggactcggatttttgcttgtaagatccctgtggatc

SEQ ID NO: 1719 - DNA, 23801 bp, synthetic construct
  misc_feature 1..23801: note = Synthetic
  source 1..23801: mol_type = other DNA
ttaatgaggtcttctggcagactcatttttttgatggtgagcagaatttcccgttgccttcggaaacatcgacgccgacgaaatatgaaacctataatttccgcacaatgctgggctggaattttagaaacagaaaattcacaaatcagttagcaacggcctttctggaagaaaacttcgattatttttcggattctactcaaccgaaaaccagcggcggaaaagggaaaacttatctgataaaagatgattttaattttcttttgacaaaaaaaatggcattaagttttttgggcgaattccggaaaaccgagggtgaaggttttagttctggaatttcaaatccgcaaagaaattcgggaaatattgcgtttttgataaaatggaattctctgcaaaatctttattgggaagcaggcgtaaagaaagaatgggtgcagcaacttgaaacaccgttgctttattcatcgggattgcgatggaaagctgcagatttctatacggtgaaaattaatgcttcaaaaaactttcgctacccaactttcaatgatctgtattggcagcccggcggaaatttagacctgaaatccgaaattgctcatcaggctgagatacccaatgaattccggttcggaaattttgaaatttcggcaacgccatattatatggacatccggaatttgatacaatgggtgccaacttcggtgggatattggtcgccgcaaaatgttttccgggtaaaatctttcggcttggaatctcaagttttttatcaccaaagtattgataatcattactttaaaacctcggtgatttattcttacaccaattcgaaaaataaggaaacgggaaggcaactgacctatgttcccaagcataaggctaccggaaatctggattattcctacaaaaatttcgggatgtttctacagggaatgtttaatggattaacttttacaaccaccgatgaaagcagggaagaagcgattaatccttactttgtgatgaatttaggtggctttgtgaaattgataaaaaaataccagttttgttttaaaatccataatttaacaaatcaagtttatcagtccgtaagcgaatattatttaccaaaaagaaattacagtattaatcttaacttaactttttaaaaatcaataaattatgaacacaaacaaaattctgaagtgggtatttgctgcaagtttggcagtgacggtttcctgttccgatgacaatgatccaatcgttccgaaaggcgcttacgaaaacggaattctggtggtgaatgaagggaatttcggcaaaggaaattcttccgtttcgtttctggatagcaacggaaaaatttccaacgacatttactccgcggaaaataatggcgagaaaatcggtgatatcctccaatccatcagctttagcggcgatgatgcttattttgtggtgaataattccaacaagattaatgtggtgaaccgctacactttaaagaagaaaacggaaattaaaaatgagatgaaacagccgaggtatgcggccttttctaataagaatttgtatgtaacaagcaatggctataattccacgagtttcgtttacatatataataaaaatgaccacgcttttttgaagaaaattgaatttccaaggtatgcagaaaaaattgcggaagccggtggaaatattttcgtgcagaccgatggcatcgcttattcgccgacaacctggcagcctgtagctacagggcacacgatttcgcgcatcaatgccaatagcaatgcggtggacaagacgattgagctgactgacactgggattatccgggatatgatttctgcgagcggtgcactgtatgtgctgagctccgatagttcgggaagtttcgtgtaccgcatcaacgggcaaagtgcggcgtttgagaaaatttcgctgggaattccgaacgcccaggatttggctgctgacggcggaaaactctacatccgtgcgagcgaaaaagtttacaatatgccgctgcaatcgaatacggcgccttcttcaagcgtgagcatccctgcacagtcggtgtacggtttcaatgtgattgacgggaaaatctacattgcatcgtccaccttcacggaaaattccacggtgtatgtgtatgatttggctggaaaggaaattcttcaaaccaaggctggaatgggtgctaatggcttttataagaattaaaagctgataaacttaggcttaaaatttccctgccgctatatttagtttgcagggattttttaactttgtatccaaatgaatacgaaatgttcataattgagaaaacagctgagtttgaccgctggtttcggaagctgaaggatttaactgcaaaagcaaaaattttgttcagaatacagaagctggagaatgaaggacatttcggtgactgcaaacctgtgggcaacggaattagtgaaatgcgcatcaattttgcaaaaggctatagggtttatttcagagaaaccagtggaaagattattattttgctaattggtggtgataaatcaagtcagcaaaaagatgttgagaaagccaagaaaatttgggaaaaaattaaaaaatagtatggaagtttcaagatttgacattgcggattatctggacagcaatgaaatgattgctgaatatctgaatgtagttctggaagaaggtgaggattccgatgttgtaatcgctattggaaatgtggcgaaagctatcggaatgacgaagattgcggaagaaaccggtatgagcagaccgagtttatacaaggctttttctgacggtgcaaaaccgcagttttctaccgtgatgaaagtgctgaaagcagttggcggacagataaaagtggaaccgattaccgcttgatttattgtttcaaaaccagcccgattttctccgcttcttcgacgacgaattttgtggcggcgggtttttcgttgggaatctcgccttcaagtatggcttccttcaccttctctttcaggatgccaatttcctttgatggcggtatgccgaacattgccataatttcttcgccggaaactggcggctgaaaattccggatttggtcgcgctcttccacctcgcggattttttccagcacatagtcgaaattttttcggtagcgtttctgcttcgccgcatttttcgtagtgatgtcgcttttacaaagggtgaacaggctctccaaatcttcgccggcatcgaaaacaagcctgcgcaccgcagaatccgtaacgccgtcatccaccagggcaataggcctggcgtgcatttttaccattttttccacgaacttcagctcgtttcccatcggtaatttcagtcggcggaaaattttcttgacatactttgagccctgaaattcgtggccgtgaaaggtccagccggtgccttccacaaattttttcgtccaggctttaccgatgtcgtgaagcaaggcagcccacctaagccacagattttcagtgtgttgcgaaatgttatccaccacttccaaagtgtggtagaaattatctttgtgcgaatggccttccacatattccacgcctttcagagcggtaagttctggcaggatgatttgcagaagcccggtttcttccatcagtttcaggccttttgatggtttttcgctcatcagaattttgtgaaattccaccataattctttccatcgaaacaatcctgatgcgctcggcttcttcggaaattgcccgaagagaattttcctcaatttcaaaatccaaagtgctggcaaagcggatggcacgcatcattctcagcgggtcatcgctgtaggtttgcttcggctccaaaggcgttcggatgattttccgctccagatcctgaagtccgccaaaagggtcaatcagctcgccgaaatcattttggtttaaggaaatcgccatcgcattcacggtgaaatcgcggcgtttttggtcgtcttccaaagtgcctgcctgcacgctgggatttctggaatcttcggaatagctttccttcctggcgcccacaaattccagctccaaattctggtggcgaaacatcgcggtgccgtaggttttgaatacggcaactttggcatttgggttaatgcctttcgccacggcgtttgccaaagctatgccgctctgctccgttacgaaatcaatatcagtgggcgctttgcgcttcatcagcaaatcccgcacgaaaccgcccacgatgaaaacggacatcccttcttccgctgccacctgggaaatctgcttgaaaagccggaagtttttattctgcgcaaggctgattttcattaaaaatcttcgtttaatctgcaaagatacgcattacggtaggcacgaaaaatttttcaggtatggataaacactgcagagtttttatctttgcatactcgatttatgcgaaaatcagcagtattagcaattgcggcatttataccagcctgctttttttctcaggaaattccacgggataccctgagcgtacctgtgcgtgattccctctatcagaagattgaggatttttcagaaaggaacaaaacttccagattcttttataaattactattccggaatgtatccgataagaaaggagcaaaggaccttattccggaaaatcctgaattgttccgagggaagcacatccggaagattaacatagaaacaaacgacccgctcggcttcggcattcccgatgaaaatcagcgctggtacgaccgattgggaaaccgcctgcatgtgaaaacccgtccgggtacggtacgcaactatctgctcttccgccctggtgacgagtacagccagcaggcactctacgaatcggagcgcttgctccgtgccacccgttttgtacaccgggtatccatccgcgctgtggacagcactgcgacgcgcgattcggtggatgtaaatatcagcctgcgcgacagctggagcctccgcccgatgggcagcgcgtccggaagcaaaatcgggttcgggctggaggagatgaatttcctcggtctcgggcacgagctatctgtctactaccgcaggaattttaaggaaaaagaagatttcacaaggacatattataaggctaataatctcttcggtacttttgtgaattcaacagctttctgggagagggatatggatgaaaatgagtatgcctacctctatgctgggagaaattttatctccccgctgatgcgctgggctggcgggggcgggctttatttttacaattactttaaacgcatccctccagactaccaaacggcgccggaaaatatgccgctggagcccataaaattccacgcgcaggaagtctgggccggttatcagttccgcctttttgcccagaattccaataccgtgcgcagcaacatcacgctggcggcgcgcttccgcaatatggcctatgtagatacgcccgaagagtggctggatccggaggcgtatttcagttcgcaccagctataccttgcgtcggtaggctatacgcgcaggaaatatcaggtgtctaagaatatttttaattttaatcttccggaagatttgccatacggattgaaatattctgtgacagcaggcgcgatgaatgtaaagggcggtaagctattgccctatttcggcggagatctaggctacggcgcgctgctggactgggggatgctgaatcagaggctgcagtatggcacctttctgcgagatggcgaaatgcaccgatccaccttccgctgggacggcacattcttcacgccactcagggattacggtaagctcaacctgcggcactttttctcgcataccctcgtgatgggggataggcgcagcgccacgcttgccgaccgcctgaacatcaacaaccgggaggaatttcccaacttcgatgaagccgtggtggggctggataagctgctgctgcgctaccaggcgcaggtatttatcaataaaccttggaaaaatttttacctgaatccttacttcaacgcgactctgggattccttggcacagataaaaatctattcaaaaacccgcctaactataaatttgcggtggggatattgctgtacaacccatatcttgccttcaaccgcttccagctatcgctggcgtattatcctcgcaggccgtttgaggaaaaaggggatttcaggttcaacggctaccggaattattacatcccgctgaacacatttgaaatcaatgcgccaagcatcgtgcgctacagcgatatgccgtacgggtactgattgataattggtaaacgataatggataattgattttctcttaggttattacctattttccatcacaaatctttactccctcagcaccttcactttgccatcctgccaaatctgtataacggatgagccgctgtattgcgaaatcttgtcgtgatgctccggcacaatatagtccaccgcgttttttatttcatcggaaatatccgcaaacttcattggcgatttttgtccgctaaggtttgccgatgtggaaaccaagggtctgttcagtttggaaatcagttttttacataaatcatccttcgttaatcgtatgccgatgctgccgtcttccgcaaggatttccttgggtaaatttcgtgccgcttcgtaaacgaaggttacaggtttttcggaaaggtcgataatctgccacgccatttcaggcacatccaccaaatcctgcaggcgtctttcgctttccacaaggataatcatcgccttgctttgctcgcgcttttttatgtcgaaaattttcgcaatcgcttcaggattcgtggcatcgcagccaatgccccacaccgtatcggtagggtagaggatcgtgccgccggactttaatacgctgatgctttcgtccactttttttaggattgatgatattgataattgatagagcggctcaatcagttaaagcctattttgttgcaaaattactcgctaaatttccatactcagccgtctccacacctcatccttcagcgcttcgatgccttcgcctgtaactgcggaaaagaacagcggcttttggttttcgggaaattccctagcgatttcaattttcaaatcgtcgtccagcagatcagctttggaaaccgaaaggataaattccttgtccagaagttcgggattgtactttctcagctcgttttccagaattttaaattcgttccaatgattatcggaatccgcaggaatgaggaaaagcaaaatcgagttccgctcaatatgccgcaaaaatcggtgtcccaggcctttgccttccgccgcaccctcgatgattccgggaatatctgccattacgaaggagcggtagttgcggtaattcacaatgccgagatttggcgtgagcgtagtgaaagcataatctgcaatcttcggttttgccgcagaaactgccgccagaagtgtagatttccctgcgttcggaaagcccaccaaacccacatctgcaagcactttcagctcgaaggttacatagccctcttcacctggtgttccaggctgtgcgtagcgcggtgtctggtttgtagccgatttgaagtgctcgtttccaagaccgcccaaaccacctttctttaccacaatttcctgcccgtgctccagaatttcaccgatgatttcgccctcctcatccttcgcaatcgtcccaatcggcacctcgatgaaaacatcctgtccggcagcaccggtcagctgatttttgccaccgttctcacctctgccagccttcaggtgcctcgtatagcgcagcggcagcagcgtccattcgtgcgaatttcccttcataatgatgttgcctcctctgccgccatcaccaccatctggcccgcctttcgggatgtacttttccctgcggagatgcgccgagcctgcgccgccgtggcctgccgcacaatggattttcacatgatctacaaagttgttcacggagtaaaattgaaagatttagagatttagataggaaaacagcaacaaatttttattctgattttaaacttttcgcaaatattgaacataatctgcaacttttcttacaaggattttatgttccaaatccgaaactacaatttcgacaattaaatcatccaaaccaagatttggcaaaagttccaccccctgtaaagctaaaaaagtcaacattgtggaaacggcagttcttttgtttccgtcaacaaaagcgtgacttttagaaatggcaaccgcataccacgctgcgatttcaaaaacatcggttacattctcgtaataaatgttctgctcaatacgcgataaagcaccggccaatttgtttctgtcaataccgacagccccacctgtttcagcaattatattatcgtggataagaatgatggattcaagttcaacgaaagtcattatctgtctttcagtgcttcaatttcagtgcggtgatctcgaagaatcctttttgcggtattcagtatcagcctctgcgttccaggatttttcggatcaaggttcataggcaccacaggttccggcggaaaggcgcgcttttccccatcgtaagtttcaagaaactcacggaaagtcggaatctttctttcaggtttattccctacctcttccattttcattgctttgaagccttaaaccttgagtatcaaaccttaaccttcaatgctttccaccgccctgtaaaggttttccgcaatcgcatcaatttcgcccacgccgtttacttccacatatttgttctgctctttgtaaatatcggcaacctccgcagttttcgcataatattccttgattctgttgcggatgatcagctcatcgctgtcgtctgttctcccgcttgttgcgccacgctctatcagcctttccaccagtacttcatcttccacgatgagcgataggcacacggaaatttccgcagccaggtgctgccgcacgatgtcatctagcgcaatggcctgctgccttgtcctcggaaagccatcaaaaataaagccctgtgtatcagtaggtttcttcagttcatcaatcagcatatcaatggtgatgtggtccggcacaagctgaccgacatcgatgaaggatttcgccaaaagcccaagctccgtttcgttgctcatattctcgcggaaaagttcgcccgttgagatttgcttcaggttaaatttctgcaccaggttcttcgcctgcgttcctttgccgcttccaggagggccgaaaagtacgatattaatcatctgataatcaatggtttattgtaaattagtcatttattttcccttcggaaagttggtaaagctctggtaggtttctgccgagttcatcataatccagaccgtagcctaccacaaatttattcgggatttcccagcctacatagtccagtttgaaatcctttttataaacttccggcttcagcaaaaatgtggcgagcttcacggattttggccgctgtgtctgctcgaaatatttgaacaggttttccacggtattgcccgtatccacgatgtcttccacgatgatgatgtgcctgtccctgatgtctttcgtgagttccattttttggtaaacgatgccggtggactgtgtgccgatgtacgaactcatctgtaggaaggcgatttcgcaaggcccaggataatgccgtatcaaatctgagaaaaacatcactacgccgttcagaacgccgatgaatacgggcgtttcatctttaaaatcttcaaaaattctcaatgccacatccttcacgatatcctggatttcggcggaactgatgaagggcacaaaatgcttgtcgtgaacttgtatcgcagccatcttctgaagattaggaagcaaatttagggaaataaaaaatgttgtaataaaaaaaggcgagttgccccgccttaaatgttttcacaacggaataatccttattgtgaattgcaaatcagatttttctgtagcaaatttataacatttttttcatattgacaattttattaaattagagaaaaattttaatatgagcaaaactatacttggactggatttgggggtaacttcaattgggtgggctttaatagaagtttgtgaagaaaagtttccaatacggattaccgcaatgggctcccgaattattcctttaacaactgatgaaaaaacagaatttcagagagggcagtccatcagcaaaaatcaaaataggacgactaaccgaacacagcgtaaaggatatgataggaaacaagacagaaaagaaaatctgaaaaaaattttagaaaacctagacatctttccttcagaaaatttaatgaaactgccttctctcgagctttggaagctgagaagtgatgctgcaagcagcgacaaaattcttactgatgaagaactcggaagagtgttctatatgatgaatcaaaaaagggggtataagtcggcaagaagcgaagctaatatggataaaaaagacactgaatatgtagcagatgtaaagtccaggcacgctcaactgaaagaaagtaatcaaactatagggcaatatttttacggggaacttttgagagctaaagaaaattctgaatatttccaagtaaaaaagaaagtatatccgagagaagcctacatagaagaatttgacaaaataattgaagtacagaaggagaagcacaaatttctaacagacgatgtagttgatgaaattagaaataaaattattttttatcaaaggcatctgaaatcacaaaagggtttggtgagtttttgtgattttgaacttgtaaaaaaagaagtgataaatgaaaacggaaaaataataactaagatacttggacctaagattgcgccaaaatcatcaccattaaatcaactttgtaaaatttgggaaactgtaaataatatttccttgaaaattaaaaatccggagggctcaaaatataaatggagtgactggactcccacattggaaaataaaattgaaattgctaactatctaaatactcacgattctttaacattttcagaacttttaaaaatagtaaatttaaagaaggaagaagtttataccaacaagcaaatactaaaagggcttcaaggaaataaaacattctcagcaattgcaaaaattttaggagaaaagcatccgcttttgaattttgaaatagatataaagccacaagaaaaacaagcatttttagtagataggaaaaccggtgaaattttagaagagcacgcttcttatatagtcgatgaaaatattgaaaaagagccattatatagactgtggcatacaatctattcaatcaaagattctgaagaatgcaaaaacgcgctgataaaaaaatttggacattatattgaggaggaaaaggcagaaaaactttcaaaattagacttcactagttccggatatgcaaacaaatcgcacaaagcaatgcggaaaattctgccctatcttttgaaaggatacaattattcacaggcttgcagtcttgccggttacaaccattctaacagtttaacaagagttgaaaattccgaaaggtttttaaaggacaagcttaaacttcttaaaaagaacgaacttcggcagccggttgttgaaaaaattcttaatcagacgatacacattgtaaatgctataattgaaaaatacggaaggcctgcagagatcagagtagaattggcaagggagctgaagcaaagcaaagatgaaagaaatgatgcagacattcaaatctcgaaaaataataaacttaatcaggaaattgcgaagaggttacaggaattaggattgccgagcactaaaaagaacatacagaaatacaaattcatatttcctgtaagggataaaaaaataaccgaaggcaaggtatttaatcagtgtatttattgcggaaaaagtttcagtctttctgatgcgatgcgtggtgataattttgatatagaccatattgttcctaaagcattgctgtttgatgattctcagatgaataaagttttagtgcacagagaatgcaatgataataagggcaagcttaccgcttatgattatattgcatcaaaaggcgaagatgaattgaagaaatatttggacagagttgacacttggtataaccaaaatataatttcttatgggaaaatgctgaggttaaaagtatcgcacaaagaatacttagaaaggaaaagtaaaaacaagcaaacagaagccgataaaagactttgggaaaatttcatcgatagacagcttagagaatcttcctatatatcaagaaaagcaacagaaattttaaaaaatgtgtgcagaaatgtgagcacaacagaaggcggtgtaactgcaaaattacgaaaactttggggatgggataatgttttgatgaatttaaatattgaaaagtataggaaacttggccaaactgaaattgtagaatggacaagcaatttcggaaaagagcagcacaaagaagaaagaataaaaaattggacaaaaagagatgatcataggcatcacgctatcgatgcacttgttgttgcttgtacaaaacagggatatattcaaaggcttaacactttgaatgctagtgatacacgaaataaaatgctaagagaaatttctgacgctgcagttaagtataatgaaaggttgacattacttgaaaactatttgattgctcaaaagccctttacaactagggatgttgaagaagctgcaagtcaaattcttgtatctttcaagaccgggaaaaaagtcgcaacgatcagcaaatacaaagcgcagggcaaaaataagtctattggtgtcttaacgccgcggggagctttacacgaacagtttgtttatggaaaaattaagactatagattcagacaagccattaaaatttcttttcgaaaatgtagatctcataaaagatgaaaaaataaagactttgattgaagcgagaatagcaaaatacaatggcgatgggaaaaaagccttagcttctgtaaaaaagtcgcctatttatgtagacattgagacaaaaaaaacacttgacaaagcggactgctataaggacgaatatgttatcaaatataaaatccaggatttaaagaaaaaagacttacagtttattgtcgatgataaaataagggcaattctttctgctaagattggtgaacataatggaaatgaaaaagaagctttcaaagaaacagtgtggttcaacaaggaaaaaggaatcccgataaagacagtacggtgcaggacaggtctttcagcagtgcaaccagtgaagcaggatggaaacggtaaaaatattggctttgcaaaaacaggcaacaatcatcatatcgcattgtattacgataatgagcagaatattcatcagcatatatgcagcttttggcatgccgttgaaaggaaaaaatataaatttcctgtaattattaagaattctgcggagctgtggaatactgttttagaaggtgcatatccagaagattttttaaaacaattacctgataacaatctcacattaaaattttcattacagcaaaatgaaatgttcattttaggtctagaagatgaagattttgaatatgctataaggaataatgacaatgagttaattagtgagcatttatacttaacttggagtattgccgataatgactactggttcagacatcatttagaaactaaaaattctgacctgaaaaaaatagaaggtgctaaagaatccaaaagattttatcggttgacaagtgttggctctttcctaaaactaaatccaaaaaaggttaaagttaatcatttaggagagattataaaaattggtgaaaattaatgcgaatgctctaccgctctatctatatcggcaatccagcttacctgaagctgaaagattttcagatgaagattatttgccccgaaacgaaggcggaaaaaggaagcgtgccaattgaagacctcggtttgctaatgcttgatcattggcaaatcaccatatctcaccagctcatccagcatttgatgggcaataatgtggtggtcatttcctgcgatgcatcccaccttccgcacggcattatgctgccgatgtacggccatacagaacattccgaaagagtaaaataccagctggaagcaagcgagcctttgaaaaaacagctgtggaaacaaaccgtggaagccaagattcagaatcaggcagagcttctgaaaaggctgggaaattattacgagccgatgcttgcctaccgcagcagcgtaaagagcggcgatgctaccaatatggaaggcattgcggcgcagcattactggaagcacctcatctcgtataattttctgcgccatcgttttggcagttcgcccaaccagtttttcaatttcgcctactcggtattacgcagcatcgtggcaagggctatcgtggaaacggggcttttgccggtgctcggaattttccaccgaaacaagtacaatccctattgccttgccgatgatttgatggagccttacaggcctttcgccgatgcattggtgatggactggctcacgaaaaatccagaaggagaggagctaacgaaggaattcaaggcacacatcttgaacatcgcaaccaaggatgtaagtatagaaggtttaagaaggccactgattgtggcagtgaaatccaccgcaacttctgtttacaaatgtttcaccgccgaaaagcggctgatttcctatcctgaattttgtgcaaatgactgccgatgaattccgacagattcaatgcctaccgcattatgtgggtgctcgtgttatatgatttgcccgtggatacgaaggccaatatgaaggcggcgaaccttttccggaaaaggcttgtggacgatggctttgcgctgtttcagttctcgatgtacatacggcattgcccaagcagggaaaatgcggaggtgcacatcaggagggtaaaatccattctgccgaaagcagggaaggtggcgatactctgcattacggacaagcagtttggcgacattgaaatttttgaatccaggaaggaagaacttccgccgcccacatatcagcagctggaattattctgaaaatttcaattctaaaaacaaaagcaacccgctgatttttagcgggttatcttttgaggttgtgaataatcacaaaaataaaaaatctgaaagcaattcacaactgtttttacttagttccggagtgttctccagttgtgaataatcacaaaaataaaaaatctgaaagcattactaacaatataatccgtaactcagaaaaaaattattaggaacattttttctactttagccgggaaaaagcattaattttaagcaaatgaataacccgaaaaatccaatcacccagctcttcgggattcgctatcccatcattcagggggggatgatttggcattccggatggcgtttggcttccgcggtttcaaactgcggcggtctcggtttgcttggcgctggaagtatgtatcccgatattttgcgggaaaatattcagaaatgcaagaaggctacggataagcctttcggcgtgaatgtgccgatgctttacccaaaccttgaggaaatcatccagattattttggaagaaggcgtgaaaatcgtgttcacttctgcaggaaacccgaaaacttacacggaaacattgaagaaggaagggctgaaagtagcccacgcagtttcatccacaaaatttgcgctgaagtgcgaagaagccggtgtagatgcgattgttgccgaaggctttgaagcgggcgggcacaatggcagggatgaaaccaccacgctttgcctgataccgaatgtgcggcgcaatgtttccacaccgctgattgcagcaggcggaattgcaactggtgcacagatgaaagcggtgatgatgctgggtgctgatgccgtgcaaatcggttcgcgttttgcggcgactgatgaagcgagcgcgcacgataattggaagcagaaaattaccgagattggtgaaggcgatacattcctcacactgaaggaattagcaccagttcggctggtaaaaaatcagtttttcagtgagctggaagaaatttacaacagcggaagaaatgcggaaatccttcgcgaaaaactgggaagggcaagggcaaagcgcggaatgttcgagggcgatttggaaaacggcgagcttgaaatagggcaggtttcagcattgatagatgaaattttgcctgtggaaaaagtattcgaaaatctgctgagagaatttcgagaaaccgaagatatttccatctgatggaagaccgcgcattgctggatttgattgaagcggcgaagaataaagatcgcaaagcgcagacgaaactcatcaaccagtattggctaccggttttttcttttgtgctgaacaaggtgcaggatgaaaccttggcagatgaaattaccgtagcggttttttcaaaagttctcaacaaactggatctttatgatccaaattttcattttaaaacctggattcttacgattgcgcaaaattccgtaattgatttttggcgaaagcaaaaccgcaatcagaatgaagagagcttcagtgatttgaacggcatcaaaaacgattttgcgcgctcaccggaagagcttttaatttccgatgaagagcaggaaagaattttgcgtgccgtggaaagtttggatgctaattaccaggaaatcattaggttacggttttatgatgagaaaagcatcaaggaaatcgctgaagaattgggcatctccgtttccaacacgaaagttcggataatgcgcgggaaaaaaatcctgagcgatttgctgagaagttccgaggaaatttagcataaaaaaaccgccagtcttcggcggtttatttttcatttttaccagattttcacgcggtcttcaggtttccggtagagcttgtcgccaggcttaatgtcgaaagctttgtaaaaagcatcgatgttggtaagcggcgcaaaagccctgtaatagcctggtgaatgcggatccgtcttcacctgatttaccacatattggtcggtagatttggtgcgccaaaccgtagcccagctcataaaaaatctctgatcctgggtaaagccattgattttcccagggttgccgtggtccttcaggtaaagctgcagggcatcgtacgcaacgcttgcaccacccaaatcgccaatgttttcgccactcgtaaatttcccgttgatgaagctgcctttcaccggctcatatttgctgaactgctctgccagtgcttctaccttggcatcaaagtttttccggtcggtatctgtccaccagttattcaaatttccgtcgccatcaaaccgtgaaccgccgtcatcaaagccgtgcgaaatttcgtgcccaattaccgcgccaattccaccgaaattcacggcaggatctgccttgaaattgaagaacggcggctgaagaatagcggcagggaaaacaatttcattataactgcttgagtagtaagcgtttacagtttgcggcgtcataccccattcggttttgtccactggttttcctaccttgtccagcttgcgctgataatgccagcgcgaaatattttccatattgtcataaaggcttgcaccgtctttcggcgaattgatggtaagcgcagaataatccttccatttgtctggatatgccactttcaccgtaaatttcgagagcttttccagcgccttagttttcgtttcgggcgacatccagtccagttcctttatgtgcatttcgtagctcttcatcaggtagcttatcagttcttccattttttccttggcttccgcagggaagtactgttccacataaagtttcccgaaagcttcgcccaaagagccgttcaccatcgaaagcgcccgcttattcatcgcccgttgctctttctggccctgtagatatttcgcgtagaaattaaaattcacatcgtccgttctcttgtccaggtaacttgcattgctcgccaaaagcctgtatttcatatagtttttcatcaatggcagattctgctgattgatgaactggtcaaggttttggtaatatttcagctcaccgattatcaccctgtccgtttgaacgcccactgttttcagatattttggcagattgacatttttagccaaagtcccaagctctgccacagttttcggattgtagcgcctgttggcatcacggccttcttccaaagtaagcaggcttttcgccattcttttttcaaaatctacgatttgctttgcagcattggcatcgctaatctgcagaatatcaagcatttgccctacaaatttctgatattcggccagcgttttagcattagcctcattctctttttggtaataatctttacctaaaccaaggctcggcccaccaagataaacggcgttcatattggaatctttcatatccgccgaagcgtaccaattgtagaacggattatcgccagtcaatgtcgctttgttgatatatgattgaaattcagcaagattcttgatgttgtcgatttccgctaactgatttctcagcggagaaattccaagagcgttgcgcttattcaaatccatataggtggcatacagatcttgaattttttggccttcgctacccttcgcataagttttggaattgatgtcttccaaaatcttaagtgattgattgtcagtattttccctaagttcgttgaaggaaccccaacttgatttatctgccggaatttccgcctgcttataccaaccgccgtttacaaacgaaaagaaatcatcctgcggacgaacgcttctgtccatatattccaagttcagcccaacatcctgaatgttttcatttgattgattttcagcgtgttccgcttttgaaattttagtattttggttggtagcgcaggaattcagcgccagcattccggaaaaagccagtgcagccatcgaaagttttttcatctcaaaatcattttaacttccaaagttagtaaaaagagacaagagccaagtaaaaggcaaaagaaaagtaaatgttgtcacgctgggctagtccaagcgtcacagtttttaaaacgcaacgctctgtatttcagtgttttaataaaaaataatcaccgtgccgctgtgttttatttttcgcagaaaatccttttgtaactcactgattctcagtgtttttaacagattaaactaaaaatatgccgtgccgttgtgtttaaataaaatcttaccgatttttaccaagcgtcaaaatttccactaaatcctgcagggttttttgcgctacgaatgccataaaatctttccgttcatagtgcggcaggaaaagttttttagtgatttcaaaatccttcaccctgatggaataaaaaaccgtcccgatttcgttgccgtcctcatcgctcatcgggcctgcaacacctgttgttgaaatcgcaatatcggtgtcaaaaatttggcggcagccttcgctcatttcctgcgcaacctgctgagaaacaacgctgtaggtgtcaatcgtttgctgactgacttttaaaatctcaacttttttcgcggtttcgtacgccacaattccgcccttgaaaaatggtgaaatcccaggaatacttgtgattaatttcgcaatttcgccgcctgtgcagctttccgccgtggaaagcgtgagccctgaattgaaaactgccgtcgcaaaaatttccgtgatgctttcgccattccaggaaattacattttcagaaatcagcgggtgaagtttttccacttcatcgcttatttgcgtttttacttcgcgtccattttctcctaagcctgtgattttcagcttgatgcgattgccaatcggtaagtaagaaaggctgagatttttgggcaaagccaattcccaagcttcgattttttctgccagcaaactttcgggaatgttcacaagtgtaagcgttcgggaaatgatgaagttcagctgatgctcgtttttcaggtgtggaataattttggtgcgcatcaaagccttcatttcagaaggaattcccggaaggcaaatcgcagttttaccatctttctgcatcagcagggaaggcgctgtgccgtagtcatttagaaaaatgtgcgcagatttcggaatttcggcttgcggtctgttcagttcgagcaaatgttcgcggtttctttgcttgaaaatttggcggagattttcgaaagtggcttcatcgaaaactagttcatcaccgaaaaattcgacaaaagccatcttggttttgtcgtctcttgtagggccaagtccaccggttgtgatgatgaggtcattcttttgaaagccttgctgcaaagcatttttgatgacttccatatcatcggaaatcgtgcggatttcagaaactgcgatgccgatggatttcagcttctgcgctataaaattcgagttggtatccacggtgcttccggagagaatctcatcgccgatgcttaggatgcaagccttcatcatatttttggaatgtaggactaagttagcgaaaatttataattttgtatttagaaggttatgaagttttgaggtggcaattaattcttcggttaattttactgtcaattttaacccattaacctcagcgaaaaaaatcaattaaaaaactgttcggaatttctgatgacggagaatgtgacggaaaatgcggtgcagaaaccgaagtggattcgcgtgaaacttcccacgggaaaaaattaccgcgaactgcgaagcctggtggataaatacaagctgaacacgatttgccaaagcggaagctgcccaaatatgggggaatgctggggcgaaggcacggctacatttatgattctggggaacatctgcaccaggagctgcggtttctgcggcgtgaaaactggaaggccgttggatgtgaactgggatgagccggagaaagtagcccgctcgataaagctgatgaagataaagcacgcggtgctgacttccgtggacagggatgacctgaaggatatgggctcgattctttgggcggaaactgtaaatgccgtgcggagaatttcgccgggaactacgatggaaacgctgataccggatttccagggcatacataagcatctggatagagtggtggaagtggcaccggaagtgatttcgcacaatatggaaaccgtgaagagactgacgcgtgaagtgcggattcaggcaaaatatgagcgaagcctggaagtgctgaagtacctgaaaagcgcagggcaacgccgcacgaaaaccggcgtgatgctgggtcttggcgaagaaaaacacgaggttttccaaacgatagaggacatccgcagtgctgatgtggatgtgataacgctggggcaatacctgcaacctacgaagaaacatctaccggtgaagaagttcataacgcctgaagagttcgatgaatacggagatttcgcgagaagccttggcttcagacacgtggaaagttcacctttggtgagaagttcttaccacgctgagaaacatatacattagttcaatgttttaggtttaaagttttaaaaaaccgcgctgagaatttcagcgcggcgtttttattttacaattttcatctcatcgagaagccatttcgaatcagcaaatttatccacgatgaagagaatgtacttggtatccaccattatgttccggctaaatttcggatcatagttgatgtcactcatcgtgccttcccactgtctgtcgaaatttaaaccaatcaaatttccgtaggcatcaagtgccgggcttccggaatttccgccggttgtatggttggtagcggtaaatgccagcggaacatcgccggttttatccttatagattccgaaatccttacggttgtaaaggtcgataagttttgccggcacatcaaattcataatcgcccgggatgtacttttccatcacaccagacaaatgcgtttggtagttgtaatgcacggcatcgcgcggatttgaacccttcacctgaccataggtaacgcgcaaagtggaattagcatccgggaagaactgccgctctttatctgtcgccatttgctcagccataaattttttctgaagtgcatctatctcgttttgcagtgcggcaaatttcagctcggtggtttgtaaataattattcttaatttctgccgaaagcttaatcagcgggtcgttttgcagattttgcagcagggaagggttcgctaaaaatttatccaaatctgccgttgcagaaatgccgttcagcgaagttcttccggtaattagcgagtttttagacatttcttcaatcgcctgaagattgcggttttcatccttgtactgtgcaaaattttgcggcaagaactgctgcggaatttggttggcatacagcgccagaagtttcgccgtaaccttggcatccagctctgcatcgtagtttcggtagattcttttaagccggctcttcaggttgttcagcgtttctgcatccaactttccgctttgcgaaagattgagataagtgctgtaaagatcagcaatcgccaaagtttcggcattgcgcaaaagctcaccgtaataggcgcggtgcaaggcgtagggtgcctgttcgttgtatgccttgttcagcccgtcaatcgtggttttcattgccggatttttggaaatcaatttctgctcgtaaaccaatttcttcccaactgcgtttgatttcttcaggccttctgcttcgccaatccactttttccagtagttggctacggatgcatatttcgaagcgtatttaattctcgtggcatcgtccgcccgcattttttcgttcagcgttttcagcgccacatcccgtacggaaatcatcgcagggtttatttccgtcattatcttctgcaccgcaattgccggcaggtattcctgcgttcttcctgggaagccgaaaacgaaggtgaagtcgtcctcgtttttatccttgatggaaaccggcagaaaatgcttcggcacatatggcacattatccttgctgaattccgcaggcttgttgttcttatcggcgtagattcggaagaatgcaaaatcgccggtatgccttggccaaacccagttatccgtatcactgccgaactttccgatgctttccggtggtgcacctacgagccttacatccttgaaagtttctatgatgtaggcgtaatatttattgccgtagtacatcggcttcacggaaaccttttggtacggctcggttctgaaagattgcgaaacgcgctggatattagcgttaatttcattttccgtcaaatttgtagtcggcagaatttgcgctgtcacatcaatgatatccacgatgaaatccactattacgccagggtttggcaattcgcccgccatatttttcgcccagaaaccgtttcgcaaataatcattctgaacggatgaatgcgactgaatttggccgtaaccgcagtgatgattggtgagcagaaggcccttcggcgatacaatttccgccgtgcatccaccgttgaactgcaccactgcatcctttatcgaaggcttgtcccggctgaagatgtccttcgccgaaattttcatgccaagctgcttcatttccttttcattcagttcggtgggaatccacatcccgccgtattgctgcgcgaaagcaagcgccgccgcaaaaatggccggtgcggaaaaccatttcattttcgtcataaaattcaattttgcataaaaatacggaataatttttgaagcataattcccacaaaaattttacccaaaaaattggaacttcaccatcagattctctacctgcttttgctcgcgattccggtagcct

SEQ ID NO: 1720 - DNA, 23783 bp, synthetic construct
  source 1..23783: mol_type = other DNA
  misc_feature 1..23783: note = Synthetic
catactggtacgactggtcacatacaagggctgctggcgcactccacgatctttgcgttttgctcgttccctgaactggttctgaaccatttgaccaaattcaatgctttgattcagatgggcattttggtataaagtaagggcaatatatgtttctggcttggtaggatcaaagccttcgtagcgcactttgtagtcgtcttccagaaaaattaccgaattttcctgaatggctacgcgcatattctcttcgctgtgattcatccccattacgaatgtcgttgctccaaaggctacaggtgaggtgtaggcatcgcagtggatgctgataaaaagatcggccttgacacgattggctatgttggtgcgctcatacagcggtacaaacacatcgcgatcgcgggtgtaaacaacttttacgcccggcagattttcctggatgtatttgccaactaaaagtgcaacttcgagggaaatgtctttttcttttttttgttttcttcctgttcctttgtttccagtatcgtagcctccgtggccggcatcaattactaccgtgcggatggttccatcgctggacaaatgaaatatttcaaatccaggcagaaaaatttccataccgactactactgcaatgaatttgaaatatttgtgaattttcataagcttaagagcgccaatcttaaccaagattttcaaaattcgttcctaatacaaaatacttttgcccgttttaatcacgaactctttccaaaattagtagctattaacttacagatttctgaaaatatacacaacttttcaacgctgctatgtgtgttgttccttctgatgatgggaaccactgcacgtggacagtcaaatgattcgctggtggtgccggcgtcacttggtggctcaaaacgggtaatcaaaacttcaaaaaccttgctcgatgtggtgaaatacacagccgatgacaccatatcgatatcagccaccgataactacgccttgctgtacaacaacgctcgggtggaatacgaaaacatctcgcttaaagccggcaaaatcatcatctacctcaaaaccaacgaactggtagctatgggaatacgcgactcagcaggccgagtgattcaaaaaccggtatttaccgaagacggcaagtcgtataacaccgatacaattcgctataacttcgacaccaagcgggctaaaatcaaaaaagttatcactcaagaaggcgaagggtttctgcacggtgaggaagtgaagatgatggaagaccaggtgctttacatccgaagagcatcctttaccacttgcagccacgagcatccccacttccgcatcgtaacgcaaaaaacgaaagtgatccctggcaagcaaatcgttacaggaccggcttttctcgaaatgctcgacattccgactccagtgattgtgccttttggttttttcccgaccattcaaaagcaaaaatctggttttatactgccgggctacaccaacaacgccgagcgcggatatggcctaacgaatctcggcttttactgggcagcgagtccgtactgggacatgcaaatctctgccgatatctacaccatgggcggttttcagctgcgcacggccaaccgctatgcccgccgttataaattcagcggtaatgtaaacatgaccctcaatcgactgattgtaggtaagcctatctatgctgaatttggcaagtacattaatcaaagcgactttcaaatcacgtggtcgcacgctcaagaccccaaggctcgtcctgatttaaattttacagccaacctcaacttcgtaaccaccaatttttaccgcactagcaccttccagcaaaacaacgtactgaacaacaacatcggttcgtccatcaatctggtaaaaacctttccaggcagacccatttcgctgaacataggtgtaaaccaccgacaaaacctccaaaacggccgtgtggacttaaacttgccagaactggctctcaacatcacacgggtattgcccttcaaaaagaaaaatgccaccagactgccccgctggtacgaggagataggctttaattactcgctgaacttcagaaactctgtatcattcattttggattcgatcggagccaatcctttagaacaacttttaaaaaggtccgttaacggcatcagtcatcggatacctttttcaggcaactaccgcattttgaagcatattacaatggtgccctcctttagcttcaactcgaggtggtatttccaatcgtactcttatgcatacagcgactcgctcaagcgcgcagtgataacggatacgctgagaggttttagtatgctcaacgacttttcgacttccgtacagttcagcaccaagctgtatggaattttcaactacaagtacggacctctaaaagccttgcggcatgtaatgacacctcgacttggcctgagctatacgcccgacttcgcttcgcccagctggcgaggatttgctggtaatccttatcaactcgtacaagtggacaccagcggaaagctcggatttcaaaaccgctttcaaggggcagtttttggcacgcctggcctcggtatgcagggattagtgagctttgggctcgacaacattttagacgctaaattcaaaagcaaacgcgactcgacaggcgaaaccaaagtaatgctgatcgaaggtttttcaatcgacggaaactacaacatggcagcccccgactacaagtggagcattgtaaatgtaacagcgcgcacctctctcttcaagggcaaattgaacatcaactatactacttctttcgacccttattcccttgattcgctcggcaatcgcattcctgtgctcgaaatcgataaaactggccgacttcttcgccagcaggctaccacgctaaacctgggcacgagcatcagcagctccaccttcgaccgttggtttggaaaatcggcggaaagcaataaggacaattccgcaggctcagtgccaaaggacgacttcaacccggcaggtgttacggctggtgacatcaattactacagtccggtgacctatgtggactatatggctaagtggtcgctatcagttaactatgctttggccattagccccaatccagctcttggacaaacgaacattgtacaatctatgatgtttagcggcaacatcgaactcacccaaaattggaacatcaatttcaactctggctacgacctggtgcgcaagcaaatcggttttacaaacatcaatattactcgaaatctccattgctggaatttatcttttagttgggttccggttggctttcagaaatcctatttcatcaccatcaatgcaaaagcaggcatgctgcgcgacttgaaattcgaccggcgaaggggtgttggcgacttcccggcggtattatgaagatgcgagcgtatggaaattttggctctcaaggaatttttagatcaaaaagcccactactacgaaagcgaaatatttattcccgacgatcctgtttcggtaccacatcgctttcggctgaaaaacgacattgaaatcgccggattgctcacagccaccatcagctggggcaatcgaaagtccatcatcaaaagtgctaattttttaatgcaattgatggacgacgccccgtatgactttgtgatgcatcattcaccaaaagaactgaaaagactctctcgatttgtgcatcgcacgtttaatgcggaagatgctctatttttcgttaaagcactgcaccagtactatcagcgattcgacagccttgaagaggcttttttaccaaaagagggcgaaaaggacttaatggaggctattgctcggtttcgccagttgatgctgcagctgcagcccactactcgaagtggaaagcacatagccgacccctccaccggctcagctgccaaacgcattcacatgtacctgcgatggatggttcgcagcgaaaaaggaggtgtggacttcggattgtggaggagcatctcgccggctcttttgagctgtccgctcgatgtacacaccggaactaccgcaagagctctggggctcattacacgcaagcaaaacgatcgcagggctgtggaagagctggacaaggtattgagaacttttgaccccatcgacccggtgaaatacgacttcgccctttttggaattggaatggaaaagaaaataaaactttaaaggtcggttttaaattctcacggcatcaggcactaagagggtgtaatcaccaccgttgcgaataacatctcttacaatgctactcgagatgtacgaatgccctgaggaggtgagtaaaaaaactgtatcgagctcgggcattaacttccggttagtttgagcaactgctttttcgaactcgaaatcggccggattgcgaaggccgcgaaggatgaagcgcgcgtttaccttcttgcaatagtttactgtaaggccttcgtatgaatcgacgcttatgttgctgcgcttttcaaacgtcttgcgaatccactccatgcgttgctcaagcgaaaacatgtaggttttgttggaattgacccctacggctacaatgatgtggtcgaaaagctcggctgcacgacaaatgacgtcgtaatgccccttagtgatggggtcaaacgaccccggaaaaacggctatgcgctgcattaggcttggcgttttaacgcgttaaaaatacaggctgaaaatagttcaggcagcccaataccgagataagcggcttgacgcggtaagatggattgctcagaaaggccgggtaccgtgttgatttcgattaaaactggatctgatctgtcgggcacgatgaagtcaatccgacacaatccgcttaaattcagcaatttgtacacttcttctacagttcgcttgatgtattctgcggcttctggacgtatgcgtgccggggtgatttcttgcgacttgccactgtacttggcgttgtaatcaaaaaactcacctgccggcactatttcggtaatttctaatgctctgacttcaccaaaaacgctcgttacaccacacgacacttcaatgcccttcaccatctgctcgatgaggatgagcttatcgatttggcgagcaacttcaatggctttgggcaaatcatcaggagtagtcacttttgatacgcctacactgctgccgctttttgcgggttttacaaaaacggggaaaccaagctcctcccctactttttgaggatcgacagcttcagttgtataaatgcctttgggtaccatgaagcccatttttgccaagtaagcattgcactcggctttgctgaaagtgagggccatgggcaaaacgccaccggtggtatagggcacgcgaagcatatcgagcataccttgaacgatgccgtcttctccaggcgtgccatgaatggcaataaaggctacatcgaaagtgtactcggcatcctctgtacgaaacccaaacgggctcagcacagctggaacttcgccttgtagggtttggacgaataatccatcagtgcgaacatcaacgaggtatttatcaaacgtatctgaaggcaaatggtcgaagacgacttttccgcttttgagggagatttcgcgctcggcgctatatccgccgtagagtactgctacacaaattttctctgacatgctgtttgctcagtaagtggcaacaaagctatacagcggtcagtgatggtgcactgtggagtgaagggtgtgcatggctgaggctttaaaaagataaatactcaaggtagtttgaggtcgggcatttggtctccttgagaaaaataaagtgactataagtggcaaaaatctgattgacaacggattggaaagtttcaacggacgaaaatgaggctggaggagccagtacgcgcgtggaactgctgaaacgatttggactgttccttttgagagggataaaagcgaatatgagcgaatagcaacagacaaagtcagctatcgctgttgtgtctgggtaaaccctcccaaaaaagaataaaaaagtatggaatttccgctaactagcgggaaataaaaaaagccgcctcaacgggagacggctttgagcaagaaacagagtgttttatttcttggcaaacattcgactgaccttcgtggcttttgggccttcggagtagtcgtaaaagccttcaccactcttaacgcccagtttgccggcagtgaccatattgataagcagcggacagggtgcgtacttaggattgcccagtccgtcgtgcagcactctaaggatagctaagcacacgtcgaggccgataaagtcagccaactgaagtggacccattggatgagccattccaaggcgcataatagagtcgatttcttcaacgccggctactccctcgtgcagcgcgatgatagcttcgttgatcatcggcatcaggatgcggtttgatacgaagccggggtagtcgttacacggcacaggtatcttgtcgagggctttggagagttcggtgattttatcggtagtttcgtcggaggtgctgtagccgcggatgatttcgaccagcttcatgataggcacgggattcataaagtgcatgccaataacacggtcaggccttcgagtggctgcagcaatgcgtgtgatggaaattgaagaagtgttagaagctaagatggtgtgctctggagtactggcacagaggtcggcaaagatgcgcagttttagatccaggttttcggtagctgcctccactacgaggtcggcattggccacgccggcttttaagtcggtgaaaggagttatgtttttgagggcttgttctttatcagcttcagtgatggtgcctttagctacctggcgatcgaggttttttgcgatggtggcgaggcctttctgaaggctggcatcattgatatcgatgagcgatacgctgtatcccttctgtgcaaagacgtgagcaatgccattgcccatagtgcctgctcctactactgctatgtttttcattccgttggcgattgttggtttttaagatatcggggcgctaaagtactgtgcatttgagtgctatgataaatgaactacaatgtcaagtgcacatcaacggatgcggtcgggattggagcgtataaaggcctcccaagagttaccgcctctgctagaggggagggtttgttgctgataaatgtgggtaatagctacagcgagggcatcagtagcatcgagggtggctgcagtggttggcaaggtgtactgagccgctaacagggctgccacttgctccttagtagcgctgccacggccggtgatgctctgtttgatctttcgtggagaatactcggctaccgataatcctctgtacagtgctgctgcgatgactacgccctgtgcgcgacccagtttgtgcatcgattgcacgttttcaccgtaaaagggtgcctctatggccaattcagtaggtgtgtagctgtcgataatgtcgaggattttttcgaaaatgatttttaaccgctgtaaggcatcagcttcagagcgcaaccgcacgatatcgcaacttgtaacagtgattttgctacccaactgttcggctatggcgtagccaagcacctgcgtaccgggatcaactcctaatattattttttttttaagttccatttaattttttttgtgaattactacttttagctcgtggaatgggtcatactttccatcacaagtatttcatttggttggtatctgtacctcttttataatggtagtaactacctaaaaaacagagatatagatagccaacatttctttataaacagcacaaaggtaaccatcgtcattccatttcgcgatgccacggaagaattgctcctgtggctcaatgcctttgaaaaagtgaagtatgctgaaaatgccgagatactactcattaacgacggctctgtaaacagccttttaaagctgcgcaagcgaatacccctttaccccaatgtgcgcctaatagaccgcagccatcaaggcaagaaaaaagcaattgaggtaggtgtaaaccttgcttcacacgacatcattatctgtacggatgccgatacagtgcctcaacaaaactggatagccggcattttggcctgcttcacctcagatcaagtgcaaatggtctgcggtagggtgattccttccggaggatattggctggctcaaatcgactttttagcgctaatggcagccagtgaagtgctgattaaaaagaagctaccagtaatgtgctcgggcagccatatggcatttcgcaagtcagcttttaaagctgtagaaggttacacaggttatttgcactttaaatcaggcgacgatgtcattttgctccacaagatcaaaaatcacttcggcagccaaagcataggatttaacgactttacacaagcaagtgtgcaaacacctatgcccgatacggttggtcggtttttgagtcagcgacagcgctggggtggcaaggcggttttttatcgcgatggtttatcgattagcctcgccgtggtagttttgatatgcgccctgatgacctatggcagctttccagtgttttggcacaatgcatgggcattgggcatttcagtaattctgattgctgctaagattctgaccgatgttgtactgattaagtcgtatgccaacgaaatgagcgttccagtcaaaagcactcaactcgctctggctgtattgctctatccggcgtatattgcgatagtatttatgcggattctagtgaatccgaatccgagatggtaataaattcgacgatctcttgaaacgcattttagcttcccgcccttcttatacacatttctacgcccgtaaaaacttctggaaagtcctcttgctcgcatttatgctactgattggaggggcaactctgtactacaccgaaaatttggccggcgccctgcgcgaagaagagcgcaagaaggtagaactctgggctgaagccatcaacgtagctgcctatgccgaacccggcgaagacctcaatctggccaataaaatcatggtgacaaacaccaccatacccattatactagccgatcaaaacgacagcatcataagctacaacaatctgtcagaacaccagttgcgccacctgcccgaaacgctgcaaaagatgaaactcaagggcaatcgcatcgccatcgatctgggcgatggactggtgaatgtgctctactacgacgaatcgaaactgctcacccaactgcgcatttacccgcgtatattgctcggcgtcatcggctctttcatgttgctggcctatgtggccttcagcagcgcccgcaaggccgaacaagaccgcgtatggaccggcttagccaaagaaactgcccaccaaatcggcacaccgctcagctcactgcttggctggctcgagatactcaaaatgggtgaactcgacccacagatggtcgaggagatgcaaaaagacctcgaccgcctacagaaaatcaccggccgattctctaaaatcggcagtcaacccaccctcgaagaaggcgacctccgcaccgtaatcgaaagcagtaccctatacctcaaagcccgcatcccacgccgggtgcacattctgctacagttgcccgacgaacccgtggtgcttcgctttaatcctctgcttatggagtgggttctcgaaaacctcatccgcaatgccctcgacgccatcgaaggcgaaggcaccatcaccattaccctgagtaaaaacgacaaacgcgtagaactcgctgtagccgacaccggccgaggcataccgcgccatctgcacaaaaccatctttcgccccggctacaccaccaaaaaccgcggctggggtctcggcctttccctcgcccgccgaatcatcactgactaccacgacggcaaaatcttcgtcgctcaatccgagccgggcaaaggagctatgttcaaagtggtgctgccggtttaatcatttttaaagacatttcattattttaaaataattttaattttgtgaaaatatcaacttatgagctgtaaaaaaattttaggtcttgatttaggtgtaagttccattggatgggctttaataaaagaagaaaacgagaagccaaatgaaatcattggaatgggagttagaattattccgctagacaaagatgaaagtgatgaattttcatccggtaataaaattaccaaaaatcaaaatcgaacatcaaaacgtacagctcgtaaaggttattaccgctacgttttaagaagaacggcattaacagctgaattaaaaaagcacaacatgtttgatgaacagctttttaaaatatctcaacttgaattatgggagttaagagccaaagctgttacagaaaaaattagtttaaaagaattaggacgtgtattatatcacctcaaccaaaaacgtggttataaatcttcgcgcagcgaagaaaatgcagataaaaaagatactgattatgtagcagaagttaagaacagatatcaattattaaaagaggaaggaaaaaccattgggcaaaagttttttgaagaactttcaaaaaacaaacattaccgaacaaagcagcaagtatttccccgtgaagcatacatagaagaatttgatgccattatgcaaaaacaaaaggaattttatactgatgttttaactgatgcattgatcaatcatttgagagatgatatcatatattttcagcgaaaacttaaatcacaaaaaggattagtaagtatttgcgaatttgaaggatttcatgtaaaaaataaagatggtaaagaaatatttacaggaccaaaggtagcacatcgaagtaatccattattccaggttgaaaaaatatgggaaacaataaataacatttctattaaagataaaagaaacaatgaatttccgattagcttagaacaaaaacaaaaaatctttgaatatcttgacaaccacgaaaagcttagccaaacagaactttttaaaatacttgaaataaaagataaaagcggatggtttggcaataaaatgttaagtaaaggtttgcaaggtaatctcactaaaattgccataaaaaatgctttaaacaatgatgaattagctaaaaagtggctaacttttaatttaaacattcaaccaaccggaagcaaaacatatcaatataatcccaataccggagaagtaattaaagaaatagaagcaaaaatagtttccgaaaaatgcattaatgagcccctttatcaattgtggcacaccatttattccatatccgatattgaagaatgtaaaaatgcactaattaaaaaatttggttttgataatgcgactgccgaacgccttgctaaaatagattttacaaaacaatcctatggcaataaatcgcttaaagccatacgtaaaattttaccttatttaatggatggttttaaatatagcgatgctgcatctattgcaggttataatcattccaactcacttaccaaagaccaagttctagctcgtcaattattggataaaattccattgcttcaaaaaaattcgctacgccaaccggtggttgaaaaaatactcaaccaaatgattcatattgtaaacgatataattgacgaaaaacgcggttgggtaacaaaagaagaaagagaaaaaggactgtttgaaattagaatagaacttgcacgcgaattaaaacaaagcaaagaagaacgaaacgaaacctttaaaaacattaataaaatagaaagagaaaacaaagaaattgaaaaacgcttgcaagaattaggactaagagccacacgaaaaaacatcatcaagtatcgcttatttaacgaaataaatggagaggataaaaaagtaaatgccatgtgcatttataccggtaaaacattctcattgactgatgctttaaagggtaatgaaatagatgtagagcatatcattccaaaatcattactttttgacgactcgcaaagcaacaaaacactcacctttcgatggataaaccaggaaaaaggcgaccgcacagcttatgattacatggcctcaaaaggcgaagcggcattaaatgaatacatcgaacgagtgaacaaactttttaaggatggtattattaaaaaagcaaagcatgataaactattaatgccgggcgataaaatacccaaagattttattgaacgccaattacgtgaatcgcaatacatagcccgtaaatcaagggagattttgacacaagttgccaaaaatgtatggagcacatcaggtagcgtaaccgaatatatgcgcagattatggggatgggacgatgtattgatgaatttgcaaatgcaacgggttaaagaaattattcccgaccctttagcagaaggcattacagaaattgtagaatgggaaacccacgatgggcaaaaacatcaaaaagaagtaattaaagattggacgaaacgcgatgaccatcgccaccatgccattgatgccctaacgatagcttgtacaaaacaaggttatattcagcgtataaatacattaagcgccaaagctacacgcgatgaattatataaagcagtgagcgaacgaaaagaagaatttcgagaatccttatcattgttagacaaatattttatcagtcaacggccatttactacaaaagaggttgaaaacaaagccgcagaaattattgtatcatttaaacccggaaaaaaagtagccacctggggcaaacgatttatcaagaaaaacggcaaacgaatcaaagtacaagaccatatacttgtaccacgtggccccttaagcgaagaaagtgtgtatggaaaaattaaaaccattgaaaaaaacaaaccggtaaaatacctctttgaaaatcctcatctcatctttaaaccttacataaaagaattagttgaaaagcgattagcagaacacgaaggcgataccaaaaaggcattgggctcactaaaaaaagatcctatctatctagacgaaaacaaaacgatacccttgcaatatggcacttgctataaagaggagtatgtattgaaatatcctttaggatatggtcaaggttatctatttagcgggaaagaagatgataagaaagcattaaaagttatagaatcaatagttgataaaaaagtaaaacaaattgtcaaagaaagaatattcccaaataataaatttgttccaataaaagattctttaaataatttagaaaagaatccaatttattacgatattctaaagaagataccaataaaaactgtaagatgttttaccggcctatcagcggttgaaccggttaaatataataatgatggccaacctattgcctttgtaaaacccggcaataaccaccatattgccatttacgaagatgagcatggcaataaaataccccacttgtgcaccttttggcatgcggtagaaagaaaaaaatacggaattccggtaataattgaaaatccaaaagaagtatgggataaaattttaaacgataaagaaaaatatccgcaaagctttctggaaaaattgccgggagataaatggaaaattcatcaatattttcaaaccaatgaaattttctttatacctaatgcagagaaaaatttgaagtatagcgattgtctttacagattgcaaaaaatgagtattataggtaatcaaattaacttatggtttagacaaatttttgaaacacaaattaaagacgataaattatctagtaaatccctgcgattctacaacgttcaaagcatcggtgctttggaaaaattaaaattgcaaaaaataagggtagatagacttggatgtataataaaataaaaaagggtgagttaccccaccctgtctgtttacacaacggtcatttaagaccttattgtgatttgcttcttcgcaaaggtacaattttttttaaatcgacaaaggcgcatgggagaaatattcacccatactcctatgttgaaaaatgtaatttcatagtactactgcgatttgctttcaatttttaatatttttaggtttttgacatcctcaaccgcctggcccccaccatactgtttaaaaaaattatgatgctgctgtgggccgaatttggcgagcgcttcggcatgcccctggccaaggcccgcaccaatacacgcgaccttaacgccgtcatcaagctcgaaaacttcctccgccagatggcctctaaaagctacgccatcatcgacaatgccgaagacctcgaatttatagaaagcgtaaagagcgacagctacaatgtgttcgacaagatgatcgagcgatgcaacagcgaaatgagcaaagccatccgcctgcaaaccctcaccggcgatgccggcaaccgcggagcccgatccctgggcgaggtgcacctgctggccgatgaagacgtggccgaatacaaccgcgactacatcagcgacctgatcaacgaaaccctgctgccccaactggcgcagcacggcttcgccaccgaagggcgatactttcaatacgtcatcgccaagcaggtgagcgatgagcaacaccggcaggatgtatggctcgaccaacactttgaaatagacccagagttctgggccgagcgctatggcgtgcccatcagagggcgcaggcagcagccgggggcgctgcccgccaatgatgtgccggatgccaacgaccgccaaatgatgggcgcggcttccatcctgaagctacatgccgacctgcaccaattataccaccaaccccaccaccactgcaccgatggccaaggatgcactcaccgataaacaatggaatgcgctggtggagcgtttggcgcaccggttgtggcaaaagcgccacaaagggcttattgacccggccaccacccgcgcccacgcccaaaagctcatggaagccgtgcagcaagggctgggctatggctatgccgatgacctcagccccaggcaggcgcaaaccctcaccgagttgcaacgcaacgtgtaccatttcagtggcgccaaaaactggcaccaactgcgcgaaatgagcgccctgcttaccggtgagggcaaagcccggtcgtttaacgagtttttataaggcgtaaaagaaattgatgccacctacaatcaaaactacctgcgtgccgaatacaaccacgccatcgccagcgcgcagatgaccgccaagtggcaacagatggaagccaatgcccatgccctgccctatctggaatacgtggccgtgatggacgggcgcacccgcgaagagcaccgcaagctgcaccacatcgtgcgccacatcagcgaccccttctggcgcacctggtacccgcccaacggctggaactgccgctgcagcgtgctgcagttggacgaagacgaagccgcaggccgacacacccaaccactacccacagaaatgccccccatacagcccatgtttcgcaccaacgtgggcatcaaccccatggtgtatagccacaagcacccctattttgccaccattcctgctacggtgttggcaaaaattctggaggcttcgggcgagttgcaaaagttcaacccggaaaggctgggtgttttgctgcttgacagatctaagcagtttaccccgctcgatgttcccggaaggcgaggtaaagtgctgttgcacaaacttgtcaatacccatgcgagcgactatgaagatgtgttagccgaggcaatgtttaaagcatcacaaggcaataccgtggagttattacctgaactaaatacagaagaagtggaaattttttacaaaaaggttttccctaacagcaatcatcatggcaagcaccctgactaccgactaaactttactgactatgctgatttaaaatggcccacaggaaaaggtaaaaacacttttaagaacaacattggcagcgcagctaaacaatgcgaacacgctattattaagttgcgccaagttcaaagttggaagcaactaaaatctgcctgccgcttaaaaatggaaaaagattacaaacacctgcaatccgttgaaataattaacgggcaattgcggagagtttatacaagaaaaaagctgggcttgtaaaaacccagcttcaacatggtgccaagccttaggctcgactccacgttgcaaatatacgaacaaattttttaaaagttcaaaaccccaaaaaatatgcccattaaacacagcgggctaccgcccgaaaaatggatagccgaagcggttgtgatttgctttcaatttttaatatttttgggtctttgacattactatatcaagtaagtattttttttttgcgttgtgatttgctttcaatttttaatatttttgggtctttgacattgttcttacataaccttttcgtttttcatatgttgtgatttgctttcaatttttaatatttttgggtctttgacattacacccgccggtaccattttatttaactatgttgtgatttgctttcaatttttaatatttttgggtctttgacattaacctattacggatattaaaattacttttgttgtgatttgctttcaatttttaatatttttgggtctttgacattagaactctatttataaaactgattatcaaagacatgcgctaaaaataggattcaaaatccgtcgccattttggcttcggattttgaatttaactaaaaaaatacccttctagattaaaacagttctaattggagttgtaccaccctttgccctggatttttctctgcttttttctggccgagtaaaaattccatcattccaaattgcttatctgtaatttcaaaaagaataatgtttcctttttcgggcaagatgtttttaacacgcttcttgtgtacctccaggttttcgcgactggcacaatgcctggcatagatggagtattgaatcatcataaagccatccttgagcagttctttgcggaagagggaatatgcctttcgatcggctttggtattggtgggcaaatcaaaatatacaaacagccacatgactcgataggcatttagtcgggtattcatctgattacaacatttcaggatagagcatcttgcgcgactctccgccaaagcatgcaaccaaagaagcggatgtgcgctgtgtggcaatcatcagggggcttttctgcccgtcaataagggtgtcgagggtggggatcaccagcaattcttttttcagagctgtggtgagctgttcaggaatttcgcgtagttgggagacaatgtttagcacgacctgatccacaaaaggcctgtaaggttccatgacatcgtcggccagacaaaagggattgtatttgttgcgatggtagatgcctaccatcagcaggcagccgctggcgctcaggcttcgggcgactactgcgcgcaatatggcgtatccgtagttgagcaggttattaggcggtgggccatttcgatggcggttggctttggtctttaggtactcaaaatacttctcccagtagtaggaagctgctttggcctctacatttcctttatcaccactggtcacttcagaggcccatcgatgcataggtgtgctatcgataccgatcgatgtgaggagggcagcctggttgcgtatttttgaaactaccgtctgtttccacaaatttttcttcagtggttcggaggcttcaagctggtagcgcactttttcagtaaaggtgttgttctgagctaagggcatcaacagaccggagggcatatgtttctcgtcgcaacagaggatgcaagcattgttgtcaattaaggaggcaatgactgactgagtgacagtgatttgttggttttcgagtattacaaaaccaatgtcttcaacaggtacctgatgcgtggtaccttgattttttaaatcaatgataagctgcctatttgagatgtggaggtaggctggttgcgtgaaaaagagtgtttttttaatcatggcaaaaaagttatgaacaatatatgttcataaactgagccataattgttaataaacattgaacgacattaaaattgtttgtgaaaaccgacttttttgcagtaacataaaaaaaaccccgcccaaaaacagggcaggggtttttaaaaagggttatgacagttagtatatattggccggatttcggaagccggtctggttttggaaccagttgggaaactgtactcctccgctttgtgcccaaggcacaaatttcaaatgagcgtcgatgatttgtgccttctcaatgggatagtcgaaacgctcaacgatattaatcgcccagggtaggttgttttcagtcacataatatcgaccgtttgatggtatggagttgtcatgaccggtaccgagcaatgcctggttggccagtgctgtgggggccatatttggcagatgcacttcgcgtccacgggtgaggtttacgaagataaagggattgaagtttgcgatgtttaggtcgttgtaggtgtagactcctatggggaaggtgatcagaattcgggtggtatccggctgcacatagggagcgtttggagtggtgtttacacctattccttgtccgggatgggtcatgagcttataggtgttgtcatatacgatgatggtgggcttgttttgaccggcttcaaatccattggacattagagtgatgatgccttcgtgcagcttgctgcctgtggcagttagttggcttacattcagtgcattggtattaaactgaaagccaaaaccattggaaaaccctgccccaaatgctctgaggacgaaagtggcttctacctgagtgactttgttgtaggcatcagtggtgattttgaagcggtaatcgattacggcatcgttgaagtcatagtcacccttgaacggccagagatcttcgaaggccaaggtaccaaatccagcagccgggtaaaaattgtcaaccaacacattggcgataaatggcaaggctactgaaccggcagtagagctttcaaagccggcattatctaaggcgcggaaggtaatggtcacagtcacaataccatctacaggatctacttctatgggttgtgtaggtaatccgttaaccacaggtaccgatactccgttggtggggaaggtagaggctgtgtacgttgtgttattgatttttatagctgtggcattggaggggaaggaagtgattcggattgaggttacattgccgtcaggatcgcttgtctggaaattatttggatttacggtcacaaaaacgcttcctccgggattaggcactgcaggtgcagtaaaggaaccggttgaaggcaattgctgaatgccgaaattggcgttttgtgtcagggaattggcagtgatggtaacagccagcacaccattaactgtaccgtcgtttccggtgccggtacccagatattctcccgtatgcacccagcctgcgggcagtgtaatggcccccatcgggctgtttacggcagtctgggtggtactgatgcgcacggtgtaagagccggctgggtaatcaaagaacgcataagatcccgtagtgagatccacgggctttacggctactacaattccactgctgtttactaggtgagcgtaaagttgtatgttagaaggttttgctatgggtgtaccgtttacagtattatctgtcaaaccattgatatcgtggaataccttgcctgatacacctggaatggttgggtttacggggttattggcaaaggtattgtctgagagaccaaagaatttcacatcagcctgatccacaccgttgaagatacgaagtccatagatgggctgagaagtaccaaacaatgtaatgggcaccacggtaaatgccattgcttgatcaggcacgtagggcatcgaatagccggagttccagtcatagcgctcatatgcaccgcccgagccgcagccaaagcaaagggtattaccgattacattgccattgatatcaagtgcgcgaaggctaaaagctgagttcccccaccgctcggctacaagcatgtagtcatcattcgtataggcgtagccgaatacgatgtcaaaatcaggagtggtacagatgggtggctgggtattacaaggcaaatttgtagggctatcgtaccaaaccttgctgcgtatgtcgccatcaagttgataattttttagtgcagtgcgaaatacattgttggtaatgttgttattggccagaatattttgccctttgttccaaactcctacgccagtagtggcattggtcagattcagattgcggatctgcacaccctcgaaattaaagaaggtcaattgtattggtgtattgttagaaggtgatttctttgcgttcacttccaccaaatacacaggggtattgccttgtacggcgcccgtagcttcagtattctgagttataatggatgtattgattttgtacttaactgactgaatgggacagtagttattggtattgtttttaggatttatgttgatggtagtctgtgcactaaccataagtgaagtcaatgccattgacagggagaagatctttttcatttgggggtaagattaaaagttgattttttggattggattttttaaatcagcttttttggttacaccgttgagggtaacctctacttccttcataaaggcgggtattccaaggtctactttatacgtttcaccgggtacgacaaccgctctgtgcaggattgtctgctcatggctgatttcgacgataccgacctgatttccggagatttcaaatttaaaatctccatgagtcttccaactaaaattgtccggcgctttcaagtcgtttatatcagtgatctgggtcggcgaaatcaaatcatcttttttttcctttttacaagcgatggtcatcacacaagcagcaacaaccatcagtattaattttttcatttcaaggggttgtttgtaatcttttgaaatgtgtacaaaacatttgtgccaacacaacagcttttactttaaacattgattaccaactttttaacacttgtatacacaatcatttttcttcccatttcgggaaaaaatttctaaatcaaaataattttattacatcaatttctttcgtaatggttttttttaattacagttttaattctaatcaggtgtgattttcacgatgtaataagtgattagaaaaggtacctttttagagcatgactgtatgcatcgacttctactttgatttgaggtacacttttgtttttcaaacacaccttttcgaaatgcactactggttcattactttggccggagaataaagtcagctcagataaattgtattccattcgcaccttagccggtcaaacggccatttatggcctgtcgtcgatcatcggtcgctttgcttatttcttgctcacgccattgcacacagccgtactgcagcgagctgagatgggcattaatacggatatctactcttggatagcggtttttaccgttgttctcactttaggtatggaaacgacttattttcggttttccaccaaagagggtttggacgaacaggcagtatttcgccagactttttggtttatggctggggctgttggcgcttttgtgacgattgttttgcttttgcagagttctattttgcgagctatgcggtatgagtcgcaccctgagtacttgtggctcttactacttatactctcgggcgaggtgctggctactttaccttatgcgcgtcttcgtcagcacaatagggcactgcagtttgctctgatcagacttactaatatttttgtaaacatcggtttaaacctgtactttttcctcttaacgccttttttagccgaaagaggagttcacttacctgcaccgagcaatccggtcttatctatatttattgccaatggggctgcagtcgtacttcagcttttgctgcttattccggtattgaggccaatttttgcttttgaaaaaaagggaattgatcttaaaaagatgcttatctatggacttcctgtcatgttggcaggcctaccaggtattgtaaatgaagtttttgatcgtcagttgcttaaatatctattgcctgtagaaacttctttggaacaaatgggtgtgtatgctgccgtatttcgcctttcggtatttatatcgctgtttatccaggcatttcgatatgctgctgaaccttttttctttaaaaatgctgaaaacaaaaaagctcctgaactctatgcacgagtaatggagctctttgtgttggtatctgcaggggcagtagtgctgctgagtgcctttttaccagtggtgaagtatttcattcacagcaagttttgggacgggctgtacatcttaccgctactttttgtggcgcaaatgcttctcggagtaatttttaacctgaacatttggtataaagtaacggaaaagacgtactatggaattaccattagcctatcgggggcctttgtgaatcttttggtgaatgctactttaattcctgttttaggcattatgggggctgctctggccctgctgctctcgcatatagtgatggtggtagtttcgtaccggcttagtcgaaaacacttccccattccttacagagttaatgctattttgacactgatcgttacagctaccgcagcttcttttctcttgtttcagataaatcatctcatcggaaaaggcgttgtatttcttcttgcctttgtgctcttttaccaaactgagagaacggaaattcaaacccttattaaatctctttcaaaaaaatgaacgtcgtaaaagtctctatcatcaacgatagcacgaatgcattgcctgaatatcagaccattcactcggccggcatggatctgagagccaatctttcagagagcatcaccctattgcccggcgagcgtcgattgatacccactggcctcaaaatagccctcccccacggttatgaagctcaggtaaggcctcgtagcggcttggcactgaaatacggcatcacatgtctgaacagtccaggaaccatcgatgctgactatcggggcgaaattggagtacttctcataaatttaggacaagaaccctttgaaataaaacctggtgaccgcatcgctcaactggtggtagctccctacagccgtgtagaatgggcacaagtgcttgaactgcccacatctgaaaggggtgaaggcggatttggctctaccggcaaataattttattcgaacttcaatacttttgccgccggtatggctgagatatatctggctggtaagagcaagattaagagacaaacagcaagtgtgccgacattcactgacaatatccaaaccggttcaaagtgcacaggaacgctgtcgacaaaataagccgtctgatccagcttaatgattttccattctcgctgcatccacgcgtatccgagtgctaccacattgccgatgaaaagacctctggtgagaacgacgaaagctttgtaaagaaatattttggtaatcaaagcattttcggcacctaacgccttcaaaaggccaatcattcgggtgcgctctacgatcaatatcataagcgcactgcttagattaatggctgataccacaaccattacgatgatgatgatcaggatgttgatgtcaaacaaatccatccactgaaacagctgcctgaaggccatttgcgctgaaacagcctgcaaatcaaagggcaagactgctgatagctctgcagcgacttcctcaggcttgctaccctccttaataaacacttcaagagcgcccacctcatcggtttcccatcgattaacagaacgtatcacatcgatatcgacccaggcaaattgtttatcaacgtcttcaactcccgattcgtaaatgccggagatatagagatagcgcaa

SEQ ID NO: 1721 - DNA, 23780 bp, synthetic construct
  misc_feature 1..23780: note = Synthetic
  source 1..23780: mol_type = other DNA
  variation 15237..17312: note = n is a, c, g, or t
aaagaaaaaatcaaatgccagaaacaactgatgctgttgttcatcaaccggcggaaaatcacccggaggacccatagcgccgtaatattcaatcccaactgcggcccatttcaaaatagcatcatctatcttaagattgggagaaaattcaaaaccttggccggcgttaaggcctttcaacgatttttcaaagctggggtttaatgaaaaataccaggtacccagggttttatctacaatgggtctgatttcaagcgtccaggtatcttcgctgaaactgcgtttctgaaatccaaattccatagaaagacttacccccacaggccagtgcaggcgctcaggcacggccacacgcggcctaagatgacttcccacataagctgtacgcccatcgctacccaggctgttaaaaaaataaacacccgtttcaaaccattcattaaatccatgtgtaatttctacggtttcgtgaaatgcgtgctcggtgggcaatacaccgttttcttcctgtgtgctgccttcgagggtataattgctgtgcagttccaccatggtgtgatgcggttctacgatatctgaaccatacacctgaatctcatagttgtcctgcgccaaacaggaaaaccacatacataatccccaaatgagcacaacccatttcatggtgaaacaaatatattccacaaagggcaacaacttccttcctagcatgttacagatcggttaactacccaacagcatcgggcaggaaattgtataatttcgcatcttagataatttcaatcattctggttaatacattgaaaaaatctattctcatgaaccttcagcaactggaatatatcgtagcggttgatcaatgccggcattttgtaacagctgccgaacaatgctttgttacccaggcgaccctgagcatgatgattaaaaaactggaaatggagctcgatactgtgatctttgatcgaagccggcagcctgttacgcccacgcccattggagaaaaaatcattgcccaggcccggctgattctttcccacgtagagcgactcaaagcactggtagatgaagaaaaaaactgtttgcagggtgaatttaaacttggcataatccctacgctggcaccctatctgctaccgcttttcctgcaggatttccttaaaaaatatccacagatcaagttgcggatcagtgagctcaccacggaagagattgtgaaacgtattcatcagcaccatctggatgctggactgctggccacccccattgaagatcattccttgaaggaactccccttattttacgaacagtttgtagtttaccatgcccggcctgataagaaaaatcataaaaaatatgtactggcatccgacattgatgtcaaccggctctggttgctggaagaaggccattgcctgcgtacccagatcattaatctttgtgaactaaaagacaaatcaagcgcattgcatcagttggattttgaaacaggtagcctggaaatgctgaaaaaaattgtagaatccacgcaaggcattaccattttaccggagctggctgtccgctatcttagtccgcaacagaagaaatggattcgatatttcaagcctccggctcctgtacgggaaatcagcctggttacgcatccacattatgccagaacccaaacactggaagccctgaaaaatcagatcctggcgcatattcccgaacacatgaaaacccgaaaacaaaaagccatcatacctgccactcctgttgttccctgaactgattcagttgagcaaacgacgtacccgaagggaaagctcacgcggattaaatggcttggtcacataatcattggcgcccagacgaaatgcatccagcacacgggcttcttccccggaggcacttaacaccaaaatgggaatatggctttgcaaatcctgccggatgtgtgtgaccaactgaataccgtccatttctggcatgaacagatctgtaatcagcaggtcgggcatgccattagccatttgttcaacggctttttttccgttttcacacaataaagttttatacccctcttttttcaacacctggccaagcgttttcagcaacagcggatcatcttcggctaccaaaatcattttcatgtacgtaatgtttatacgcaagatgcgaactcgcttcaaaataaagcatgtgatgaaaacgaaaacttaccaacagatattttgcaaatattttacgagaggcccggatttccttcagatgatgagtacaattggttgcgcaacccatcggcttcctgccgcaaaggttccatatattgttgcaggatagacttagcccgaagaatgtcttcaaaaatatgatcatctttttcttgtgcagcttgttgttcaatgtttttcatgattgccagcaaagtatgcatgtttaacagacccaggctgcttttcaggcgatgggctttttcacggacctgacgaaaatctttattcttataggcttgttcaatctgatcaagagtttcgggagccgttttcagaaacagatccagcacttcgagtgtgtattgatcgtcgtccagttcaagaatggtgctcaggtcatagcctttttgcccgtttacagcgggttccacatgcttagaatcgggggtttgcacgagggcatctttgtgcgcgttttccagatgctgagctggaagcaactgataaatgactttcaggatatcttgcggcgtaaaaggcttgcgaatgcaagcattggcaccttcctgatacgatcgttcttcttcatcgctcaacaccgcagccgtcatggcaatgatgggcaggttcaggtgcatttcctttcggatatgccggatagcctgatatccattgacaacaggcatacgcatgtcaatgagcaacaaatcataatctgtgcgctgctccaatttatgtatgacttcgcggccattatccaccacatccacttcggcgcccagccgatgcaacaggcgtgaaataaatttctggttcacataattatcttctcctaccaaaacacgaagtccccgcagggcaagcatgggttgtgaaatttgttgcctgggttgtgattcaccagcagggtcgtgctgataaggaatggaaacggtaaatacactgcccttacccggttcactttccacttcaatgtgtccaccctgcaatttcaccaggtattgtgtgatggacaatcccagcccggaaccgccatattttcgactgatagctgcttcagcctgggtaaaactttcaaagatttgctggattcgatctgccgggatgcctataccggaatcggccacggcaaactgcagcatgacgctatcctttgtttcgccaggcaaggcttttacatctacccgaataaatcccgtttcagtaaatttcatggcattacctaccagattcaccagaatctgcttcagccggtgaggatcccctatcagccgatccggaacatcgggcgcacatacaatatcaaaggataatttcttttcctgagcccgaaagtgaaacaaatgatcgagcgattgcaagatttcttttaaagagaaaggcaatttttcaatgaccagtttgccggctttgattttcgacaagtcaagcaagtcattgataagtgttagcagcgtatctgctgcttcctgtatggaacgtaaaaattcttgttgctctgcggtaagagagctgctactcagcaaataggtcatccccacaatgccctgtagcggcgtgcgcatctcgtggctgatagtggtaagaaactgttcctgaaatttttcggcatcttcggcccgttgcttggcttcgaccagctgttgctgatattgtatgaggtcggtaatatcggtagcaatgccgcataatccaaaaattctctgctgctcgtctcttagcgggaatttggtgatgagaaaatgatgtggttcgttgttgacataaataatttcttctgttttatcaatactggctccctgataaatgcgatcatcactttcgtgatagcgttgggccaattcgggtgtagtgatttcaaaatcggttttaccatatacctgttcaccggtgagttgcaaagtttgcttgaaggctttgttgacaaactggtagcgatgttggagatctttgatgaaaataagggaagccgtattatccatcaaagcttcgagcagatgctgattttcccttcgctggcgttcggcctggcgaagcctcatcagcatttcttttctttcagatgtatcgagcacgacgcattgcaaacccacgggctcttcgttttccaataacaaagtcgaatacatccggatccatttttccttgccatcttttgtaacgatcggaaaatcgagggaagtatcggcaagtttattatccagttgccgcaaataaaattgtgtgacacgctcatgccagtcgggatgtaccagtgttttataacttctgcccagcagttcttcgggtttatatccggtaagttgttgcaccctgcgactgatgaagctaaaacgcccatccaggtcggtggtaaacactactactcgcacgccttcaatcagtttgcgataacgggcttcattggccagtgcctcctgttcggcttttctgcgtttggcttcatcttgtttcaattgccataagccagccaccacgaatagcaaaaagcttatgcacgctatcaaggtataggccagcaacctgcgggaaatatgttgataagattggtcgcgcaggaagagtaactgattttcatccctttctatgttacgcaaagtcagcaaccaaccgctttggggcacggcagcactggtggaacgaaaagccgatgcaacaccataggtgctaaatgttgcaatcaaggaatcaactcttttgctttgcacaggattgtcaaccaccagtttttgcagtgccagcaattgatccatgactttattacgccaattgccagcaagactacgtgtggaaaagagattctgttcaaaaaggtctcgcagttgctgggtgtgcgaaagcacctggtagctatgttgtacctgcttgcgttcaccttcaaactgacgatagtagataagtgcgctgatagaaaaatataaaaacaaccccagcgcaagaatgataaaaacggaaatgcgtttcgtgaatgacatggtttaacaggataggttaatactttgcatatacgaaaacgattgatagtttgatgcgaaaattaaaaaatttttcatacttgaaaaacaaaatataatcatttatcataattcaaaatttttaacggatttatgatttgaattgatgctgaattctacatacaaatgtctgtaaagcaataaaaaatactcacccatgtattttgtccgacggtagatttccctttatctttgtcaatacagccattaaaggtcagttggtatgcttttattttcatgcaaattccggaaaatccgcgtcacatccgtttcatatttattcctttggctgattgtggccgcaagtctcttaggatttttgcccatttcagctcaggctcagcaaagtgaaggatatgctggatcggtaagaactaatcatgaaggcatcagccagataccggtttcttattcccgggattttcttcttctgcagcttgggcatgatgtatggagtggactcccaacaggtatcagcacgcgtggctggaaccgcgatttcaatattgccctgctctatgattttccttttcaacaaagccatttcagttttgcgctgggattgggcgtaagtacaagcaatgtttttttcaaaaactataccctcaacattgccgatagtgtttcctctcagttgaattttaccagcgacagcaaatacagcaaatacaaaattgctactacctatctggagattccgcttgaatttcgtttccgccaggttgcacaaaatgctaacaaaggatttaaggtggcactgggagccaaactgggtttgaatacggatgcgcatgccaagggaaaacgtgtagtagccggtttcccggaagtggaaaaattcaaaacccgccgattcttcaatccttaccgggtagcagcaaccgcccgcattggctggggtaatttcaacctgtacgggagctatagcctcacgcccttattccggcaaaataccggcctggatgttcatacctattccatcggcatttgcctgagtggtctataaaaaacctgaaccgctttagtttcgtcagggatttactgccggagtttgcagccagttcaaaacctggtgttgccataccagtagatcatggcctatttgccaatgatgcgccatgtcaggaaaataaatcaacctgccgggtatttgtcggtcctgaattttatcaaacaaacccaaaccctgttcagccggtacccagccatcattcccgcctacaccgatcagcatgggcaattgcgccgaaggcaagtctgtgtgaacgatgttcttattttgctgcatcagttgcactatctcccgtgctatccaccgggcagccgttgtggtgctccaggaagcaatatccaccacaggattccagagcaccagcgtacgaaccgaaaaacacgatgctatgtgctgatccgatgcccacatcagagccggataggctccccatccgctgcccatgagtattaccctttgcgtatctgcctggttgatggtaagcaatcgacaaagactgtcggccaaactatgaagggttgccggatccaggtaaaaattcagcctatcatcagacaaacccggttcgggtgaaatggtaaacacctgatatcctgcctcgacaaacatgtgtggctgatcccacctcgttttgctgtcgttttctgaaaaccatgcaagatcaggcagacaaatgatggccggatatctgctgccggagtcagtttgagatgggcgatattggtgaatccacactttcatcccgtgggcaagtgaaataagccaggaagaaaggcggggcatggtgttctgcgtagtatcggcctgaacaagcatgcgggcgctgccgttttgtttgtccacagcaaaaatacgctgcatggggtgccatccggaaactgctaccagccaggccgaaggggtttcccccaccaaagcctctatcctggtatgcaaatgggtaatttgcctgatgacgaggggtgtatgcaaacgtccttcatcgaatacctgcacccgatagagttcaatccatgcagaatctggaaaggtagccgtgaaaagcaaactctgtccgtcgcttgaccaccagaaatgcaatacccttcctgcccggccatgtgtaaggttgtacaaggttttgcgctccaggtcttccaggatcagatctcgttggcctgtgtgtacacctgcaacgggctcagctatccaggctatccagcggcttttgccctggccggtagccggactgaatgcgggtgattcatgcctgatccaggctgagccaagacctctgtcaacatccgtttcacaggtgagacaactggtaagcccatcctgcagatcatacagataaatctggctcacttggggcgtaaccagagtatcctgcggcgtatctgttgctatttcctgcagggagggcttataggcggcatacacaatgtaacgctcatccggactccagtgtacctgagccagatagccattgatcagcgctgtatccacatcggtctcttcataaggcatcaaatcaaccggcatccctaacctccccatcgaatcaatcctcgcatacaacaaatgatgcacatatccatcaatccagccatccgtaccaaatgccggtagcctgtgataaatgcgggcacgtgtttttccaaactgcggataataatctttggcctccacatctcgcaccttttcgggatgcacaaacaacacataatcttttttgggtgaaatcagcatatgtgcatacggcgaatcagcctgcgtaaacgggcgcaacgagggagtgtcggttcgcaataaatagcattgatttcccctcgtgaaaataaattgatgcggggaaatccggatcagattttccagttgtggaccatcgaatgtaaaaagcctgtttgcgcgagccgccattggatggagtggctgcatccagagttgatgccgcattctatcccgttcgatatcatacgctgatatcacataatacaaagcctgcccgctggcatcttcatccgtccagcatgcactgatataaggggcttctgctatccgttcgggcgtccacaccagttgggcatgagcggcatgcagtccactcatccatcccagacagatcaggatttctctccatttgctcatagctgctatccaagcctttccctgcaatgtactaactttgcatggctaaaggaaccagctttgattgattttcaaccaactgtcccgcaaaccgaaaaagccgttctggttgggattatcaccccggatgttacggaagcccaggtgaatgagtatttaaacgaactggcctttctggctgaaacagccggagcccaggcggtaaaaacgtttgttcagaagcttcctcatcccgatcctcgtacgatgatcggaaaaggtaaactggaagaaatcaaacattacctggaagggaaagatatttccattgtgatctttgacgaagaactgagtggcacgcaaatcacgaatattgaaaaaatcctcggtgtgaaaaccattgatcgcaccgatctcattctcgacatctttgccaaacgtgcgcgtacagcccgcgcaaaaactcaggtagaattggcccaataccaatacctgctgccccggttaaaaggcatgtggactcacctgggccgtcatggcggtggtatcggtacgcgtggccccggcgaaaccgaaattgaaaccgaccgccgcttggtaaaagataaaattgctctgctgcggaaacgactgaaagagattgaaaagcaggcacagctgcagcgcaaggaacgctccggatacatccgcgtagctctggtgggttataccaatgccggcaaatcaaccctgatgaatgcattgagcaaaagcgaagtgttcgctgaaaataagctgtttgcaaccctcgataccaccacccgaaaggtggtctatcagcaaacacctttcttgctcagcgatacggtgggctttatccgcaagttgccccatcacctggtggaaagttttaaatccacactcgacgaagtacgcgaaagcgatatcctgctccacgtggtagatatcagccatccgcactacgaagaacagattgaagtggtgaaccgcacgctgcaggaactgggcgcactggaaaagcccaccctgctggtattcaacaaaatggatctgtatgaacagcagcatttcgatccttatcttccggccgagatatgccaggagctgctgcaacaactgaaagccgagtgggaacagcgcacccatggccatgccatctttatttcagctaccgaaaagcgcaacctggatgagttgagacaaaagctctgggagcatatcgtggcactgtaccgccaacgctatccctaccagacagaatttttcacggcataggcgttataaaaacaaaaaatccctaattttgtcgtcccttccgctggtaccacgcaccagccacgcaaccataccgacactcctccttagctcagctggttagagcatctgactgttaatcagagggtcgctggttcaagtccagcaggaggagctttgtgtgttttgctattttttgtgctcccaccctaaaataaaaacttgcatatattcgttaaaaaataataaatatcaacttaaacaaatctgcgttggcagaatcagacaaaaagaaacaatccaaaatcctccacacataatgcaagatcttacaaatctaattactgactaaacatgagcactaaaaaatgtaattgaaaaacttcttacatagctaattaaactctataaacatgaaaaaaatcttaggactcgatttaggcgtcagctcaataggttgggcattaattaaggaagaaaacgaacaacccacagaaattataggaatgggggttagaattattcccttagataccgacgaaaatgacgagtttaccagaggaagtgctattacaaaaaatcaaaaacgcacccaaaaacgatccatgcgtcgaaattattatcggtatatattaaggcgcaccgctctaactaaagaattaaaaaagcacggaatgtttgatgaaaacttattcaaacttccgaagttagaattatggcaactgagagcaaaagcggcaaccgaacaggtatcaataaaagaattgggacgaattctttaccacttaaatcaaaaaagaggataccaacctacaaaaggtgaagcaacagaggactcacaagacaataaaaaagatactcaacatgtaaaagaaataaaaaatagataccaacaattaaaagaagaaaataaaactataagccagaaattttttgaagaattatccaaaaatcccttctatcgaaccaaacaacaaatctttccacgcgaagcatatatagaagaatttgataaaatcatgaagaaacaacaggaattctatcctgatgttttaagtgacgaacttattaatcatatcagaaatgatataatttactaccagagaccactaaaatcacaaaaaggacttgtaagtatttgtgaatttgaagggtttcatgtattaaataaagagggtaaaaaaatttttactggaccaaaagtagctcatagaagtaatcctttatttcagattgaaaaaatttgggaatccattaataacattgttatcaaaaacaagaaaaatgaagatttccctattactctcgaacaaaaacaaaaaatatttgaatacctaaacgaaaatcccaaactaacccttaaagaattatttaaaattttaggcattaaagaaagaagcggttggtatggaaacaaaatgttatacaaaggcatacagggaaatgttaccaaaactctcataaaacaagcaattggaaatgatgaatcggccaaaaaatggttacaatttaatctcaaaacacggcctaacgcaaataatgaatcaaaaacatacttagtaaataaagataacggagaagttattagtgatgaagataggttgattattgatgaatcatttataaatgaaccgctttatcaattatggcacgtcatttattcaatttccgacattaacgaatgtaaaaaagttttgatcaacaaaatgggacttagtgaggaagtggcagaccgtctgtccaaaatagattttgcaaaattatcatacggaaacaaatctattaaagccattagaaaaatacttccttatttaatgaaaggttatcaatacagcgatgcgtcctatttggccggctataatcattccaattctctcacaagcgaagaagtaatgaaaaagcgtcttcttgaaaagctgccattgctatccaagaatgctttgcgccaacccgttgttgaaaaaattttgaatcaaatgattcatattgtcaatgatattattgatgagaaaagaggatgggtaacccgggaggaacgagataaaggattattcgaaattcggattgaactcgccagagagctcaaacaaaccaaagaagaaagaaacgaaactttcaaaaacatttccaagatagaagaagagaacaaaaaaatagaaaagaagttgcaagaattaggcgtacgcgcaacaaggaaaaatattattaaatatcggttatttaatgaaatttcagaaaacaaaataaatgccttatgtatctataccggcaaaatgttttcactgtccgatgcactgaatggagataatatagatgttgatcatatcatcccgcgatctttattatttgacgactcacaaagtaataaaacgctgacattcagttacattaatcaagaaaaaggagatcaaacagcttatgattacatggcttcaaaaggtgaaactgctctgaatgattatattgaaagagtaaataaattgtatgaaaataaaataatatctaaagcaaaacgaaataaattgttgatgccggccagtaaaattccacaggattttattaaccgtcaacttagagaaaccgcttatttatccagaaaagcaagagaaattttaagtcaaatatcaaaaaatgtttgggcaaccagcggaaacgttacctcatacctgagaaggttgtggggatgggatgatattcttatgaatcttcaattaaaacgaattaaagaactgataaccgatcccttatccgaaggaattactgaaaaaattgaaatagaaacctccgatgggcaaaaacattctaaggaaataattaaagattggtccaaacgagacgatcacagacaccatgccattgatgcgcttgtggtagcctgtactaaacaaggttacatacaaagagtcaataccattagtgcgcaagccacaagagacgaactctttaaagaagtaaatgaacgcaaagaagaatttcgcgaacaactcagcttgctcgataaatatttcatcctgcatcgtccctttaccacatcacaagtagaaagagaagcttctaaaataattgtttcttataagccagggaaaaaagtggctacgtatggaaaacgttttattcgcaaaaatgggaaaagaattaaagtgcaagatcatattattgttcctcgcgggccgttaagtgaagaatatgtttacggaaaaattaaagtacttgataaaaataagtcgctcaaatatctttttgaaaatccgcatttaatcttcaagccacatattaaagaattggttgaaaaaaggttggaggaatttgacggggatataaagaaagctttggcgtcaaccaaaaagaatcccatttatttacctaacaaatcagaacccgtaattttagaatatgctacatgttttaaagaagagtacgtattaaaatatccagtcaccaaaatcactctcaaagatattccatatatagttgacaataaaatccgagaattgataaaagagagattggaacaattcaaaggtaatacaaatgaagcttttaaagaacctatctacatagataaagaaaaacaaattcccattcgtaccgttagaatgtttactggattatctggtgtagaacccattaaatacaatgattccggtatgcccatttcttttgttaagccagggaacaaccatcacattgctatatatgtagacaaagacggaaaaaaatatcctcatttatgcaccttctggcatgctgttgaaagaaaaaaatatgaaattcctgttataattgataatcctcaatccgtatgggataaaatactctcaagttcttaccaatacccccaatcttttttagaaaaattacctaatgataattgggaacttttatttacccttcaacaaaacgagtatttcctgcttcatgaaaacaaagaatatttagatgatatacttcgccgatttgattatcaagaattgcccaaaaatatatttagggtgcaaaaaattttctataatggtaaacaactggaaatttttttcagacatatctatgaaacaaaactcattgataacgaatgggcgagaaagcaaaaaaaatactatcccgtaaaaagcttaggtgcattagaaaaactaaatccaataaaaatcagagtaagccggctaggcgaaattgaagccattggaataaaataaaaaaagggcgagttgccccgccctgtctgttttcacaacggtcatttaagaccttattgtgattagcttcaatcacaaatgtaaaaaaatattttttaaaaattcaaatgttccaaaaacgtatcctatgattaagcgcaccctttattttggcacacccgcctacttgaaaaccaaaaatgaacagctggttattgaaaaaacggatacaggagaagttatatccacccctgtagaagatattggtattctgatcttggatcaccaacagattaccattacccaatccctgctggctaagttgcttgaaaacaatgtggctctgattacttgcgatcatacccatcacccggcaggacttctgtattgcctggatggacatacgctacaaacccaaaaacatcaacgacaaatagaggcttccatgccattaaaaaaacaactctggcaacaaacagttatcgccaaaatcaaaaatcaggctgccttactgaggcaacaacgcgtcgaaaatcaatacttactcaagttatgcaatcaggtaaaaagtggtgacccggataactgcgaagccaaagctgctgtgtattactggaaaaatttatttcctgacttcctacaattccacagagaccgaaacggacctcctccaaataatctactcaactatggatatgctattcttcgcgcatgggtagctcgtagccttacggcaagtggtcttatgcccacactgggtattcatcaccgcaatcaatacaatgccttttgcctggccgatgatattatggaaccttaccggccatttgtggatgcagttgtgtgccatattgtgatgatgaatggaaaatttcttgaaatgacaccttctatgaaaaaacaactattatccatccccgctatggatgtaaaaatagaaaatcagaaaagcccattaatgaatgcagttcaacgcacaactgcatccctggcaaaatgctttgaaggaacctcaagaaaaattatttatcccagtttctgctaattgtgatatgatgtgaattattcccgccttaatgcttaccgtatcatgtggattctagttttttttgacctacccactgaaaccaagaaagatcggaaaaattacgccatcttcaggaaacatatgctggccgatggtttccagatgtttcaatttagcatgtatattcgacattgcagcagccgggaaaatatggaagtacacctacaacggataaagaaaattcttcctcctaaaggacatattggaattatgacggtcactgacaagcaatttggacaaatggaagtatattatggaagagatccggtgaataccccatccaccatacagcaattagaattattttaatgaccccacaggaataaaaaatgtagcttagctctaattttttcttcctaaaaatcgcctgaaatgctctatcataggtcannnnnnnnnnnnnnnnnnnnnnnnnnnnnnnnnnnnnnnnnnnnnnnnnnnnnnnnnnnnnnnnnnnnnnnnnnnnnnnnnnnnnnnnnnnnnnnnnnnnnnnnnnnnnnnnnnnnnnnnnnnnnnnnnnnnnnnnnnnnnnnnnnnnnnnnnnnnnnnnnnnnnnnnnnnnnnnnnnnnnnnnnnnnnnnnnnnnnnnnnnnnnnnnnnnnnnnnnnnnnnnnnnnnnnnnnnnnnnnnnnnnnnnnnnnnnnnnnnnnnnnnnnnnnnnnnnnnnnnnnnnnnnnnnnnnnnnnnnnnnnnnnnnnnnnnnnnnnnnnnnnnnnnnnnnnnnnnnnnnnnnnnnnnnnnnnnnnnnnnnnnnnnnnnnnnnnnnnnnnnnnnnnnnnnnnnnnnnnnnnnnnnnnnnnnnnnnnnnnnnnnnnnnnnnnnnnnnnnnnnnnnnnnnnnnnnnnnnnnnnnnnnnnnnnnnnnnnnnnnnnnnnnnnnnnnnnnnnnnnnnnnnnnnnnnnnnnnnnnnnnnnnnnnnnnnnnnnnnnnnnnnnnnnnnnnnnnnnnnnnnnnnnnnnnnnnnnnnnnnnnnnnnnnnnnnnnnnnnnnnnnnnnnnnnnnnnnnnnnnnnnnnnnnnnnnnnnnnnnnnnnnnnnnnnnnnnnnnnnnnnnnnnnnnnnnnnnnnnnnnnnnnnnnnnnnnnnnnnnnnnnnnnnnnnnnnnnnnnnnnnnnnnnnnnnnnnnnnnnnnnnnnnnnnnnnnnnnnnnnnnnnnnnnnnnnnnnnnnnnnnnnnnnnnnnnnnnnnnnnnnnnnnnnnnnnnnnnnnnnnnnnnnnnnnnnnnnnnnnnnnnnnnnnnnnnnnnnnnnnnnnnnnnnnnnnnnnnnnnnnnnnnnnnnnnnnnnnnnnnnnnnnnnnnnnnnnnnnnnnnnnnnnnnnnnnnnnnnnnnnnnnnnnnnnnnnnnnnnnnnnnnnnnnnnnnnnnnnnnnnnnnnnnnnnnnnnnnnnnnnnnnnnnnnnnnnnnnnnnnnnnnnnnnnnnnnnnnnnnnnnnnnnnnnnnnnnnnnnnnnnnnnnnnnnnnnnnnnnnnnnnnnnnnnnnnnnnnnnnnnnnnnnnnnnnnnnnnnnnnnnnnnnnnnnnnnnnnnnnnnnnnnnnnnnnnnnnnnnnnnnnnnnnnnnnnnnnnnnnnnnnnnnnnnnnnnnnnnnnnnnnnnnnnnnnnnnnnnnnnnnnnnnnnnnnnnnnnnnnnnnnnnnnnnnnnnnnnnnnnnnnnnnnnnnnnnnnnnnnnnnnnnnnnnnnnnnnnnnnnnnnnnnnnnnnnnnnnnnnnnnnnnnnnnnnnnnnnnnnnnnnnnnnnnnnnnnnnnnnnnnnnnnnnnnnnnnnnnnnnnnnnnnnnnnnnnnnnnnnnnnnnnnnnnnnnnnnnnnnnnnnnnnnnnnnnnnnnnnnnnnnnnnnnnnnnnnnnnnnnnnnnnnnnnnnnnnnnnnnnnnnnnnnnnnnnnnnnnnnnnnnnnnnnnnnnnnnnnnnnnnnnnnnnnnnnnnnnnnnnnnnnnnnnnnnnnnnnnnnnnnnnnnnnnnnnnnnnnnnnnnnnnnnnnnnnnnnnnnnnnnnnnnnnnnnnnnnnnnnnnnnnnnnnnnnnnnnnnnnnnnnnnnnnnnnnnnnnnnnnnnnnnnnnnnnnnnnnnnnnnnnnnnnnnnnnnnnnnnnnnnnnnnnnnnnnnnnnnnnnnnnnnnnnnnnnnnnnnnnnnnnnnnnnnnnnnnnnnnnnnnnnnnnnnnnnnnnnnnnnnnnnnnnnnnnnnnnnnnnnnnnnnnnnnnnnnnnnnnnnnnnnnnnnnnnnnnnnnnnnnnnnnnnnnnnnnnnnnnnnnnnnnnnnnnnnnnnnnnnnnnnnnnnnnnnnnnnnnnnnnnnnnnnnnnnnnnnnnnnnnnnnnnnnnnnnnnnnnnnnnnnnnnnnnnnnnnnnnnnnnnnnnnnnnnnnnnnnnnnnnnnnnnnnnnnnnnnnnnnnnnnnnnnnnnnnnnnnnnnnnnnnnnnnnnnnnnnnnnnnnnnnnnnnnnnnnnnnnnnnnnnnnnnnnnnnnnnntcttataaggtattcgtgtttttcaactccgttgaaaaatgaaagctaatcacaaccgcagttcattgcgcaatgaaaggcggctgatgctatcaattgtttcatctgtataaccctgcagggcgtgatagatgccatccaccacatcgaaaaactgcagattcgttgatcgcacatctgctggagcaatagcgctggtagaaggcgaaaagtcgaaggctacgcgtatggtaatctgcaattgaacgcgctgcagggtatctgtttcatcatcggcattcattatttccaggcttatcaatgccgctggaaatgcaatagccgggcggatgtcatattgatcgatctgacctttatccaggtcaatgtattttagggcttgcacactggtaagcaattgcatgatggtttcaaatatctgcttcatttgatgaattgttttacttcctgaataattcgtttttgaatctccgcgcgcaacaccgggctgtcgcccataaattgcctgcgcggtatgtgaataatgcgctgcccataggtgaatccccggccgggtatctttccaggttggaacttaccctttttaactccgcgtttgtatctgtttctgatgaatgtttcggaacggggagcctgcacaatggtgcccccttcattgtgtatccgggcatatgggatagcgctgctggtgcccaccacaacggcgttttgacttacttgcttcacctgaatgctgcgttccagtgcgccggtttgtattaaaatgggcttacccaggctgcgcttggtttcgcgtttgcgtttgggccagggctcaaaagtttgcccctgccagccctgtagcctgaaattggttttaaaaaaattcacggcttcattgcctataatgggaggcagctggcgaatgagacccaaaacccggtttatgaatgcatcagttttcacaatattttaacaataattttttctaatgcggaatacgatttgatatttttgtattggactgggctgcggcccggaccatcccaaccgcaaggttgggttttttatttcctcttgaattcataaaatttaccttgataataaaaaatcactttgttcaaattagcatgctggtcaaatctttcttttgtgatactttcaagtgttgataggttcatttcattttctataatgataattacattagatgcttgatggcttgctttcctaatgttttgatctatagcatttattgttaaattctctggtctttttacttcaaaatattcaccgttaacacgcaagtcaggattttttctgggaaatgcattgggtagtattttgcttcttctttctgcctctgtttcaggaatctcaggcaatatttcaacttttttccctccatctgccaaatctgtagaaacctgcctgccggcaggcaggctggcaacagcagtgcggtattcggtttccaatcggcttacatgatagccaataagcttttaaagagctaagcgacaaaaagtttgaaagcaaatcacaacatataagaaacgaaggtacagctatttgaaattgaagaaataataaatttttaatcaggaggttatatttgcattggcagtaacgtagtggcgggtatctgaaatccaatggcagcaaagagttgggtggagtgaaatggagccagatatctacttgttgtacactgtctccatcatttattaaactcctctaaatctactattgtatggataataccaatactgcctctttcatagttaaatccttcattttcttctctcccacttccatcatctgaatttgcgtattcgttgctataaaaagaacctatgaaattcaaaatattttctagccggtcattttctgcttttcttttaatggcattaagcaaaacttgtaaaaatcggagagccgaactgttatagggtatattttttgcgtataccaattctcctatatgtccaagcaaatatttatttgagaaatcatacgaattaaatgctatgcaattatttcctaatattggcaaattacaaacaaatggggaatatctataatatccaggtaaatagtggataagcttatgaaaaaaataaaagcattcctcaatatcataatcaaataataaacaaaaagggcacataatagtttgtatagtttccatctccaatttgaataaatcataaagcgatatagtacttttttttgataaaagaacttctaatttctttgaactaattagagcaaaatcacctggaaaataaagcaacccatgactgcccagacaacctaaataattaggtaaactgtattcatttgaaggtattagtgaattctttgctcccttaaacgttgggaatctggaaagtaaataaacctgctctttagcacttctactagaaaaactccatgaaacatcttttgatttttttacttgatttatagtcattttctcaaaatattttttgctattacatacaatagataatatgaaaataatatccccaagttctcttttagtgttattcccatcataactaaattctacgtaagatttattaccgtgaataaaaatggaattagttttaatgctaaacttcaagcttttcccttgtgttttgaatgtccccacgctatttataatagattcaataattttaactatatgattttcaggttttttgtaactattttgcacaccagctattaatttatgtgataataatttccaatgatgtttgaatttatcatcattcgtaatttcaacatactttttaatgcaattcactacatctctcattttttaactccctatttatacctgtttacaaaggcgatagcacataatacgtaaatatatgcaataaattcttttttttgaatacttagggctggaaagcttctaaaataatagaacatggcgtaatctgaaaaaaacagaaaattttggaaaattttacggaacttatagaaattaaccgctatgcggtttctttcattcaatcttacaaaaatgccatatccgcattctgaaatgcatttcccaataatatcccgtaaatatctctatgtcttatcaaaaaattgggcgggtgccgttcagtttttgtactaccgatgtggggtaaaaattatcaactgaattgtttatatcccagtagcagggaatacagattactgattgtttaatccagagaagaggtgcagaaaatcattttatcctataataattcaaacgcaaagccataaaggagaatgtttttaataatacattttttaaactttaagttattgaaaatgaataacttgatttttactaaaatttttcctgggtaatagtgattatttacccttcttttccattttaacggttgttggaagtttatcaaagagcgtttttgaaagcaaatcacaaagcccgcacctatcgcaaaaggaagatttaaaacaaaaatcgatttgaaaaagggtgatttttataccaggggaaaatgtatagaatgcatgaaataaaaaatcccaaccttttagttgggggtgatccgggccgcagcccagaccaatgcaagtataacaaaaatattttttttggaaaatttcaacacatgcttacccaaccgatgagccggcttccggaagaaacggaattgcaggcgaaacatgatttacaattttttgatagcaagtatgccaaaaaaaattaattttgtgatgtagcgagccatggcgggttaaaggcctggccagcacctggcagatgatgggggcggggccggctggtgccccaccagcgctaatggcaagtgaatctgcataaaaagacctcggcatcgttaccggggtttttttattacccctgcacataggttggccacatagcaagctcagctgcggacagcatgctacacaaagttcccagatgaagtacataagtgtgatgaccagcagcaagattgcaccgtgtaagcgtcagccatcaaaatcaattccggcagcacaacggtttagaaacagccatttataaacgggatagtcagcatgcgtatttccggcatggccggtaaaatgattctctgaaacctataaatatccgaatcacaagcaacattgttgttgcagaaaaatttgcgattcaacgattcaaatatcattcatctgatttcttttgatacacccgtacataatcaacttccatccttgcggggaaaatgttgggatcaatgccatgttgcccaccccaatcaccccctattgcaatattcaagatcaaataacagggtttatcaaagggccattctgcaaaggttttatgttcatttgcaaaatgcagataccggatgctatccacataaaaatcaatatactcaggcgtccattcaattgcatacacatgaaaagcatccatacaatccggcacatctatgatggcagttttctgagtattttgcggccagttgtacgcgccggtgtgaatgctgccatgaatcttaccgggatcaaaacccacatgttccatgatatcaatttcaccgcaggcaggccatcccacctggtgaatatcatcgcccaacatccagatggctggccaggtaccacgcccacgtggcagcttagctctcacttctatacgcccataagtccagctggccttaccatgggtaatcaaactggcagaggtaatgggccgcacggcgccatcgataaatgcagaatcatttcgagcttcaataatgagcatcccattttccacacgcgcattttccggccgagctttcgtataatattgcttttcatgattgcgcagataaccctgttcataattccatttggtgctatcgggcaaaccagaatcatcaaactcatcatgccagacaagctgccaatgcatatgccccgtatcctgaagaatggtattagagcagagatgggctggcaagggaaaaagcaaaaatgtttttccgctcatccacatcatagccagatttagcagaaagcagatcatgggaaattttttttacgccaatccatattcaagaaaatctattcgtgctgtatttgtccatttacctgctcatcttcctcctcatcctcagctgcctgcaacaaggcttgcggcaatgccttacttggagaaacgcccagccgccctactcgcttagctatattcaagagattaccacgaccggttaatgttatcatggtactttcatacacctcctgcgttttccggattcgatcacccaattcttccagtcgttgacacaagatagaaaatttatcgagcatttttttggcttcttcagcaatttgctgggcatttttttgttgcttttcctgctgccagatcgtggctaccaatttcaaagtagctagcagattggaaggtccaacaatgatgatgtttttatgaaaagcatattcatacaaatcgttatctacttttaaagccaataaaaaggcagcttctatcggcataaaaagaaacacaaaatccaatgattgctggccatgaatattcgggtaattttttttactcaatccatcaatatgattgcgtatagactgtacatgctggcgtaacagctgatcctgctcctggggattatcagaatgcacataattttcataggccaccagcgagactttggcatcaataatcaggtatttatcaccaggcaaataaatcaccacatcgggttgtaaacggttaccatgatcacccgtgaagctctcctgctggacgtattcccgacctttttcgagtccggataattccaaaattcttttcaaaatcatttccccccatatcccgcgtgttttgctttcgccttttaaagcctttgtaagatttctggcttcttccgtgatttgctggttcagctgtttgagatgttccagttcggtttttaatgccgaatgattttggatgttttctttgttggattcttctactttcttttcaaattcaccgattttttctttcaggggattcaggatttcccggatgcgttcggtgttttgctcggtgaattttttagacttttcttcaaagatgcggttggccaggttttcaaattcctgatgaaactgcttgcggatttcctgtatctcttctttttgttcagacagtttttgctttagctgttcgttaagggcgtgtagctgatggttttctgcaatgagttgctcaattttttgttctttttgttgaagctgggcattggtatcttgatattgttgctgatatagctcactttgtgtttgataccgggaaagttgttgctgaacttcctgtatctgcaaacgggcattttccaggtcccgactccattgggcctgaaccctaaccctggcaatgaaccagccaatgagaaaagcggccacagctaaaatggccagcacgacgaagaataataggttcatgataaaatgatttattcaaaattaaagtaaaacaatgca

SEQ ID NO: 1722 - DNA, 23765 bp, synthetic construct
  source 1..23765: mol_type = other DNA
  misc_feature 1..23765: note = Synthetic
ttcacctgtaagtcaggatgccattaaggatggcatggatatggtcttgcttgtgattgatcgtaataatcagacaatggatttttcaggtgcagttaatggattgtatctggttagaaacaatgaaatgcaaacctttaaaggcgaccgtctccctatcggacgactacccgatgggatggtgcctgaatacaccgaaacacgcatctcccttgagaaagatgatgtggtatatctctttaccgatggctatgtggaccaatttgggggtgatgagatgaaaaaattcaaatacagacgcttccgacatctactgctgaacatccatggattggagcctgacgaccagaaggccattctgcatcagaaactcgaagattggaaaggaactcacgaacaggtggatgacatccttgtaatcggttttaagcctctaagtactacttaagggtgtataaaaattgagtttagctggtaatgattgtggcatagattaatttacaggggttagcacgtgaggtgttttttaattttttgcagcaactcatccggctgaaatggcttactaatgtagtcatccatgcctgcagtcatgcatcgctctttatcttcggggaaagcgttggctgtgacagcaataataggcacatgtgtattggtacttttttcgagttcgcgaattttctgtgtggctttgaatccatccattatcggcatttgcacatccatgagaatcaaatcgtactttacggttccaaacttctccagagcctcttttccgttagatgcaaagtcaattttctttacatcgtttctgatgtataggttgatgatttgttggttgctgaagttgtcttcaaccagaaggatgtgtgcatcggcaagctcaacttttgttttaaagatattatttgctatgcgcggagattcaacatacgcagcgctatcatcattgttataggcatttttaaaactggcgccaaattcaaagatggtggcatcgggttttggaatgatatttaaggtgtggccatctacttcaatcatcttttgggtgatgcccaaatcaaggatgctaattatttttccagcgtttagctttatcagatcctgatagttaaagaagctttcacctgagtgtgtgtcgctttttgccgaagcgtagataaagtcacttatgagcctgaaggttagttccaccctgcccggcatgctctcttcccttctcacttccagtgtgatgtgtttctgattgctgctgttttgcctcacaatgctgttgatgagattaagcagtatttgtttgattttaatactgttgcctgttatttgtgagggaatatccggtgccagtgacaggttaaaacgcacttttgaattctcatacgggaaaagacgaagcacattgttgagggtgtcgtacagattgaaactcttttgctcgttgttgtcgtttatgcctgattttgaagccatcaccagattattcaccacgcttactagattgttggctgaagcatgaatggtattgatataatctttctgctcttcggtcattggggttgattcaagaatatccagaatgcccgtgatgttgctaagcggtgtgcgtatctggtgcgacaaacgcgacagcaaatcctcctgtgcattgtttttgttctgtatgtcgaggatgatgcgttccttctcgagaagcacttcggagcgaatgaactgaaaagcaaatgcagtcagaaacgccaccagatatattacaataaagaagatacccgtttgcattgagtagtattgcaagaataaaccaaaatcctgaagcaggtaaatgtgtaacgccattattaatacgagagagacagaccagtaagttcctgtgccccgccctttgagcgctgtggcataaaatgggaaaagtacagaccacacaatgccaagcccggtattacctccaaacattataaaaaatgagcaggagataaacacaataaagagtaaaagactttgcggaaatgtgccgttgaattttctcaaatagagatggcttaaagccagaataaaactgagcgacaaaaagggaatagccagttcaacacgctccacggccagggaccaaatgccttcggccagcactatcattgtaaatgcaaagcttgcaaagtttaaaacgagagatttggacttggagtccatatccgatttttcatcggcttcggaaataaataagccgattagtcggttaaggagattaatgggcatgctgctactttttattatgatgtttgaaacattgttatctgggataatgctgcttttatttgaaagatgatttcaaatgcttaatcaatattatcttttgactcaggaaaaatagttaaaattctttataatagttttatgtgttgaaaatatctttgggtgagttgattatgaaaaaaaaactccctgaccgggggaaatggacagggagtagtttattgttatgatatttagatattaatgatatttaagcaaagtggttgtgtagtaatccttgctattaatttttaaaatgtatgtgccaaaacaattactggttagttcggcatttagttggattttctgccccggtagtgtttcttttgtttgttcgccaacaagtcgtcctgtgctgtcaaatagctgtatattcactttgcctgtaaagtttccggaaacggtaacaggcattcctttctttaccggatttggataaacgagtatttctgattcattaatttctgcattaagttcatcattcaactcaaaatttactgcatttttcagcagatcgtaaggtgtgtagtcagttgagagtacataaatcgcatagcctctggcaggcgcttcaacccacacacgtccatcactgtatacctgagttgtttgagagttatcgaacgcgttaacaagtgatttattgctccagtttgaccatcccgatggtgttgcatttacccataagcctttggttgtggtcgaattgttaattaccactatagcaccatcctttgtgccgttgccctgacggcgagccacatatacatcatgcgtattggcggcggggtaagggtttccgttttggcttaacaccgaaatggttccgttaagatatgttcttctaacgtgtatgagttttacaatttcggcctgaagccatccgggaatatttacctggtgggatgcatcatgattgtcgagcagggtaacgccatagaggtgtggatagaaaagacagggacgaccttcatgagtcagtagataagcatagcccagatgccagtcttttgtaacccatttgtcgtgttcttttccagtgtcatggttctcaagaaaagtaacaaccgatgtgccgggtaaactattgccactgttgtttctaattagtccggcatgatttagccagttcatattaaaatttgcatcaccattacacatatcggttaatgtagcttttaatggaaagtcaaaggcgtcagtatcagcaccatacgatgcaatgttgttaacccagtttttaatgctggcagcagagccccaatattcaccaacaataaagcgttgactgccgttaatcagtggtaggctgttaatccatgaggcggcataggattcttgaaagcctctcacgaaatcaagacggtatccgtcaaattttattacatcagagagccatgtgccccattcattcatgcgctgctgcacaatagaactaaaagtgttcaggtcgttaccaaagcctttggtatttgtaatgatttcatcacctgcaccccagtcccccagccagtcaaactcatcaacaggatggaaatgagtatagttccatgtccagttttgctctccggctccagttttggcagggaatgagagtccggtgttggtataagcttttagttgagtggtggcaagattctgcccgttatgccatatctcgaatgggtagtagccccttgtttgatctccccagttccagttgctaccagattctgtgcgggatgttagtttaatgatgatatcttttccgcccggggcagtcactttaaattcatcaatatcgtcttgataattgatgaaagctcttactgtttgtcctgaaccagggaacgtgttgtaatgacctcctccattatttggctctgtttcccaggtgtatgtgctgttgaaaccggagttgttatagtcaatttgtatgtcatacgctctggattggtgagatgcgttgaagtccaaataatatcctttaaacttaataaagtaatcgcctgcggtggcatttggtatcacccaagtaatttcgtttgtaggatatggaacatattgttgcccgttgcggaaagcttcgtcgaaaacgtattgtttcacagcaggatttatttcggcgtcttcgtcagatgaatagatgtggttgagaatgatatcggcatatacatttactttaggtttaccctgcgatacgtcgtgcattgctgaaatcatgttctcaagctcacttctgctcccaaagcgggtttctatactgcctttctgattgtagttaccaagatcataatggtcataaatgccataacccatatcataaataccccaattgcccttagcgggagatgggatccatattccggtaatcccccagtttttaaagtcaaatgatttgttggtgagattgttccaccacaatccttttttattttgggcgtcaacgggcacatcccagtaaaaggcctggagcatcacatcattctgggctttaaccagtatatttcctgtaaggaaaaggctaataagcaatagcagatttgccttgccagtaaatgaacttaataggttcttgttttgtgtcattttggagagattttaataaaacttgatttattaagattttttcggccgatataaatcaaggcaatattgagaaatccttgctcaaaaaacgacttgctttatgttttaggacttttttacagatgagaaaaggtttaattttgtgaaataggacgtttaagtgtcactttttcaattgatatttgcagagtggcttttaaaatattcacggggagaaagtccggtgctttttttaaatgcaaggttaaaagtcgatttggagttaaagccagcttctaatgccagataaaggaaggtaaggttttgcttatcgttttgatttatcagagatataaactcatgtatgcgaaattcgttaataaagtctctgaagttatgatgaaagcagtcgttaataacttttgaaacgatatatggctttgagttcaccagctcagagaagtcggacaaaagcagatctggatttttatacggtttcaattcaaccattacctggcgtattttaaataacaaagccatgtcattgtattctgtattgatatttttttgctctgttttgggctgagagaacacggattcatttaatatggcagaataaaatgaagagaatatctggaagggagcaattgaaaacaggatattgaaaaaatagtcaggtatggtagttttggctttggcgcatataaccaggattacaattccaattgagactgtgagaaagctaagcgctgccaaatgaaaaataaaaaatctatcatctttcaaattaaaactggttgaattttcattttgcgttgaaattggtgttgaaatttctgggaagtattttaaccaatactcccgggcaagtggttgactccctttaatatgtttagatgttttgatagctataaatgacagataaccgataaaaataattgaagtagccaaaataatcagaaaatcaacgagcgttagatagaggttgacatgtagactgaatagcttatcgggcaggaggtttaaagttctgagaatggcaatagcagagactacaatggcgggtgcaaaatgtgcagtcgaatattttttattcttttgagcaaaggcattatagacccataatatgagagggcctgcgagcgttaatccaatttgaaaaatcagaagaagttgtagcttttgtataagattggagttttcgtacagaatggttccagcaaaaaccattattaaaaacagaatccacaagctgaatgatttaatctttaaactgtcacagtgttctattctgaagagaactacaattagaagcagaccgtttaaaatgcctgctgacagaatgaagacataaaatggaattgattttcgaccacctaaatcctgccaactttcgatggtgataagttttgttaattgatatcggtcagtaattattctattcggaaggtatgtattctcaggtccggtttcaatattcatccaattgcctcttgaaaacttatactccagagtatcgatggtgaaaggaaccttcacggagagtttgccatcagtgcgacgctgaagtgcgtattgtgggtcgttaattatccagttgttaaagttcccgcatacaaatattgtgtcattgtctggtgtgttggcaggtaaagattcgataatgatggtaatgtctgatgttgaattgttcgaaaatccattcagtattcccagggtcagatagaataatacagccaatgggtgttttaacattggtatttgtattttaacatatttggtagcgctaatttataaaaaatacaaaccaaacgcatgtatgtttgcaagcgaaataattttgtgcttgataatcaccgatgaaaatttatcatagaattttttaggactgataatgaaaccatccctctcacatccgtataagttcaaattatacaccgagtcataaacttaaatttataccaatgaagaaagtgctcttgtcggctctgattgcctgtatggcattactggcttcggcccagcaacatgtgccggttttagatgattaccagaggtttctgaaatccaagacgtatgtagtgctcgacgatgcgttgatgagcgattataacatgcgcatccgtgaaataatggcccgttcgtggaacatcacaccatacgaagtcatcacctccacagagtttgagaagataaaaaacaatccggaccattcgtttttgcttaccaccattgtcacctttgacaaggacaaaacaaaagcccgttacaactttttaagcctgctgatggggcagcccaaggccgatgtgcgcaccatgcccgatttgtgctcattgccattgtcatatcttcgcgtggatgaagagagttaccactacaagctggaggcttttgttcttttcatgcagaaccacgttaaaaatgtacttgccaatgagaaactgattggcgataagggatttcgtcagtataaccgcgagcgtggcagtttggcaggtaaaaagctgcttctcaccaaagaggatctggcacgagagttacagaaccccaaaaccattgcagccaactatccttatgagtttgaaattgtaacacgcgaggagattgcagcagccattgcacgtcaggatcctgatgtggtgtttctgcataaagtaggtcccgaaggcacacgcatacgtgctagggtttataaactgcttgttggcgctgccgattcaaagctttattattgggattatcagatgattaaacatgctactgatgatgcctttcaaatgaaagacttgaagcgtttgaagtaacagtaaaagattgatagagctgttatgcccaagtgtgaacagtcaaccacgaatagacgaaacggatctgatttatcaggttcgtttctttttttgaatcagttgcttttgataactttgccatctgttttcgcacaccgtttttgtgcgaaacattacttatgtgattaatttaaaactatatgtcagacgataagaagattatttttagcatggttggggtaagcaaggtttatccgccccaaaagaaagtgcttagcaacatttacctctcgttcttctatggcgcaaaaattggcgtgataggtttgaacggttcaggtaaatctactttgttgaaaatcatcgccggtcttgagaagaactttcagggagaggtcacattctcaccaggatattctgttggttacctgtctcaggagcctgaactggacgaaacaaaaacagtgcgtcagattgtggaggagggtgttcagccaatcgtagatgcgttgaaggcttatgagtcggttaacgagcgttttggtgatccggaagtgctcgaaaaccccgataagatggaagcattgatgaatgagcaggccaaacttcaggagcttatcgaccagtatgatgcctggaacctcgatagcaagctggaacgcgcaatggacgcacttcgctgcccgcccgaggagcagttggtgaaagaactgtcgggaggtgagcgccgcagggtggcattgtgccgcctgttgcttcaggagcccgacattctgctgctggatgagccaaccaaccacctggatgccgagtcggttcagtggctcgaaatgcacttgcaacagtacaaaggtaccgttattgccatcacccacgaccgttactttttggacaacgtggccggatggattcttgagcttgaccgcggtgaaggtattccgtggaaaggaaactactcatcgtggctcgaccaaaaatcaaaacgtctggctcaggaggagaaacaggcctcaaaacgccgcctgacacttgagcgtgagctggagtgggtgaggatggcgcccaaagcacgtcaggccaagtctaaagcacgtttggctgcatacgaaaacctgttgaaagaggacgtgaagcagaaagaggagaaactcgaaatattcatccccaacggaccccgtctgggcgaaaaggtgattgaggcacacagcgtatccaaagcttttggcgagcgcttgcttttcgataatctggagttctcattgccccgcaacggaattgtgggcgttattggtcccaacggtgccggtaaaactacgctcttccgcatgattatgggacaacagactgtggataaaggcactttcgaagttggcgaaaccgtgaaggtgggttatgtggatcagtcacacgctgccatcgacaacagcaaatcggtgtatgaagtgatttccggcggacaggagaccattcgcctgggtggacgcgaaatcaacgcacgcgcctttttgtctcgctttaactttgccggtgccgatcaggagaaaaaatgcggcatgttgtcgggcggtgagcgcaatcgcctgcacctggcaatgaccttaaaagaggaggccaacgtactgctgctggatgagcctaccaacgacatcgacgtgaacacactaagagcgctcgaagagggtttggaagattttgcaggttgcgccgtggttatctctcacgaccgctggttcctcgaccgtattgccacccacatcctggcctttgagggcgattcgcaggtgtactatttcgaaggcggctataccgactacgaagagaacaagaaaaaacgccttggcaacgcagaccccaaacggattcgttaccgcaaactggttaaagacagctagtcacgatattcattgagctatgcacaactgcctcatccggatttttatctggtgaggcagtttttttatgtgatggaggtttatttgttctgaagaatttctattaacagtgcatgtgttctgaaaagtggtctgcatggtttcttttaaacgaaaagcgagacaagttgtcctgtcccgcttttaatgttttcacaacggaataatccttattgtgaattgcttcaaattgtaacgcaattttacaataatttcagtaatttccaaaattattcatcagatgattattcttgacgcaaggaagtcatccgataaaccattaacacgcttttcaagtgaccattaagaaacaaattataaacagatgaattattgtttattacagcatggatttattgcattctgatacgataatacaattcaaatttatttttaaaacccttcatgggatgactataaccaccatgcaaatgtcatcccatgaatattacccttaactatatgaaaaaaattttaggactggatttaggcgcggcatctattggctgggcaattattagtgaggaaattgaaactgataaaactagagtagagattctaggaatgggcagtagaatcattccttatgagggaactgaaggaaaggattttgctaaaggaacaggtgaaagccgtaatgcactaagaactaaagcgagaacaataaggaaaggttatgatcgctatcaattaagacggaaatacttggttgaagagctcatcaagaatcagatgtatccagatgacgtattacgacatttaccaaaattacagttatgggaattgagaagtgaggcagtccactcgccagtctctttgaaagaacttggacggttgatgctttggttaaaccagaaaagagggtataaaagcagtagaagtgatgccaacttagggaaaaaggatacagattatgtagccgttgtaaaatccagacacgaaaacatcaaggaactcaattatagcattggacaattcttctataaagagttattagctgataattcctataaagtaaaagagaatattttccctagagaagcctatatcgaagagtttgacgcaatttgtaaaactcagcaggttgctcattctaacgttttaaccaacgaactgataaaaaaaatcagggacgaaatcatatattatcaacgaccattaaaatcccaaaaaggtttagtgtccgtttgcgaatttgaaggtttttggcgtaaaggcaaagatgaaaaggaatactttgtagggccaaaagttgctcctaaaagctcacccctatttcagttggcaaagatttgggagaatattaacaatattaaaataggttcgcgaactggtggagaaataaatataaccaacgaacaaaagagagcaatttttcaacacttagataataacgataaattgacttcttcagatttactaaaaattctaaaacttaaaaaagatgaatgctatgtcaacaagcagttaactaaaggtctaacagggaatattacaaagcatgctatcagacaatgcttaggtgatttagcagctaaatatgataacctactaaaacttgaattagatatcaatgtattgccaaatgaggggtatttatatgaccgaaaaacaggtgaagttttgggcagtaaacctattctggttattgatcctaaggtcgagtacgaacccctttatcagttatggcacaccatttattcgataaatgacaaagatgaatgtagcagggttttacaattgaaatttaatattgaaaaatcagtagccgaccaactagcagcgatagatttcacaaagcatgcatttgggaataaatcagcaaaagtaatacgtaagatattgccatacttgatggatggcgacggctacacagatgcaatgagttatgctggatataatcattcagcctcacaaaccaaagaagaaaatttgcagcgccaactattagattatttgaagccaattcaaaaaaactcgttgcgccaaccaatagttgaaaagatattgaatcaaatggtgaatgttgtaaattcaataattgagaaatatggtaaacctgatgaaattagaatagaattagcccgggaacttaagcaaagtaaagaagaacggaatgatgctgataagtcaatgagcaaacgacaacgagagaatgaattcattgctaagcgtcttgaagaatatgggctgcgtgcgacaagaaacaacataataaagtggcggttgtacgaagaaatggataatcaggataaaaagttaaatgctatatgtgtgtattgtggtcagcctatctcattaacacaggcaattagaggcgatgaggtggatattgaacacattataccaaaatcaaaactgttcgacgattcgcaaagcaataaaacactagcgcacagacactgtaataagacaaaaaatgatcttacagcttatgatttcatgaagagtaaaccagaagctgtttttaatgaatatgtagtacgagttaattatttatatgcaaatcatatcattaataagtcgaagcgagataagcttttaatgacagaaagtaaaattccggataattttatcgaccgtcagttgcgcgagagccagtatattgccaaaaaagcaagggagatattgcaaacgatctgttataacgtatggtcaaccagtggcaccgtcactgctgaacttcgtcatttatggggatgggatgatgtgacaatgaatctacaaattgataaataccgtgaacttggattaactcattttgtagaatgggaaagcgaccatggaaaaaacaaacatcaaaaagaagtaattactgattggacaaaaagagacgaccaccgacaccatgcagttgatgcattaacaattgcctgtaccaaacaaggatatattcaacgatttaatacattaagcgcatctaaaacgcgagaggatatgtttgctgaaattgagaaacgctcgcttgaatttaaggagaaacgctcactgttggagaaatatattataggagagcaaccgttttcagtattagatgttgaaaaagcggtagcaagtattcttgtatcgttcaaggcaggtaagaaagttgcagtttggggaaaacgaaaagctgggaaaagaggaaataaaaaagttgttcaagatagaattattgtacctcgtggtgctttgagtgaacaatttgtatatggaaaaatcaaaaggcaagagccagatagaccaataaaatatatatttgagaatccacatttaatcttcaagccaaaaataaaagcaaaagttgaagaaagactatcaatatttgatggagatgtaagaaaggctttagcatccctaaaaaacgatcctgtttatcttgatgaaaataaagaggttgttttggagaaggctacctgttggaaagatgagtatgttttaaaataccctgtagatattaacttcaacaaaatagataaagttgttgacaccaaaataaaaaaaatactgcaaaaccgcctattaaaatttggagaaaaagaaaaagaagcttttaaagatgttcagcttgaggataaaactataattaaatggtatgagcacgaaggcttggaacgaccaattaaatccgttcgttgctttacaggtttggcggccgttgttccggttaaaaaggatgagaatgggaaagatataggatttgtaaaacctggaaacaatcatcacattgccatatataccaatgctgaacaaaataagcaccaacatatttccacgttttggcatgctgttgaacgcaaaaagtatgggatacctgtaattataaaaaacacaaacgaggtttgggatttaattcaatccaaacctgaagggacatacccgacaagttttttagaaatgcttccgcctccgaattttaaactactggttagtatgcaacaaaatgagatgtttttattgaatatgccagaagaattgaaagaaaacttagatctaaataaaaaaagcacacttagtaattatttatatctggtctggagcctttccgataatgactattggtttagacatcatttggaaactaaaaactcagaattaaagagtgttgttggagcaaaagaaagtaacagattttatagatttaagagtcttagttcttttttttccactaatccaataaaagttaggctaaataatttgggtgatataataggtgttgtgcaataaaacaaaccaaaaactgctctattttatattagaattaaagcagaaatgccgcgttattgagggtttcactttgagtgaagccctcgataaaaagaaaatgaaaccctcaatataaaacaaccagacaagaaaatataaccactgtaaacccctaaccccatgcatttcgaagccaatcactgctaccacatctataatcagggtaataaccgccaaaagatattctttaacagggagaactatctctattttctcaccaaaattcgccagcacattttgccttatgccaatgtattggcatggtgcctaatgccaaatcactttcatttaatggtgagggtaaattttgttgagatagaaactgaaagtcctgccagtactcatccgatgacttcaagtcatcggatgagttataacgctcaatcagttatcaataaaacagcatcattaaaccaatccattgccatcatgcttcgctcatacaccagggcaattaacaaatcaaggaatttttcaggaagtttgtttagggcaaagaccaaagctgaatgccttacgaatcacaacggtattaccccatcgttttttaacagccaccagggcacgttgatttacacccccgacttattgcccgattatttgcaaacctgtttcaattacatacatcaaaatccggtcaaagccaatttagttaggagtattgcggagtgggaattctcctcagcacccgatttttatgacaaccggaaagggagtttggtgagtaaagagttagcatcgttgctcggcattttattgtagttgttaaattattgagggtttcactttgagtgatgccctcaataaagtgaagcttcctgtaaaaggtagattaacctaatcattcatctgatgactccaagtcatcggatgaatagtgcaagaatgtaaaaaggtagattaacctaatcattcatctgatgactccaagtcatcggatgaatagtgcaagaatctaaaaaggtagattaacctaatcattcatccgatgactccaagtcatcggatgaatagtgcatgaatgtaaaaaggtagattgacctaatcattcatccgatgactccaagtcatcggatgaatagtgcatgaatgtaaaaaggtagattgacctaatcattcatccgatgactcaaagtcatcggatgaatagtgcatgaatgtaaaaggtatattaacctaatcattcatctgatgactcaaggtcatcggatgaataaaaaataggagccccacaccatgtgaagctcctatagccattttaaaatcctgcggttaactattacaaaaacttataatgaaatgttattctaccggcattaaaaccattgtaaaatggtttttaaaaaacatgcagcatatttggattaaaacatgcgcatgttttgatcgaaaccacagcatgttttggttaaaaccacagcatgttttgaccaagatcacagcatgtttagggtgaaacatgcagcatgttttgttttgccatttgtagtagataaatattactgggaaacctttttaaagccggcattttctaatgcgttaacaatgcgtttcccgggtcgatagttcacgcttactcgttttatagaattagcagagagtttctcggccgtgtcagcaccattgctgcttattgaagggtatagacttccgagtttttcgagcctgaccaccctgctttgcgacagcttgttttgaatcacattttcaagtgcaatgattacgccccggatatcggcttctgaaagggcactgaatttctcaatatcagcaacaagttcgtcaatagttgcttcttttccgaacacaatctgtgcatagaactttttgtcgccaccccctataactccgggttgacctttttcaactggtttaaaatcaatagccataattgttagaattaaggatttaaaaatatcgcagggcttttaaaatgactgctttatgtttatggaaaacctgattgccagcctctttcaatgggtttcgggatattgaatgccggtaaagtcaggtagtatatcttttcatgtagcttataacgcaaatatgtttcattattgtatagtagggaggaattatttttatttttttatgccattatgtatatcagggctttggtgttgcagtttttttactaaaaactacagagtgattataaccatttgcgcatcaattacgtaactaattttaacaatttgaagtttctgtagttcatataccattcctgttatatggaatggttagttattaactgatgattttgagcttaccgtgataaatattcgacggatgcctcaaagtcgtttgatgaatgtgtctatcatgattaagaaaacactctattttggcaacccggcgtacctgagtacccgtaacgatcagcttgtaatcaatctcccgcaagccaatgggcttgatgattcgagtaatagaaacaccattcccatagaggatattggcgtgcttattaccgaccatcagcaaataactattacgcatgctctgttagataaactggtagccaataattgtgctatagtaacttgtaacagctcacaccatccgcatggtttgttactgcctcttgacggcaatagtgtgcagtctgagcggtatcgtcaccagttacaagcatcagtgcctcttaaaaagcagatgtggcagcaaaccatcagggcaaaaatcgagaatcaggccgaattgctccgaaacttgtgtggcgttgccacggataacatgatgcactgggccggaagcgtttcctctggcgatggcgaaaaccatgaggccagagccgccgctttttattgggctaatctgtttccttttgccggatttaaaagaggaagagaggaagatccgccaaacaatttgctcaactatggttatgccattctaagagcagttgtggccagagcattggtgggttccggtcttatgcccacgcttggtatacatcatcacaaccgatataacgcctattgtttggccgatgatgtgatggaaccctatcggccttttgttgataaagtggttcttgaaatagttaaaactgctaccaactataccgaattgaccaaagagataaagtggaagttgttaagcataccacagctcgatgtgattattaatggcaaaaggagtccactcatggtgggtgtgtcgcaaacaacagcatcggtttatgcttgttttgaaggcagcatccgtaaaattgcctatcctcaatttcctgaaccatggaacgattaaatgagtatagggttatgtgggtaatggtgttttttgacttgccaaccgaaaccaaaaaggatcggaaaatctatagcgactttcgaaagaaaatgctgaaggatggcttcgttatgtttcagttttcgatatatatacgccattgtcctagtcgcgaaaatgcagatgtgcacataaagcgggttaaaaagatgctgcccgaaaggggccacgtgggcattatcagggtaactgacaaacaatttggtgagatggagctattcattggcaaatcgcctgaaaaagttgaaacaccatatttgcaacttgagttgttctaaatagtaatcaaatcataaagcaaattgagggcttcgcattaagcgaagccctcaatttaaaaacagttccttaccagtactgtttcccaaattgccaacaacatttttcaatcctaattttcgaggtaaattacaaacatccaggcgattgtgttggggtctgttgttagcaatccaccaaaggtacaatttgaaagcaattcacaacacatttgtgttatcacaaaaagtacaagcagttgttagcaatccaccaaaggtacaatttgaaagcaattcacaacataagcggtcaaagaggcgttttaggaatgttgttagcaatccaccaaaggtacaatttgaaagcaattcacaactctgctgaatcaattgcacgtatgtaatcgttgttagcaatccaccaaaggtacaatttgaaagcaattcacaacttcttggtcgagctcttcgactattatgtgttgttagcaatccaccaaaggtacaatttgaaagcaattcacaaccagaatggggtgctgaatctgataagctgtgttgttagcaatccaccaaaggtacaatttgaaagcaattcacaactgaccccggttgtggtgtctgtcgtgatgggttgttagcaatccaccaaaggtacaatttgaaagcaattcacaacatggctggacatgctatatctgtcggcaatgttgttagcaatccaccaaaggtacaatttgaaagcaattcacaacaaacttttcagtttgtatcccttttttgtgttgttagcaatccaccaaaggtacaatttgaaagcaattcacaacgtaccaactgcaagattatcaggtaattagttgttagcaatccaccaaaggtacaatttgaaagcaattcacaacagggttctttgtctattcaccaaaaatgaagttgttagcaatccaccaaaggtacaatttgaaagcaattcacaacacagtgcaggcagaggctcaggtacaagcggttgttagcaatccaccaaaggtacaatttgaaagcaattcacaacaggaaatttatgaccccgaaacagacccgagttgttagcaatccaccaaaggtacaatttgaaagcaattcacaacagaagcacatcatttctcggattagtcaggttgttagcaatccaccaaaggtacaatttgaaagcaattcacaacttccgcgtaagatgcctgatggttcccgcggttgttagcaatccaccaaaggtacaatttgaaagcaattcacaacacaggggctcctactattacaggtgtaaatgttgttagcaatccaccaaaggtacaatttgaaagcaattcacaacttccttgcgtgttgttggttgccgtgattatgttgttagcaatccaccaaaggtacaatttgaaagcaattcacaacactgctcaatatgtaaggcgctatcagattgttgttagcaatccaccaaaggtacaatttgaaagcaattcacaacgcatgaacacaccggaacgcctttttcaatgttgttagcaatccaccaaaggtacaatttgaaagcaattcacaacaattctttgctcactgaaagctcctgtcgtgttgttagcaatccaccaaaggtacaatttgaaagcaattcacaactcaacaaacaggtcggcagaagtagcggccgttgttagcaatccaccaaaggtacaatttgaaagcaattcacaacacctcgccgtctggatggtaagtggtaacagttgttagcaatccaccaaaggtacaatttgaaagcaattcacaacaatgtcgctgctgccaatgaaagaagtgatgttgttagcaatccaccaaaggtacaatttgaaagcaattcacaactcaatgtaatgtgggggtatttgcttggacgttgttagcaatccaccaaaggtacaatttgaaagcaattcacaacttgatgacttacatctcccggaagctgaaagttgttagcaatccaccaaaggtacaatttgaaagcaattcacaacatgttcttcttcgtatttgcgaataacaagttgttagcaatccaccaaaggtacaatttgaaagcaattcacaaccgttcattaaaaatggaggcgaaggcaaaggttgttagcaatccaccaaaggtacaatttgaaagcaattcacaactgaagattactcaggatgagtttgaacactgttgttagcaatccaccaaaggtacaatttgaaagcaattcacaacagatgtgtttgaagctcaggaaagggcttcgttgttagcaatccaccaaaggtacaatttgaaagcaattcacaactataggatatactacatcaaatagggttaagttgttagcaatccaccaaaggtacaatttgaaagcaattcacaactgctctattgcctttaatgtcgataccaatgttgttagcaatccaccaaaggtacaatttgaaagcaattcacaacaagaagccctgaaatataaccacccccgcgttgttagcaatccaccaaaggtacaatttgaaagcaattcacaacaaagaggcacctaataattttaatgccttagttgttagcaatccaccaaaggtacaatttgaaagcaattcacaacatggtccaagtttattgaacccagccgtaggttgttagcaatccaccaaaggtacaatttgaaagcaattcacaacccggaaaagcattacatggatggcggatggagttgttagcaatccaccaaaggtacaatttgaaagcaattcacaacttggtaacggaggcggaactaacgatatgggttgttagcaatccaccaaaggtacaatttgaaagcaattcacaacaatgcagtttcaagttcataactgcgattggttgttagcaatccaccaaaggtacaatttgaaagcaattcacaactaattttcgggggcaatcggggaaagtgttgttgttagcaatccaccaaaggtacaatttgaaagcaattcacaacagttgaaaccatccccgtcgtaactgtgccgttgttagcaatccaccaaaggtacaatttgaaagcaattcacaacgcggtggatggcttcaaacgtggagataaagttgttagcaatccaccaaaggtacaatttgaaagcaattcacaacattacggacttttcaaagtttctgcattcgttgttagcaatccaccaaaggtacaatttgaaagcaattcacaacccaaggatgtatgattaaacgaaaaaagaggttgttagcaatccaccaaaggtacaatttgaaagcaattcacaactataaatcttgtaccagattgggttatatgttgttagcaatccaccaaaggtacaatttgaaagcaattcacaacaggatgtgtctaccaggcaattcaacccatgttgttagcaatccaccaaaggtacaatttgaaagcaattcacaacatggatttgcctgtgagggtgaatacaatgttgttagcaatccaccaaaggtacaatttgaaagcaattcacaactaaaaattttgggggccgtttcataatcaggttgttagcaatccaccaaaggtacaatttgaaagcaattcacaacaggtagctgtgaactatgtcaccgatatgagttgttagcaatccaccaaaggtgcaatttgaaagcaattcacaacgtggcacggtggcacgtgtttttagggtcgttgttagcaatccaccaaaggtacaatttgaaagcaattcacaacaatatgaccgcattgacctgcatgcggtgggttgttagcaatccaccaaaggtacaatttgaaagcaattcacaactagtcgatgtcaaaaatgattacaacagaagttgttagcaatccaccaaaggtacaatttgaaagcaattcacaacctaaaggccgatggtgttacagacaagacagttgttagcaatccaccaaaggtacaatttgaaagcaattcacaactagtggacatatagcgactaaaatttatgtgttgttagcaatccaccaaaggtacaatttgaaagcaattcacaactgctttccgcaccgcaacatcactttatcgttgttagcaatccaccaaaggtacaatttgaattgtagcgcagcggaaatcggcggagccaaagcaatgcatacttccgctaagtgtgtcacatccttcatcatcctgttaggcggttgttccactcatttttcaagttctcaaaatgttggcatatcggttattgtccatatatttgtgctagttggtaatgcgggtaagaaagtgccattaaccgcgggaggagggacactgacagctgaataagaccagcgtattgccaacaatcccgattaaaaagagaggtagcctatgactatctctcttttttggttatcaaactctacgctactgaagagccttcccattgttctcgttaattgggagccgtgtgcaactggtgaagatttccaagttttacctcaactattgttaccacactcacattgttatcagcaattccccttcgcagtaattaattatttaatacgttgatagtttgtatgtgcctgtgttaatgtttgttataataataatgatacatggaggctattgttgacttccatttagacctgtcatcgatttagtcttcaacattttggtatgataaacgcgtcatgataaaaaggttgtttctttcgatttacactgattttaaaaatatattaatccatgacctgtttcattttaccaatgcaaattcattaagatgaaaaggagatggttggttttgtgtttgtttatgggcgcttttcatctggcggcagagtgtcaggagctacccgaaacagtggttgaatctcccagattcaatccaaaagagcgcgtgaggagaactgaaacggtcggaaaaccggcattatgctgttacatggaaagcaatttggagtatcctttagaggagcaacagtgtggcaacgagggtgttgtggttgccatatttgttgtagatcccgatggaaaggttgctgatgtggtgattgaaaactctgtctccagagaactcgacagatgtgtgaaacgatgtattacatctacttccgggcaatggttgcctggcagggtaaatggtgtggcggtgccaatggaaagcagggtgaaagtgaattttgatatccgtggcaatggcacacaccaggagatggccaataagtatttgttggtggcaattcgaaagtgtaatcggggtgactggctaagtcttaatcctgatataaaccgacacagggtgaccaggaagtacaggcaggcgcatgaaaatttggtgctggccgataggtacgctcccaatcatccagctataaagcactggcatgtggtggtttatgaaaggcaggaggatttaacccgaatgaagacagcaatgtttgagcttgatgatatcttgctgcatgcactaaacgaataagggccttttaaaaaagattagttgatttaccgggctggtggtttcttatcgtcagcccagttttttcaggagttatccgaggtgtttacaacattttgtctgtctgcaattccttggttttgtttgcccttgattggaggggtctgtgcagatagtacatgtttacggctcctttgccttttactttgcgggagatgcggcgcaccagaacgtagtaatcattgataagctggtaggtggagtgtgatacgttgatttgcatcgggtcgcaataggattgcatgcgcgatgcggtgttaacggtatcaccaaaaatatcgaaagagaggttgttttcgctgatgatacccgccacaatgtcgcccgagtttatgccgatacgtatttgccagtcgatgtgatgtttttggttgtgctccacaatatattgtcgcatgcgttcggccattttagcggctatcagggcgtgattttgtgggttgtgccacatgccactcaccgccaggtaggcatcgccaatggtttttattcgggtacagttgtatcgctcggttatctgatcaaaggccgtgaaaatggtctgtaactcgtcgagcaaccttttgggcgacatcttttgcgactttacagtgaagtccaccaggtcggccattatcactgtcacatttttaaaccgtttaggggctatgtcaccatagtttttcatggagtccagaatttcggcaggcagcagtcccttaagcagttggtcgctttttttcttctcttcctccagttggtgtttttggtgcttcagctcgtgcagggtgcctgccaaagtcatggccgtatgcacgcgtgccagaagctcctgaggttcaatgggctttttgagatagtcgattgcgcctgcctc

SEQ ID NO: 1723 - DNA, 23759 bp, synthetic construct
  source 1..23759: mol_type = other DNA
  misc_feature 1..23759: note = Synthetic
gctcccattccggagaaaagaaaaaatcaaatgccagaaacaactgatgctgttgttcatcaacaggcgggaaattgccgggaggaccgatggagccataatattctataccaacggccatccatggaaaaatggaatcatccaccttaccattgggtgaaaacacaaacccgtcgccggcattcaggcctttcaatgatttttcaaaggtagggtttaatgaaaaataccatgtaccgagggttttatctatgataggcctgatctccaacgtccaggtatcttcgctgaaactgcgtttctgaaatccaaattccatagaaagacttactcccacaggccagtgcaggcgctcaggtacggccacacgcggccggagatgacttccaacataagctgtacgtccatcgctgccgaggctgttaaaaaaatacacgccggtttcaaaccattcattaaatccatgagtaatttccacggtttcgtgaaatacgtgcctggtgggcaaaacaccgttttcttgctgtgtgctgccttcaagggtataattgctgtgcagttccaccatggtgtgatgcggctctacgatatccgaaccatacacctgaatctcatagttgtcctgtgccctgcaggaaaaccaaatacataatccccagatgagcacagcccatttcatggttagacaaatgtattccacaaaccccatcagcttctttcacagaatgttacggatcggttaaatagccaacagcatcgggtaggaaattgtataatttcgcatcttagataatttcaatcattttggttaatacattgaaaaaatctattcacatgaacctccagcaactggaatatatcgtagcggtggatcaatgccgacattttgtaacagctgccgaacaatgttttgttacccaggcgactctgagcatgatgattaaaaaactggaaatggagctcgatactgtgatctttgaccgcagccgccagcctgttactcccacgcccgtcggagaaaaaatcattgcccaggcccggctgattctttcccacgtagagcgactcaaagctctggtagatgaagaaagaaactgtctgcagggtgaatttaaacttggcataatccctacgctggcaccctatctattaccacttttcctgcaggatttccttaaaaaatatccgcagatcaagttgcggatcagtgaactcactacggaagaaattgtgaaacgtattcaccagcatcatctggatgccggactgctggccactcccattgaagatcattctttgaaggaactccctttattctacgaacagtttgtggtttaccatgcccggcctgataagaaaaattataaaaaatatgtactggcatccgatattgatgtaaaccggctctggctgctggaagaaggccattgcctgcgtacccagattattaatctttgtgaactcaaagacaaatcaagcgcgttgcatcagctggattttgaaacgggtagcctggaaatgctgaaaaaaattgtagaatccacgcaaggtattaccattttacccgagctggctgtccgctatctgagtccgcaacagaagaaatggattcgttatttcaagccaccggctcctgtacgggaaatcagcctggttacgcatccgcattatgccagaaccaatatgctgcatgcactgaaaaacagcatcctggcccatattccggatagcatgaaatcacggaaacaaaaagaaattattccggctgtttcatcaaactgaatttgactgtttgttgtttgttagctcaataaccttttcacacgaagggataattcccgcggattgaatggtttggttacataatcattggcgccaagacgaaatgcatccagcacactggcttcttcaccggaggcgcttaataccagaatgggaatattgctttgcaattcctgcctgatgtgccgtaccaactgagtaccgtccatttcaggcataagcagatctgtaatcaacagatcaggcagaagacctgtaaactgttcaaccgcctttttcccgttttcacacaatacagttttgtatccttctttttttaaaacctgtccgagcgttttcagcaacagtggatcatcttcaacaaccagaatagttttcatgttatactgttttcaggcaacgatctcaagttgctttaaaagtaagggatcgttatcaaaacgaaaacaacctgcggatattttgcaaacattttacgactgatccggattgccgcttgatgatgaagccagttgtgcacgcagctgatcagcctgttggctgatttgtttcataatttcccggagcatggatttagcctgttcaatgtaaccagacatgtgatcatcctttccctgagcagcctgttgttcgatgtgtttcataatttccagcagggcatgcatatttaacaggcccaggctgcttttcaaacgatgtgccttttcacgtatctgatgaaaatctcttttttgataggctttttcaatctgatcaagggtttcgggagctgttttcagaaacagatccagcacctcgagggtatattgatcatcttccagttcaagaattgtgctcaaatcatagccattatgtgctcctgcagacgacgcagcatgcggtgaggcatttgcatacggaactgcatttgggtgatccctgccggccctgaagtcagggagcacccgatggataacctgtacaatatcctgtggcgtaaatggtttccggatacaggcattggcaccttcctgataggatcgttcttcttcatcgcttagcactgcagccgtcatggcaatgatgggcaggttaagatgcatttccttccggatatgccggatggcctggtatccattgacaacaggcatccgcatgtcgatgagcaacagatcataatccggacgctgctccaatctgtgtattacttcacggccattattcaccgtatccacttcagcgcccaaccgatgcaacagacgggaaataaatttctggttcacataattatcttctcctaccaaaatatgaagcccttgcagggaaagcatgggctgtgaaatctgcggcttgggttgtggttcggtagtacgatccagctgatagggaatgaaaacggtaaatacactgcctttgcccggttcgctcactacttcgatatgtcctccctgcaaattcacaagatattgtgtgatggacaatcccagtcccgatccgccgtatttgcggctgatggcggcttcagcctgggtaaaactttcaaaaatctgctgaatccgatcagcgggaatgccaataccagaatcggctacggccaattgaagcattacattatctttggtttcgccaggtaaggctttcacttccacccggataaatcctgtttcagtaaatttcatggcattacccaccagattcaccagcacctgtttgagccggtgaggatcgcctataagttgatcaggtacatcaggcgcacagacaatatcaaatgataatttcttttcctgggcccggaaatgaaacagatgatccagcgattgcaggatttctctcagcgagaaaggcaacttttcaatcacgagtttgcctgctttgatcttcgacagatcaagcaaatcgttgataagagttaaaagggtatcggcagcttcctgtatggaacgcaagaattcttgctgctctgcagtaagcgagctgctactcagcagataggtcatccccacaattccctgcaacggggtgcgcatttcatggctgatagtggtaaggaactgttcctgaaatttttcggcttcttctgctcgttgcttggcttcaaccagctgctgctgatattgtatcagatccgtgatatcagtagcaatgccgcataatccgaaaatcttttgctgctcgtcttttaacgggaatttggtaatgagaaaatgatgcggctcgttgttgacatagataatttcttctgttttaacaatagtggctccctgataaatgcgatcatcactttcatgatagctttttgcgagttctggtgcagtgatttcaaaatcagttttaccatatacctgctctccggttacatgcagggtttctttgaaagctttgttgacaaactgataacggtgttgaagatctttgataaaaataagcgaggtagtattatccatcaaagcttcgagcagatgctgattttcccttcgctggcgttctgcctgacgcaggcgcatcagcatttcttttctttcgctggtatccagtactacacattgcaaacccacaggctcttcttcttccagcaacagggttgaaaacatccggatccatttctccttgccttctttggtaagaatgggaaaatcaagggaggtatctgtcaatttgttttcaaactgccgcaaataaaactgtgtaacccgctcatgccagtcgggatgtaccagcactttataacttctgcctagcaactcttcgggtttatatcctgtaagttgctgcaccctgcggctgatgaaagtaaaacgtccatccaaatccgtggtaaataccacaacccgaacgccttcaataagtttgcggtagcgggcttcattggcaagtgcttcctgttcggcttttcttcgcctggattcatcttgtttcaattgccataagccggcccatacaaacaggaaaaagcaaatgctggctatcaatgtatatatcaccagcctgcgggaaatatgctgataggattgatcacgcagaaacaacagttgattttcttcccgttcaatgttgcgcagggtatgcgcccaggtacttgtctgcatcacagctccagctgaacgagatgcagatttatcagttatgacacgaaatatgaccagcaatgaatcaatcctgcttctttgcaacgggttatcagcgaccagtttaagcaatgcctgcaattcatcattcactgcacgacgccatgcgtctgattttataccagcatttgtaaaatcctgctgaaacaagtcctgcaggcgttgggtatgcgaaagcacctcataggtatgctgcacctgcttgcgttcagcctcaaactgacgatagtaggtaaacgcactgatcgtaaaatataaaaacaaacccagtgcaagaatgataaaaatagagatgcgttgcctgaacaacatggtttaacaggataggttaatggtaagcatatacgaaaacagctttgtattcgttgcgaaaattaaaaaatttttcatacctgaaaaataaaatataatcattatattttatgttttaatttaaaatgatgcaggggaacgtaggatgaaaggtctgatcatttccacaagtccaaacacaaagttctgcaaagcaaaaaaataacccaacaagctattttgcctgacgatggatttccctttatctttgtcaaatacagctattaaaagatattgttgatatgcatttgttttcgcacaaattacggaaaatccggcccacatctgtgttatatccagttctttggctgatgacagccggaagtctcgtaggctttttgccactttcggctcaggctcagcaaaacgaaggatattccggatccgtaagaaccaatcatgaaggcatcagccagatacctgtttcttattcccgggattttctgattctgcagctgggacatgatgtgtggagcggattaccttccggaataagtaccagtggctggaaccgcgatttcaacatagcattgctttatgatttcccctttcagcaaagtcatttcagttttgcactgggattgggagtaagtacaagcaatgtgtttttcaaaaattataccctcaacattgccgatagtgtttcctctcagctgaattttaccagcgacagcaaatacaacaaatacaaaattgccactacctatctggaaattccgcttgaatttcgtttccgccaggtttcacagaatgccaacaagggatttaaggtggctttgggagccaaactgggtttgaataccgatgcgcatgccaagggcaaacgtgtggtagccggtttcccggaagtggagaaattcaaaacccgccgcttttttaatccttaccgcgtggcagccacagcccgcataggttggggtaatttcaacctgtacgggagctatagcctcacgcccctgttccggcaaaataccggtctggatgttcatacctactccatcggcatttgcctgagcggactgtaaaaaatctgaatcatttccgggtccgttagggatttactgccggtgcctgcagccaattcaatacctgatgttgccataccagcagatcatggccggtttgccagtgatgcgccatgtcaggaaaataaatcaacctgccgggtatttgtaggtcctgtatttcattaaacaaaccccaaccctgttcggccggcacccatccatcattcccgcccacaccgatcagcatgggcagttgcgccaaaggccagcctgtctggacgatattcttatttttctgcatcagttgcacaatatcccgggctatccaccgggcagccgttgtggtgctccaggaaggaatatccaccacaggattccagagcaccagcgtatgaacagaaaaactcgatgccctgcgctgatccgatgcccacatcagggccagataggctccccatccgctgcccatgagtattacccgttgcgtatctgcctgattgatgataagcaaccgataaaggctgtcggccaaatcatgaagggttgccggatccagataaaaattcaacatatcatcagacaaaccttgttcggatgaaatggtaaacacctgatatcctgcgtcggcaagcatttgtggctgatcccacctcgttttgctgtcgtcatctgaaaaccatgtaaaatcaggcagacaaatgatggccggatatctgctgccggagtcagtttgagatggatgatactggtgaacccacacttttatcccatgcgcaagtgaaataagccaggaagaagggccgggcatggcgtcctgcgtagtatcggcctgcacaagcatgcgggcattgccgttttgtttgtccacagaaaaaatacgctgcatatggtgccatcgggaaactgctaccagccaggtagaaggggtttctcctaccaaagcctctatcctggcctgcaaatgggtaatctgccggatgacaagaggcgtatgcagacgtccttcatccaatacctgcacccgatagagttcagtccatgcagaatcgggataggtagccgtgaaaagcaaactctgtccgtcatttgaccaccagaaatgcaatacccttcctgcccggccatgcgtaaggttgtacaatgttttgcgctccaggtcttccaggatcagatcccgttggcctgtgtgtgcacctgcaacggactcggctatccaggctatccagcggcttttgccctggctggtagccggactgaatgcgggtgattcatgtctgatccatgctgagccggaacctctgtcaacagccgtttcacaggtcaggcaactggtaagtccatcttgcagatcatacagataaatttggctggctggtggagcaaccgaactatcctgcggcgcatctgttgctatttcctgcagggatggcttgtaggcggcatacacaatgtaacgctcatccggactccagtgtacttgggccagatagccattgatcagcgttgtatctacatcggtctgttcataaggcatcaaatcaaccggcatccccagcctacccatcgaatcaatccttgcatataacaaatgatgtgcatatccatcaatccagccatacataccaaatgccggtagcctgtgataaatgcgggcacgtgttttcccaaactgcggatagtaatctttggcatccacatcccgcactttttcggggtgcacaaacaacacataatcttttttcggtgaaatcagcatatgtgcatacggcgaatcaacctgcgtaaacgatcgcagcgagggagtatcagtacgcaacaaatagcattgatttcctctcgtgaaaataaattgatgcggagaaatccggattatattttccggttgtggaccatcgaaagtgaaaagcctgtttgcgcgagccgccgtcggattgagtggctgcatccagagttgatgccgcattctatcccgtccaatatcatacgatgatatcacataatacaaagcctgcctgccggcatcatcatccgtccagcatgcgctgatatagggagcttctgcaacccgttcgggcgtccacaccagttgggcatgagcgacatgcggcccactcatccatcccaagccaatcaggatatatctccatttgctcatagctgcttatccaagcctttccctgcaatgtactaactttgtatggctaaagaaaccagcattgattgattttcaaccaactgtcccgcaaaccgaaaaagccgttctggttgggattatcactccggatgttacggaagcccaagtgaatgagtatttaaacgaactggcctttctggccgaaacagccggagcacaggctgtgaaaacgtttgttcagaagcttcctcatcccgatccccgtacgatgatcggaaaaggcaaactggaagaaatcaaacgttacctggaagggaaagatatctccattgtaatctttgacgaagaactgagtggcacgcaaatcacgaatattgaaaaaatcctcggtgtgaaaaccattgatcgcaccgatctgattctcgacatctttgccagaagagcccgcacggcccgtgccaaaacccaggtggaacttgcccaataccaatacctgctgccccggctgaaaggaatgtggactcacctgggccgtcacggcggtggtatcggtacccggggacccggtgaaacagaaattgaaaccgatcgccggctggtgaaagataaaattgccctgctgcggaaacgactgaaagagattgaaaagcaggcacagctgcagcgcaaggaacgctccggatacatccgtgtagccctggtgggttataccaacgccggcaaatcaaccctgatgaatgcattgagcaaaagcgaagtgttcgctgaaaataaactgtttgccactctcgataccacaacccgaaaggtggtctatcagcaaacccctttcctgctcagcgatacagtaggctttatccgcaagctgccccatcacctggtggaaagttttaaatccacgctcgacgaagtgcgggaaagcgatatcctgctccatgtggtagatatcagccatccgcactacgaagaacagattgaagtggtaaaccgcacgctgcaggaattgggcgcactggaaaagcccaccctgctggtattcaataaaatggatctgtacgaacaacagcatttcgacccctatcttccagccgaaatccgccaggagctgctgcaacagctgaaagccgagtgggaacagcgcacccatggccatgccatctttatatcggccaccgaaaagcgcaatctggatgagttgaggcaaaagctctgggagcatatcgtggtactgtaccgccaacgctatccctatcagacagaatttttcactgcataggcgatgtaaaaacaaaaaatccctaattttgtcgtcccttccgctggtggccacaccagccacacagcaataccgacactcctccttagctcagctggttagagcatctgactgttaatcagagggtcgctggttcaagtccagcaggaggagcatattctttcccgccttcttttccgcaggatgtaaaataaaaataaaatgatttcgttgtaaatatctgaacaagaacatatatatttatccaaagtcctagcgccagccaattatattttgtagtatcacctcttaaattaagataaatcagcattatttaactattttatatccaaaaatcaattgtatgaaaaaaatcttaggactcgatcttggcgtaagttcaatcggttgggctttaattaaagaagaacaggaaaagcccgttgaaatcataggcatgggcgttagaattgttcctcttgacaccgatgaaaaccaggaatttacacaaggtaatacaatcactaaaaaccaggaaagaaccaagaaacgatcaacgcgaagaagttattatcgctatgttctacgaagaaaagcacttacagcagagttaaaaaaacatcaaatgtttaatgaaaaactatttggaatatcaaaattagagctatggggattacgatcaaaagcagtagaacaacaaatcagtttagaagaactagggagggtactgtaccacttaaatcagaaaagaggatataaatcagttaagaatgaagaaaaagacaataaagaagagacaaattatgtttcagaaattaagaacagatacgatttgctaaagaatgaagggaaaacaattggacaaaaattttatgaggaactaagcaaaaactatcattaccgtatcaagcagcaagtttaccccagagaagcatacatagaggagtttaataaaatcataaaaaaacaacaggaattctatccagaaattctaactgatgaattcattaatcatttacgagataatattatttatcatcaaaggaatctaaaatcacaaaaaggtcttgtgaaaacttgtgaatttgagggttttcatataaaaaacaaagatgggaaggaaatatttacaggtccgaaggttgctcataggagcaatccactatttcaaaccgcaaaaatatgggaatctatcaacaatattgttatcgaggataaaagaaaaaataaatatccaattaccatcgaacaaaaacaagctatttttcaatatctcgataacaatatcagattatcccaatcagaattatttaaaatattaggtattaaggataaaagcgaatggtatgggaataaaatgttaagcagagggattcaaggaaacaccacaaaagttgctataaaagaagcattaaataataatgatttagccaagcatttgttacaatttgaaatcaaagtaaaaaaagtaaatcaatctgataattcaaatacatatttgattgataatgattctggggaaataacaaaggaagaagggagacttatcgtagataataacattgtgaatgaaccattatatcaaatatggcatgtaatatattcaattagggatatcaataagtgtaagtatgtgttagtgaaaaaatggggattagatgaaataacagctgaaaagctagcaaaaatagattttacaaaatcatcgtacgggaataaatcaattaaagccttaaggaagatacttccctatctgatgaaaggatataaatatagtgatgctgcatcatttgctggatataatcattcaaagtcactcacaaaagaagaaataattgaaaaaaagcttctagataaaattcctctcctacctaagaatgtccttaggcagccagttgtagaaaagatactcaaccaaatgattcatataataaatgacattattgatgaaaatagaggatggatcacgagagaagaacgtgataaaggaaaatttgaaattcgcattgagcttgcccgagaacttaagcaaagcagagaagaaagaaatgaaacatataagaacctgtcaagaatagaaaaagagaataaggaaatagaaagacgattggaggaattaggtgtaagagcaaccaggaaaaatattattaaatatcgattattttcagaaatatcagaaaataagataaatgctacgtgtatatatacaggaaaaatgttttctctgactgatgcactgaacggaaatgaaatagatgtagaacatattataccaaagtcaatattattcgacgattcacaaagtaataaaacattaacattcagttacattaataaggagaagggagatcgtactgcatatgattacatggcatcaaaaggagaagaagaattgagtaaatacattgaaagagtcgatcaactattcaagaataagataatcaataaacaaaaaagagataaattattaatgccagccaacaatattccaaaagattttattgagcgacaaattcgtgaatcgcaatacatatcgagaaaatcaagagaaatactgaatcaaatatgcaaaaacgtttgggtcacaggaggaggtgtaaccgcctatttaagaaggatatgggggtgggaagatattttaatgcatttgcaattgaaacgtatcaaagaacttataccagatcctgtcggtgaaaaaattaccgaaattgtagaatgggaaacagaagatggtcagatacatcataaagaagtgattagaaattggaataagcggaatgatcatcgtcatcatgccattgatgcccttgttatagcctgcacaaaacaaggttacattcagcgtatcaataccttaagcgcgaaaacaaccagagacgaaatatttaaagaagttagccaacgcaatacagatttccgtgagtcccttagccttcttgacaaatattttattacccagaagccttttacttcatctcaggtagaagaaaaagtaaataaagttattatttcaatcaaaccaggcaagaaagtagccacctacggtaaacggtttattagaaaaaatgataaaagaattattgtacaggaccatattattgtgccaagaggggctttaagtgaagaaagcatctatggaaagattaaaattctggatcaaaagaagccagtaaaatacctatttaaaaatactcatctgatatttaagccatatataaaagaattggtagagcaaagactatcggaatataatggggatgcaaaaaaagctttagcatcactaaagaataatccaatttacttagacaacaaaaatagaaaagttcctcttgaatatgcttcatgcttcaaagaagaatatgtgattaaatatcccattaaatcaataactgaaaaggacattgaatatatagttgacaaaaaagttcgtgaaataatttctcaaagattaaaacaatacagtgggaataccgaagaagcatttaaagagccagtatacttaaacaatgaaaagaaaatacccattaaaactgtaagaatgtttaccaaattatctgctgttgaagtattaaaatatgatgagaatggaaaacccatagcatacgtaaaaacaggtaacaatcatcatatagcaatttatcaggatgaagatggaaaaaagatccctcatctttgtaccttttggcatgctgtagatagaaaaaaatatggcattcctgtgatcatagataatccaaaatcagtatgggataaaatcttatcttctaaagaaaactatcctcagtcttttctcataaaattacctgaccaaaattggaaatttatccaatcatttcaacaaaatgaaattttttacatatcaccggataataaagatgatataaatattgataatattgaaccctttaatttatatagattgcagaagataagcatgaaaaaaggaaaaaaaatagacttatggtttcgtcaaatatttgaaacagaaactaatgatagtgaaaattattctctaattaagaaattctataacgcacaaagtatttctagaattgagactttaaacccaataaaaataaaagttaatcgtttaggagaaatagaagctattgatttaaaataaataaaaagggcgagagttcccgccctatctgttttcacaacggtcatctaagaccttattgtgattagcttctatgcaaatatatgaattcatcacttaaattccaaaaaaaatcacataattacccatcctatgatcaaacgcaccctttattttgggaatccggcatatttgaaaacaaaaaatgaacaacttattattgaaaaacaggatactggcgaaactatttccactcctattgaggatatcggaattctgattctggatcatcagcaaatcactctcacccagtacctgctggccaagctgcttgaaaacaatgtagcagtcattacctgtgatccaacccatcacccggcaggccttttttattgcctggatggccataccctgcaatcccagaaacatcagcggcagattgaagcttctatacccctgaaaaaacaactatggcaacaaaccgtcgttgccaaaattaaaaaccaggcagaattattgaaacagcagcgtattgaaaacaaatatttgctcaaattatgtgaccttgtcagaagtggcgatccggataattgcgaagcaaaagccgccatttactactggaaacatttatttccggattttctgcaatttacccgggaccgaaacgggcctcctccaaataatttactcaattatggatacaccattcttcgcgcactggtggcccgtagcctcacagcaagcgggctgctacccacactcggcatccatcatcgcaatcagtacaataacttttgcctggccgatgacatcatggaaccctaccgtccgtttgtagatgctgtggtatgtcacattgtgatgatgaatggaaaatttctggacatgacgacatccatgaaaaaacaattgctttccatacccgccatggatgtgaaaatggaagatcagaaaagtccgctgatgaatgctgtgcaacgcaccaccgcttcactggcaaaatgctttgaaggatcatccagaaaaattctttaccccaccttctgctaaatcacccgccagcaggaaaagtggttctcaaatacacaacaggacatgaggtactcccgattaaacgcttaccggattatgtggattcttgtttttttcgatctacctactgaaactaaaaaggacaggaaaaattatgccatctttcggaaactcatgctggccgatggatttcagatgtttcagttcagcatgtacatccgacattgcagcagccgggaaaatatggaagtgcacctgcagcgggtgaaaaaaatcctgccacctaaaggtcatataggcatcatggcgattaccgacaaacaatttggtcagatggaagtattttatggcagagagcaggtaaatgccccttccaccatacaacagttagagctgttttgatagccataaccaaagaaaaacagcctagagaaaataaaaaatgtagcctagccccagttttttaattctaagaacttgataaaaccctctaccatggaggatttcatcaagttctactgttaaagagctaagctacaacaaatttgaaagctaatcacaactatgatagatgatatattatttgttaaatcactgttaaagagctaagctacaacaaatttgaaagctaatcacaaccccaaagggatcaagggccacctaccccgcactgttaaagagctaagctacaacaaatttgaaagctaatcacaaccaaaccggtataaatttgggaagtttgggactgttaaagagctaagctacaacaaatttgaaagctaatcacaactcggattctggacgtttacctaatgggagactgttaaagagctaagctacaacaaatttgaaagctaatcacaacgaagacagggtggctgtcagcaaccacagcactgttaaagagctaagctacaacaaatttgaaagctaatcacaactcgtgacactctttttctttctcgtacgaactgttaaagagctaagctacaacaaatttgaaagctaatcacaactagcaaatgctggatacaaattagcttctgactgttaaagagctaagctacaacaaatttgaaagctaatcacaactgaagctatgaaagaaggatacacacgaaaactgttaaagagctaagctacaacaaatttgaaagctaatcacaacgccaaattcggcaggaaaatcgccacgcaactgttaaagagctaagctacaacaaatttgaaagctaatcacaacactttactggataacccttgcgtttcaaagactgttaaagagctaagctacaacaaatttgaaagctaatcacaacggatgaagtaaatcaatttttttacttgtactgttaaagagctaagctacaacaaatttgaaagctaatcacaactcccggatggttctccagaaccacaaactaactgttaaagagctaagctacaacaaatttgaaagctaatcacaacgcactgggggtttaattatggggatatgaactgttaaagagctaagctacaacaaatttgaaagctaatcacaaccagatgtgggttcggacggctctgtttatactgttaaagagctaagctacaacaaatttgaaagctaatcacaacagcagagttttggactacgtaaactcattaactgttaaagagctaagctacaacaaatttgaaagctaatcacaacaaataaaagcagcatatttttgtcgtttagactgttaaagagctaagctacaacaaatttgaaagctaatcacaacgatccagatggatgggttgatattgctttgactgttaaagagctaagctacaacaaatttgaaagctaatcacaactactgtattaccaggtgctggatttaacaactgttaaagagctaagctacaacaaatttgaaagctaatcacaactactgtattaccaggtgctggatttaacaactgttaaagagctaagctacaacaaatttgaaagctaatcacaacaccaggtccggatgtcccacgacccacctgactgttaaagagctaagctacaacaaatttgaaagctaatcacaacacaagtttagtgggtaagagcgccactgctactgttaaagagctaagctacaacaaatttgaaagctaatcacaactaaatcaacagcagattctactatccaaaactgttaaagagctaagctacaacaaatttgaaagctaatcacaactaattcagccaatttctcataaatagaaaactgttaaagagctaagctacaacaaatttgaaagctaatcacaacacttaactggataacccttgcgtttcaaagactgttaaagagctaagctacaacaaatttgaaagctaatcacaacttagcccgctcccatccatgaaataacactactgttaaagagctaagctacaacaaatttgaaagctaatcacaacacccggtaaaagaccaccaccgctcccactactgttaaagagctaagctacaacaaatttgaaagcaaatcacaacaaaaagatttgcaacgtttgctgatgattggctgttaaagagctaagctacaacaaatttgaaagcaaatcacaactttccggccgggtgggagtgttccgcgactgctgttaaagagctaagctacaacaaatttgaaagcaaatcacaactaagcactataatgcaaataccattcttcgctgttaaagagctaagctacaacaaatttactccgaaatcaattatctgaaaaaggtctccgtgtttttcaacttcgttgaaaaatgaaagccaatcacaacctctgtttttgtcttatgcaacaacgcactttttaactgtttcccaggtgcgggtggtttgatctttgccaaaagtttgttccaataaactcatgaataccggtccttttgggtgaggaatatagctggtaaacacttccaagtctcgcacctgatgaatggtgacaccttcatattcaatgggcaatgtcagtttcgcatccggcgctttccacaaaaatgttatgacccgtttcgctcctgtaggcacctggtatctgctgaacggatctgaatcaagcaaatgttccaggtgcgccaccgaccgtaccgtaaccggaaagctgcggcccaactgctgttgaagctgtgcttcaattgtttgtgcgattgactcatcttttggggctgaagcattaaaggcaacgttgccgctggaaagaatggttcttacctccgtaaatccggctgcttccatgcaatgcttcaggtcggccattttcaggttcatggggcttacaccccgcagaaaagcgacaaatctcgacatcgtatgtttaatgatagtcaatgtttacaggtatgtgaacagcaggacttttgttcagagcagcatgaagcagtacctttcctgcgcgtacactttttcatgtacaaatgatacatctcttctgcacgctcccctccaacgatatcggcaacagcggaattctcagtgcgaaagacttgctgtcggcggtcatgccgaagcgccccgtcgatgacgatatcctggccaaccatgtaggccgcatccgccgacgcggaccagagcgcagcggatgcaatctcggggtcgtggcaactcgcttggaaggattggtagccgccacacgagcatcgtgcgccgcccggtcctcactaggccgaagcgacatcggcgtattcaccggtcccgggcacaggcaattgatgcgaatgccatactgaatggcttcgagcgcgctgttaaagagctaagctacaacaaatttactccgaaatcaattatctgaaaaaaggtctccgtgtttttcaacttccttgaaaaatgaaagcaaatcacaactagaaatgcatcaacaaataatgaacatgaaaagcgcattaagaggaatacatcacaagtgcagctgtaagcatttgcaaagttatttggatcagtattgttttaggacaaaccgtcgttcaatcgtaaaaccgattgttcttaatctattagataaaaccataaacaaaaagggaataacaaataagattttaaaggcgaatgcagcctaagcatattattctaaaaatttattttcccattgtatttattttccggagacatttgcggggcttgttgtatcatagcggtaacagtcgcaatattcttcatcacacaacaatcgccttaaagttttatctttaaaaacctctatataatccatcggctttttatttacataaatggttctgtaaaccaatcttattccatgactgtaatccacataccaatttacatggcccgtgtataaaggctgtattggttttccatctggattttgccagccataaattgccaccctgtcgggcttcgaattatgtgaaagtttatctgtaatcaccacatctttttttattcccacaatcaggccttttcgcaattttctctgcccttcaatgatcaggttatgctgatacatcgttacagcgctgtcgcggaaagcatacataggaacaggctccagctttacttttgcagctttataaatatcgtttacgatctttcttgtcggtaaaaaacaatgcaggctgtctgctattgattgtgccgtcatcggagtaagtggaattcttgcaaaatctttatccgggccgatagataaataatcaggagttacgaaataataagcatgaattattttgccatcatccatagtgattgacgtctttatttttaccatttttcttaaaaaagacggaatatttccgctaagagtttcattctttgcgcgtatttctcttacaatgcggctttcagaaaaaacgcttttataaaaatcagacccaatcaaggctttactgtttcttttaggtaaggtaaggtgcctggaactattacaggaaataaagagaaaggaaatagcaagagtaaataaaggaagtttcataaaaataaaattagcaaatgtattctctatgctgttaaagagctaagctacaacaaatcaattccgaaattaattatctgaaaaaggtctccgtgtttttcaacttcgttgaaaaatgaaagtaaatcacaacagcctcgccttataaaccgaccaagggggagtgcagaactatacgggtagctctccctacggaagtggggcggatgccgtgacctacaccggtacgctcaccatccgcggcactgcctacaccctcaagctcaccactcccggtgtcgctgtagatgctacagtaacccgagactcgagtggcaaagtcacaggcacccttaccggcaatggagtggacgccggaaccggtgtatggtaagcgatccccaaatcagctagggaaggctagctcctgctgtttccgggtgagctagcaactgagcgattaggtgtatagctcttcccactgaagggcaagggccccgccaccaaggcggaagccgactacctgcgcgggagttaagctctatccgcctttttccgcatagcctcgagcgcgtcccactgctcaggagttatcgcatctagcacgttgaactcgcctgcgttccaagcactctcgccaccgtcgatgtagatcaagtcgccggtgataaagcctgcgtagtcggaaactaggtaagcggcaaggtttgctagctcgatgtgctcacccatacgcctgagtgggatccgctgctcgaagaggcgctcgatctgtggagtaggcatcagccgggtccaggcgccctcagtggggaaggggccgggggcaatggcattgaggcgaattccatacttgccccactccgcagccagcgagcgggtcatagcgactaccccggctttggcgactgccgagggcaccacgtagcccgaaccgcgctcggcgtaggtggtagcgatattaagcacggtgcccttttggtgctgagcgatccagcgcttccctagctcgagcgtgcagtacaaggtcccgtggagcacaatgcccagcaccgcgtctaccgcccggtgcgaaaggcgctcggtgggggagatgaagttccctgcagcgttgttgaccagcacatccacccggccgaagtgctcctccacggtgtctatcatgcgctttaccccctccggatcacgcacgtccaccggcgtggcaaaaacctcacccccgctctcggccatcatctcccgggcagcttgctcgatcacctcggctcggcggctggtgatggcgacctgggccccaagctgcaaaaaccgggtgctcatcgagcggcctaatccggtgccgccacctgtcacgaggatgactttatctttgagtaaacctggctcaaacatgcaaacacctcctaaaaacagcaaacccatcttcctgtctagcctaccctgctatcccttatgaccaagagcggcctcccaagaagagtagctgttaaagagctaaactacaaaaaatttactccgaaatcaattatctgaaaaaggtcaccgtgtttttcaacttcgttgtaaaaaaaatgaaagctaattataataatgccgtagcctgaaataagtattattccacaatcaaagtactaaacaacaacctgcacctctctgctggcaggtgttaagagaacgaaaacttacatgctattaaattaattaaaatggaagcttatcgctatttggtatatttattagccttgtagcttcgttaatactgagcttattaagccgggtattgcttgtaaaattcagcacccaatctggattgattttactatattgtcttaagatccaacctattgcctttgcaataaagaattcatttgaaacagaaaaagaacaaattatatagcttaaaaacccggtatcaatatcttttccaaaatttaactgaaaaagtattgaagttctttgcaaccaaatattatttgaatgaatccatttttctacacttatgttcctttgctcaggataaatcttgaaatattcacctaccagtttggttgcaatataatcaacagtatcccaccatgatttatgaagtatcatgaattcaaaaagaataatatcccttttattaaactgttttatgtatttctcagttagctcctgtgcgaaatattgatattacctttgaggcttctcccaaagtatttttactatcttacccaaatcatctttaggtggtaaattttccttgatcaataaggatttctgaatctttctcctgaccaaagtttttattccataaaactcaaactgatttttcatatacgccatctgccataatgcaatctgtggatttgagttttttctaaactccgtttccagaatctgtaaataatcttccattatttatctcattgtaagttaagattgcttattatagcgtggatttaaagtaaataaatatccaaatttacaggtaaataagaaactagtaaatgccaagaaatcattctctattgcaaactctatcagccgaaagccagtttcatcattttatttatactttccagaaaatttcctttatacatggatttttatttaaagcaaaattttcctggatgaggtgcataagtatgatgggttgaaaaatacgcgccgctcaagcttcagccataaaagtcagttgctgcagtacgacggtttaataacagcaatttataaacagcatagtgagcatgagtttttcaggcatgccaggcaaaattattttctgaaacctataaatacccgaatcacaagcaacaatatcgctgtataaaaaatttacgattcgaatatcattcatctgatttcttttgatacacccttacataatcaattgccatttgtgcaggaaaaatatggggatcaattccgtgctgaccgccccaatcaccgccaatcgctatattcagaatcaggtaacagggcttatcaaagggccattctgcaaatgttttgtgctcatttacaaatgtgagataacgtatggtatctacgtaaaaatcaattttctctggtgtccattcaatcgcatacacatgaaaagcatccatacaatccggcacatctatgattgctgttttctgggtattttgaggccagttgtatgctccggtatgaatgctgccatgaatttttcccggatcaaaacccacatgttccatgatatcaatttcgccacaggcgggccatcccaccttatcaatatcgtcgcctaacatccagatggcaggccaggtaccgcgtccgcgcggcaattttgctcttacctctatgcgaccatacgtccagctggctttcccccgggtgatcagactggcagaagtgatgggcctgatggcaccatcaatcatggctgaatcatttctggcttcaatgattaatatgccgtttcccacacgtgcattttccaagcggccacttgtgtaatactgcttttcatgatttcggagataaccctgttcataattccatttggtactatccggtgaacctgtgtaatcaaattcatcgtgccagaccagctgccagccagtatcggcagcatcatgaggaaatgtgtcggcttgtatcaatctggaagcaggcaatgagaaaggtgagatcacccaactgttcatccagatcgtagccaaaccaagcaaaaaacagatcatatacaatgatggtttttatatgaataatagaactgcaaaatcatcttaatctgcccgttcatcacgttcatcctcttcctcatctttctcatccgctgcctgtataaatcccggaggcaactttttatccggagaaacacccagtttaaccacgcgtgtagccacactgattaagttaccttttccttttgtgagggttatcatggcatcgtcataagcatcctggatttgctgaatacgattcccaaccacttccaaacgctggcacaaaatataaaatttatcgagcattttttttgcttcttctgcaatttgctgggcgtttttctgttgtttctcctgccgccagatac

SEQ ID NO: 1724 - DNA, 23756 bp, synthetic construct
  misc_feature 1..23756: note = Synthetic
  source 1..23756: mol_type = other DNA
aagatataagaattaaattcatcgggataaatttactttaatttccactcgggaaacagattagaaaaaaatgattatgaatcttgtgtttcttttttaatgaaaaattgaaattttgatttcatttttttgttaaataaaaaaagtatgaaataatatggaagaagcgcagaaagagctataatgccagaaagtgcttcgttggtaatatataaacgcagaataaacaaagtgacgaggataattaaaaagggtattacaaatgccagcaaaactgcctgaagccccattgaagtctggccatagagcataactctgtcacctacccgaaacgaagggtcagaagtctcaacttcaataatcttatcatctttatccgcagcactacaagcaccattggcatgacagctactacatgctgatagttgggtgattaacacttgaatatgatgaccttgaatgtgatgtatggttccagtatgttcgatttgttggctcattttgtaatgtggacattgcaatttcggctcaaaagtacagattatttatgattgtatcaaacaaataatactgaaaaaacgtcaaataaatagactggacatatatacaactagcatacaatagtttaagctagtaatgattttaatttttacgatattttataatatttactgcacattttaatcaatactgtgcaataaaaaaaacacattaatatttatatatcatgtgtttttaaaaattttaatttgaactatgccgtttaagtagatcaaaaaaaaataaagacaattataaagtaaatatgtatctgattaccagtcttatatttaattaataattgtgcattattaattattaattacttaatatccgtcctttttcttcgaaccgtctttcatcaactctacaggtttttgctgaagcagtggtattttcttataatcccaagtttcctcaaactcccagttcgccattaaagtaagttttttctgataataataaacttcttcgggttgttgttttgtagtaaaatcacctgtatcccacttaccgttttcattttcatcaacaaacattctaacataataatcgccaggtttaagatatttgaaaacgactcctttttcctgagcttgttttgtgtaaagcaatgcatcttttgaatcaagaatttgcagataagccgtaggattatgttctgataaaaacattttcacactggaatactcatccaacgatctgattttgaaatcagaagagagtttgttacttgttttcttgtatatgcttttaaatgctgacgaatcaattttcaactgataagttgtttctgcaatccacttataattaatcgtgtacgtcattttagtggagtcaacttttcgccattcaaacggaattgttttaaaggttgtatcgatcttttgacttaatttgatctttgaaatatcaatttcttctaacggagcttcgaagcttagctttataggattgtaaatttcaaacgtagacgaaatattattgctgaatttcaattccaaggcctttaaatcagtagcggttttctttataggcttggctttcgggttcactcttgctttgcgcattgcaacgttcaatgtatctgttacaggtgccaattggaaaagcgaatctgttttcaaataagtcatggtcatttccaatgtatcattttgaaaaaccaatgaatcagtcaaccaatacgtcaaactatccattgtactgtttttctgaagcaaatatttcccttcccaatcgaaattcaacggttttatttttggtaattctgtttgtggagcattaaaaaacaggctaaacacaaatggctctttgcgttcatattttacgaaatactgtcgttttttattttctttaaaaaagcgcagaataatatcatttggtagaaatttagtgcccatataacttctgatactatccacagtagttgagtctttccacactgtatctttcatttcttcgatactgaaagtgggttcaacgattgaatcgtgcattgctaacccttctccaggctggaagaaatagtcgcggttgacatcacccaatgcaaatactttatacgaccctttgtgcacattatcaattgaaaatcgaccattctcatctgtctttccaattctcagaaaaggttttttcagaaaaactgagtcattagtctctttataaatgcctacaaaaacgcccgaaattggatttaaatcctcggcatttattacaactccagcaatttttagcgtatcaatctcattgcctgtagaaaaagaaaagagataatttttcaatgcatttttttcgttcaaatccacaatggaatttccgaaattaatgctataggtagtgctgtccaacaaatcttcattaaagctcacagaaactcttttcccaagtgatttcacatcgggcggtttcacttgaggaggagaaattataacgttctcgcttgctttttctattgaaacaatttcatcaaaatcaatttcaatctgctttttattgaaattcaaacttccgtttaaaggagatgattttagcacttttggcggtgtttcatctttaggtccaccggtgggtccctgcgcacgattggcacaggaatatgctataaacaggatgactatgaagaaaagtatgtatttagtgtagttcataaagtttgaaaagtttgaaaggtttgatggtttgaaaggtttgaaaggtttgatggtttgaaaggtttgatggtttgatggtttgaaaggtttgatggtttgatggtttgaaaggtttgatggtttgaaaggtttgatggtttgagaagtttgtaatcatttttcattataactttttttcaaactttacaatctaactattttttcattgtcaacactttatttccaattcggcagcgtaagcattttttatcatcgcaataatatttttttaaatgcagcaatgcctgagaatcaaaagctgattcaatttttaatcccaaattctgccaaccgtttacaattgcatttttctcgcctggaatttgttccaacaattccaatgctttatcttttagaatctggttattcttttgatatgcatagcaaaataaaaacggaataaccgtatttattaagattacattaatggactgagtacctaaattcttatcttttttatcactttcgtgagcaagcaaataatgtgtctgccaataatcggaaggtttacaggcaaataatgtgcgtaaaaaatgtatttccggattatctaatattttggaaaataattttgacgaagaatgaattaaagctgcaaattgagcgattcgaatatgcggaaaattatcgggtcgcaagcgcaataacttccattgaacagcatccatttgtttcaatccgtactttgcagatagaaattcatattcttttttcaatccttccacataatcatcatgagtatctgcttgcaacaaaccagcctgaccgaataaaatggcttccagttgaaacaactgatctttgtgcttccctaaaacagaaagaggagttgaatttgccaaatgctcgaaagcctgactattggttccaaatccaaagttccgtgccaaagtaatataaaacgcttcttcccaatgttgattatttgcagctagtaatgattcaatggattgcattttttgctcaagccgttccattagtaatgcatttttccaactttgaataaaaatggaaggtacaaaaccaattttgttggcacagggaatccatttttgctcatttataagatggtcgtaattagtctcaatatgttttggataaacgagttcaacttgtggaatgttctcgccatctattctgaaaacatctgtgtctgcttcctttacaacatgtagaatgacgctgtcatacgctttatcgacatgatgattgtgcttgctccaatcagttgagcaggtgtgaatttccacattcccagcccaaagtgtgtcgccaattcttatttttgcattaaaaaaatcgggacctgcatcggtattcaactttccaacatcgataacctccaccaactcaccagttgttgttttcatatcataagctgtaaaaagcttattttgccaaacgtaatgcaagatggattctttcatcggttaaaaagtggcccccaacccctgaaggggagttaagataatccttaaagggaattgaaattagttttgacttgtgtgttatttatcttatccgttttttttaattgacagtaatattattattcccctttagaggttaggggttttacaaactctcaaactcatacccttcacttttccaccattcaattgccaatggcagcacgtttaacacattattttttgcttttacagaatcatgaaaaacaactattgaaccgtttcttgaaaatcgttttatattgctcataatttgatctgtagtcaacgtacggttataatcacgtgttattaaatcccacataattatctcatagtctctttgcaacgcccttctttgagaaaatgtaattcgtccgtaaggtgggcgaaatagtttgctgtcaatatattcagctgccattttcacattgctcaggtattcttctttggaaacagaatatccttttaaatgatgaaatgtgtggttcccagttttatgttcatgtgaaagaatatcagcataaatttcaggatatttgtttacattttcgcctacacaaaagaaagtagctttcagattatgctcttttagaatatccagaacaaaaggtgtaacttctggcaccggtccatcatcaaaagtaagataaattactttcgatgctggattccttcgccatgtgagtttccccattaaagggcgtaaaatatcagggaactgaatgttcatttacatttgaactcttttggaatattccatataacgaggcatatacttttccaatattgtattttgttttgcctcatcgctaattcttaacacttggttcaacacagccagattatgtccaattcgattggaaacactgtttttattcaccgttgacatgctgagataccaatcgaggtattcaacacaatcttttcctacagcatccataatagcattacctttagcgggttctcctactttgtaataataatcggctaattgtgttgaagtataatcgtgacgaaccgttgctcccggaattactttattacaataatccaacgcttttttggcacgaaccgtatcgcctttatttattaatgcaccaatcaattgagcaaacatcatacgttgagtgcgacacatccgcaagatattctcgtctaaatatacttttggattttcaatgccgccaaacttgaatttagtcatcatgttattgtacatttcttccgtatttactcctgctcctgcaccttttacgccaataggcaaaatttgatacgccataccggttaactcaaaatgatcgttaagacccatataatagtcatcgccaacagttactgcaaaatagatagggcgtttccacttattttctttcaacatttcaataatcatcaattcactcttggtcaagcgacggttcagtgtaaagtcaatttgaggaacaatttcgccagctctttcaattggcaatgttccgctttttattacttgttgcgcatcaataggcaagtacagttcttttgttggaataaaagattcgcctttcagttttgttgccggatcgtcgctcagcacaaaatcaaatgcagtttgaacgtctatcggtttctgaagcatatcttccacccaaagcacttcgtttttgcccgaaacataatccttttctttccacgaaatgggtagaggagccgatttatatgcaccacgtttcatttgtccgatataccagtcggtttgcaaataacttaaattacaaactctcacatccgttctggtaccttctacttcctggttgtaccaaagtgggaaggtatcgttatcgccattggagaaaataattgcattttctttacaagatgccaggtaatttgcaccaaagtcacgtgctgtgtagcggttgctacgatcgtgatcatcccagttttgttgtgccattaatgccggaacacccaaacaacaaatagtaaccaatacagcacttaccgtttttggcaggtatttatcaattgcttttataattccgagcactcccaacccaatccatatagtaaacgcatagaacgaaccggcataagcatagtccctttcacgtggttggtatggcgtttggttcaaataaatcacaattgccagacctgtgagtacaaataacaatgttattatccaaaatgtatgaattccttcttttccagaataaatgagaaataatattccaaaaatacctaacaacaatggtaacatatacaacgtgtttcttcctttattttctagcatttcggtgggcaaatttgattgatcaccaaccagaatattatcgataaaaccaattccggtaatccagtttccacggtcgatttctccaccgctctgtaaatcattttgtcgaccgctgaagttccacataaaataccgccaatacatgaaattgacctgataactgaaaaagaagtgaaggttttcaccaaacgtaggttttacatcacttttttgttgtccgcaataatcataatttatcttttgaccttttacatttccccaggctttatacgcttcaatatgcgaaggtgtagtgctgtacatacgagggaaaagcatatcaaaccgttcgtccatcacataatcggttttataaccggtaatcatgtattcatctttgtcggttgatgctgattttggttttggagcatattgagctgcaccgatagtttgttctggcacacacatatttccctccactttcagttttaccggcgaattgtaggtttgaccatatagtaaaggacgatcgccatattgctcacgattcagataatatttcaatgaaaacacattatcaggtgagttttgatccatcggcggttttgcgctggaacgaataacaataactgcataagtagaataaccaatcaggatgactgtaatcatcaataaagatgtattgagccaacgtgcatttattttctcctttttaaaatagaaaaatgcacccataccggcaattatcaaaagtccaagaaaaatatgttgtccgaaaaacggaattccgacaatggttactgcaagcacaaacgaaattgccatgcgaatgtaacttttaccaatatacgactcgtaaatagaccacgataaaatgcaaacagtaaggataatataggcaaataaaccactgttaaagccgaaaccaagtgtgtttacaaaaaacaattcgaaccagctggcaacttctaccgaaccgggaattattccgtaaagcactgaacctagaatgactaccgaagccaccatcgccattaccactccttttgccgaaggcgtataatttttaaaataatagactaacacaagtgccggaatcgctaataaattcaacaagtgaacgccgatggaaagtcccatcaggtaggcaattaatatcaaccaacggtcggaacccgacttatcggcaacacgttcccatttaagaataagccaaaaaacaatagcagtaaaaaaggatgaataagcgtacacttcaccttccacagccgaaaaccaaaaagtatcggagaaagtataagccaacgctcctaccatacctgcacccagaataccaataacattggcaatggtataatcttcttctgatttcacaaccactttacgcgccaaatgggtgatagtccaaaacaaaaataaaatggtgaatgcacttaacaatgccgacaaagaattaatcattaccgctacctgagtaggatcagaagcaaataaggagaaaaaacgtcctgtcaacatgaaaaagggtgctcccggcgggtgaccaacatcgagtttgaaagcagtagaaataaactcaccacaatcccaaaagctagctgtaggctcaatagtaagcaaatacgtaacagcggcaatagcaaaagctaaccacccgaaaatgttgttcagtaatttgaatcgtttcatttattttatttgtgttttgtgttttgcgttttgtgttttgtgttcagtgttcagtgttccgtgttttgtgttcagtgttccgtgttttgtgttcagtgttcagtgttccgtgttccgtgttccgtgttttgtgttccgtgttccgtgttttgtgttcagtgttcagtgttttgtgttcagtgttcagtgttcttggttcttggttcttggttcttggttcttggttcttagctcttgactcttgactcttgactcttgactcttggttcttggttcttgtttcttgttagctcttaaaaaaacgttcaaagatacaaagaaattttaatttgtacgaaatgtgaattttattttagataaaattaaaagattaagaataatttagacatatttgactgctggttgtggtacacaattaatattagaagtaaatataattgctaaaaaatcaaaaagttactttcatgcgaattatttaaaacgtctgacttcaactttcgaattgacatgaagcaatcggaatattcaacattctttttgtttaaattaaaaaaaccgagaattagaaagcaacatttctctattcagttttatttgtaaaaacttaaaatacaaataattaaatccggacttctttattgaacatcctttgttgtagctgtaaaataatatttatacatttgtccattaaattaaaattaatggacactatttcctcatttgctgaacttacagctcatcttaaaagtattaattcccggaaacgcatggcagttgccaatgccgttgattcccatactttggatgcagttttgagagccgtggaaatgggattaattgaagcctttttaattggcgatgtggcttcaatcgaatcgcccgagttgttcgagcatcatctttctgcacacattcacattatcgatatacctgatgtacaagaagccacaattgaagctgttcggatggtaaaatcgggcgaagcagatattttgatgaaaggattggtaaataccgatgttttattacgggcaattttggataaagaaaaagggattttacccgctggaaatgtgctgacctataatgcagccatggaagttcccaagtaccacaaactaattttcttttcggatccggtggtcattccatcgccaaacttagtgcaacgcacagccatgattaaatatgccatcgcaacggcatataaatttggaattgccaaaccaaaagtggctttgattcacgccaccgaagtagcaaatcctaaaatccattacatgcaggactacctggacattatgcaaatgtggcgcaacggcgaatttggcgatgtgataatggatggtccgctcgatatttttctggcattagacaaagaacggggaagcataaaaaacgttcccacaccggtactcggcgatgccgacattcttattttccccaacttcgaatgtgccaatactttctacaaaggattatcactttttgccgatgccgaaatgggcggtttactacagggaactgaaaaacccgtggtactcacctcccgaagcgaaagtatagattccaaattttacagcattgccatggcgtgtgtgctggcataagactctttctcttttattaatagtctttcaacctttccaaagttctaaactttggaatagttgtttatacaagaaagcgaccctgtattactacaaggccgctttaaatgttttcacaacggaataatccttattgtgatttgcttcaaaaattgtattgcaaagatatgtaaaaaataatatctaacaatattagtttattaaaaattttatatttaactttagcgccaattaaatgacttaaataaatattacaaaatgaaaaagatattaggtttggatttgggaacagcatctgtaggttggagtgttattgaagaaaaaaccgagaaaggaaagatcaaaacccaaatacttggattagggagtagaatcatcccttatgaaggtacagaaggaaaagactttgctaaaggtactggtgaaagcagaaattcacttcgcacgaaagccagaacggcacgaaaagggtatgacagatatcaactacgtcgaaaatacttggttgaatctttagggaaaacaaatatgttccccaacgaaacattgaagaatttgcctaaaatagaactttgggcattgcgaaacaatgctgtttattcagaaatagccttacaagaacttggtaggctattgttatggttcaatcaaaagcgcggttacaaaagtagccgtagtgatgcaaatttaggaaagaaagataccgaatatgtctctacagtaaaaagtagacacgaaaagataaaagaactcaatctaacaatcgggcaatatttttataaggaattatccaatgacccatttttcaaagtaaaagaaaacatctttccccgagaggcatatatagaggagtttgatgctatttggcaggaacaatcaaaacaccatttatttttggacaattgttcagaagaaatcttaaatcaaattgctaaaggtatattccctggtgaaaaacaagaacattatcgtcaagaagtaataaaaggtggattgtataatacaattagaaatatgattgtctataatcaacgtccattaaaatcacaaaaggggttagtttccgtatgcgagtttgaaggattttggcgaacaggtaaagacggaaaagaatattttgtaggtccgaaatcagcccccaaaagttccccaatctatcagttatctaaaatgtgggaaaatgtaaataatatcaaagtaggttcaaggtcaggtggagatattgaaatcagtgtggaacaaaaacaagctatctttcaacacttagataacaatgaaaagctaacagtcacagatttgctaaagatactcaaactcgacaaaaagaattgttacatcaataaacaggtagaaagagggctagtcggcaatatcactaaacatgccattcggcagtgttttgggaactcaactaaatacaaccatcttttgaatttgaatttacacactgttgagactgaaaaaaaaggatacctaattgataaaaagactggagagatattagatgaaaagtctattaaatttatagatgcaaaaattgagcaagaacaattttatcaactctggcacatcatttattctattcaggacaagcaagagtgcagcaatgcattgcaagccaaatttagtattgaacccaatattgcagacaatctagctgaaattgatttcagcaaatatgcttttggaaataaatctgcaaaagtcattcgtaaaattttaccttatttaatggaaggcaataaatacagtgaagccatgagctatgccggctacgaacattctgattcattgaccaaagatgaaaacctaaaacggaaattgctggatactttgaaaccaatacaaaagaattctcttcgtcaacctattgtcgaaaaaattctcaaccaaatggtgaatgtggtgaatgcaattattgaaaagtacggcaagcccgatgaaataagagttgagcttgctcgtgaactaaagcaaagtaaagatgaacggaacgaagctgaaaagaaaaacacaaaacgtcaacgtgagaatgagaatattacaaaacgacttgcggaatatggattaaaggcaactcgtaacaatattctcaaatggagactgtacgaagaaattgataatgaagaaaagaaattgaatgctgtttgtatttattgcggtcaacctatttcattgaccgaagcaataaaaggtaatgatgtggatattgaacacattattccaaaatcgaaattatttgacgattcacaaagtaacaaaacattggctcaccgtcattgcaataagaataaaaacgatttgactgcctatgactttatgaaaagtaaaccaacagctgtacttgaagcttatatcgaaagagtaaattcattatatgccaatcatgttatcaataaagcaaaacgggacaaactcttgatgactgaagagaaaattcccgataattttatcgatcgtcaacttcgtgaaactcaatacatatcacgcaaagccagagaaatacttcaaacgatttgttacaatgtttgggccaccagcggaacagtcacttccgaactcaggcatttatggggttgggacgaaattacgatgaatcttcagtttgaaaaatacaaacaactgggtttaacagaaatcgttgaatggcaaagcgaacatggaaaaaacaagcatcaaaaagaagtaatttctggatggacaaaacgtgacgatcaccgacaccatgcgattgatgctttgactatagcctgcactaagcaaggttatattcaacgattaaacacgttaacctctgaaaaaacacaagaagattttcgaaaagcgttggaaaattgcacgattgatttcaaagagaaacgctccaaattagaaaaatacattattagcgaacaacctatctctacagcggaagttgaagatgcggttgccaacatcctgatttcttttaaatccggaaaaaaagtggctgtcattggaacacgaaaagcaggaaagcttggaaacaaaaaaatagttcaaacaggaattattattcctcgcggttcgttacatgaagaaggagtatatggctcaattaaacagtataaaaaggagagttcaaataaacatgtatcatttgagaatcagattgtaaaaaagtataaattaggtgtgggttcacaaggatttatttttacaggaaaggaaacctatgagcaaaaagaaaaaatcaataaaaaaacgggagaagaaaccaaagttattattgataaatttcagagaacattagattcaattgttgataatggcataagaaaagtaattttgaacagactaaatttcggatttgacacaggagaatcttacaaaactaactctaagaaagcacttgacaatctaaaagatttagagaataatccaatataccttgatgtaaataaaacaattcctatcaaatcagtcagatgttttaccggattatcagccgtagttcccataaagaaagatgaaaacggaaaggatattggtttcgtaaaatcaggaaataatcatcatattgcaatttacaccgatagagatggtaaaaaggttgagcatctttgcactttttggcatgctgtagaacgaaaaaaatacggaatcccaatcatcataaaaagtccattagaagtatggagtatcattgaggataaaaaattgcctgaatcattcttaaataatttaccttttgttgattggacatttgaattaagtatgcaacaaaatgaaatgattattttaggtatagatgatattatcattaaagacattttgaatgcaaaaaatataaaaatgattagtaagtatttatacaacattcaaaatttgtctgaaaagcaatatcgtttttctcatcatcttgaaacaaaatttgatataacaaaaatgaaccaaccagataataggttttataatattagaagtgttgactcattatttaaacttaatccagtcaaacttaagattgaccgccttggcaatatctctttatagttacaacattatttctcaatttaaaattttggaaaaggtttagcaaaaaaaagtagaactaataatggaaaaacttaaacccgatacgagttatcatattttcaatcatgccaatggctttgaaaatgtgtttagcgaggatgataactttcgttattttctggagaagtatcgggtacatatttctcccattgccgaaacctacgcttattgcctgatgccaaatcattttcatttggtggtgcggattcgaaaacgcgaagtgatagaaaaactcatactatcaaataacttttctaaaaataacctttccaaagttctaaactttggaaaagttgatggaaaagaaatcgatagagaaaaagttgagacaaacgaggtgattgaaaaatttttatccaaacaatttgccaatttatttagctgctacactcaatctttcaataaagtatacaatcggatgggttcattgtttataaaaaattttaaacgtgacgtaattctcgacaaagctcattttttgaatacaataatgtatactcatcgtaatcctgttcatcacggtttttgcaaagaatactccgattggggttattgctcttatttcgaagtggtggatggaaaaagtaccattgtagaagtagagaagttaatcaaaacctttggtggcaaaatagaatttattaatctgcacaagaagtatctcggtaaatttcatcaatctcttgaacttgaagtataatctcttcttcacttttccaaagtttagtacgttggaaaagttagttgtttggagatattagttgtttggaaatatttggtgctttttcgaagtttggtacgttgaaaaagtttaaatacaaaacctacgagtatgataaaacgcacgctttatttcggaaacccggcttacctgagtatgcggaatgctcagttattgattcacctgcctgatgccaatggaatggacgacaaaataggcaacaatacaatagccattgaagatattggcgtggtgatactggatcacaaacaaataaccataacacacggattgatggaagcattgcttgccaacaactgcgctttgataacctgcgatagtagccgaatgcctgtaggattaatgcttcctttgagcggaaacagcacacaaagcgaacggtttcaggctcaaatagatgcttcgctcccactccaaaaacaactttggcaacaaaccattcagcaaaaaattgaaaatcaggctcatgtattgaactcaacccgcaaagtggtggtaaaaaacatgttggtatgggtagaagatgtaaaaagtggagattccgacaatctggaagctcgggcagcagcttattattggaagaatctatttcctgacattccagatttcagacgtggtcgcgaaggagtgccaccaaataatttactgaattatggctatgcaatattgcgggcagtagtggctcgttcgttagtggcaagcggactgttacctaccttgggcattcaccatcacaatcgttataacgcctattgtttggctgatgacattatggaaccgtaccgtccgtttgtagataaattggttattgagataatggaaagtggcgaagatatcactgatttatcaaaacaaataaaagcaaaactgctcaatattccagtactggacgtacaaataaacaatcaacgaagcccattgatgattgccgtgggactaaccaccgcctcattggctaaatgctacttaggagagattcgaaaaatactatatcctaatttctaattaattaactatttcctcctactaccttttcaaaagttctaaactttggaaaagtttgtcgaagaaaaaaaataaatggaacgttttagtgaatatagaattatgtgggtattggttctatttgatttgccaaccgaaaccaaaaaggagaagagggcatacaccgatttccgcaagagattgataacagatggctttgtcatgtttcaattttctatttatttgcgccattgtcccagccgcgagaatgcggatgtacatataaaacgagtgaaaaactttttaccggaatccggacaagtaggcgtactttgtattaccgacaaacaatttggacaaatggagctatttcaggggaaaaaggaaaaatcagtttctactccttatcaacaattggaattattctagtctcttctattttctatcatcaagccgctccaattagtcattttttccctttcaataaacttttccaccagcaacttttccaatcgtctactttttcctatcgtcagctattcctatcatcaacttttccttcatcaacttttccttcatcaacttttccttcatcaacttttccttcatcaacttttccctcatcaacttttccttcatcaacttttccttcatcaacttttccttcatcaatttttccttcatcaacttttacttcatcaacttttacttcatcaacttttccttcatcaacttttccttcatcaacttttccttcatcaacttttccttcatcaacttttccttcatcaacttttccttcatcaatttttccttcatcaacttttccttcatcaacttttacttcatcaattttttccttcatcaacttttccttcatcaacttttccttcatcaatttgtccttcatcaacttttacttcatcaacttttccttcatcaatttttccttcatcaacttttccttcatcaacttttccttcatcaacttttacttcatcaacttttccaatcgtctactttttcctatcgtctgcttttcctatcgtctgcttttcctatcatcaacttttacttcatcaacttttccttcatcaacttttccttcatcaacttttacttcatcaacttttccttcatcaacttttacttcatcaacttttccaatcgtctactttttcctatcgtctgcttttcctatcatcaacttttacttcatcaacttttacttcatcaacttttccttcatcaatttttccttcatcaacttttccttcatcaatttttccttcatcaacttttccatcatcaacttttacttcatcaacttttccttcatcaacttttccaaagttcaaaactttggaaaagttatataccccaaccaaccaaccaaccaaccaaccaacaggaacaaaaatcccgccttgtgagcgggatttcgtttgaataaacaactgattttttaattctaaatgctgccacaactaattgactgattacacattacacatatcgtgttgttaatcaagtcaaagatacaattttttgaaagcaaatcacaacgaattcacgacgacaaaaataaacgcattagttgttaatcaagtcaaagatacaattttttgaaagcaaatcacaacttgcagattgttctgaagcattcaaatttagttgttaatcaagtcaaagatacaattttttgaaagcaaatcacaacgttattggctatgctaaaacatacaaagaggttgttaatcaagtcaaagatacaattttttgaaagcaaatcacaacttgaatggcacacaacagcgatagacttcagttgttaatcaagtcaaagatacaattttttgaaagcaaatcacaacaataaagctgcatttattgattcgttggttgttgttaatcaagtcaaagatacaattttttgaaagcaaatcacaacttgtaaaacaaatttgagttcaacacgattgttgttaatcaagtcaaagatacaattttttgaaagcaaatcacaaccactacttacctactcacctactaacttaagttgttaatcaagtcaaagatacaattttttgaaagcaaatcacaacctaatccctgattacgaagacagatacttggttgttaatcaagtcaaagatacaattttttgaaagcaaatcacaactaatccctgattacgaagacagatacttgtgttgttaatcaagtcaaagatacaattttttgaaagcaaatcacaactaagaagttgctgtttcttttacgaagtttgttgttaatcaagtcaaagatacaattttttgaaagcaaatcacaacctattgcttaacagctacatggttacaaagttgttaatcaagtcaaagatacaattttttgaaagcaaatcacaacaatcaatagctgaatctcaaccgctgttaggttgttaatcaagtcaaagatacaattttttgaaagcaaatcacaacacagtatgccgaagtgcacagggcgcaaagttgttaatcaagtcaaagatacaattttttgaaagcaaatcacaactcattgaaccaagcttcttttcgcacgtttgttgttaatcaagtcaaagatacaattttttgaaagcaaatcacaactgagctatcgaattttcagcaaaaaatttagttgttaatcaagtcaaagatacaattttttgaaagcaaatcacaactgcaaggcgatgattacaattaaatatcttgttgttaatcaagtcaaagatacaattttttgaaagcaaatcacaacacataaagaaactgcaccccaactaaagttgttgttaatcaagtcaaagatacaattttttgaaagcaaatcacaacaacttttgacaagttcaaatactcattgttgttgttaatcaagtcaaagatacaattttttgaaagcaaatcacaacactttttgatgggatgagttgcttacaaatgttgttaatcaagtcaaagatacaattttttgaaagcaaatcacaacaccttgcgtgaagacccacacaaccgatgggttgttaatcaagtcaaagatacaattttttgaaagcaaatcacaacatgtgaacaatactgcagatttcgtggcaagttgttaatcaagtcaaagatacaattttttgaaagcaaatcacaacacttatcggtagcaggatttagtgctgccagttgttaatcaagtcaaagatacaattttttgaaagcaaatcacaacgtggtgttggagttacttcaattagtggaagttgttaatcaagtcaaagatacaattttttgaaagcaaatcacaacggcttttattctcataaaatatttacataagttgttaatcaagtcaaagatacaattttttgaaagcaaatcacaactgctgggcggtttatcagcactaaattaaagttgttaatcaagtcaaagatacaattttttgaaagcaaatcacaacatttgtatcggatccatcttttgtcttttggttgttaatcaagtcaaagatacaattttttgaaagcaaatcacaactcaaacttgctgcaacatcaattatgagaagttgttaatcaagtcaaagatacaattttttgaaagcaaatcacaacgtaaatccgggaatgcgtattgtatatcttgttgttaatcaagtcaaagatacaattttttgaaagcaaatcacaactgctcttcgcccattacggctttactcatggttgttaatcaagtcaaagatacaattttttgaaagcaaatcacaacgtgatatcccagtcgtcttgactccaacgtgttgttaatcaagtcaaagatacaattttttgaaagcaaatcacaacagcaacgggtgaagcacccgatgacattgcgttgttaatcaagtcaaagatacaattttttgaaagcaaatcacaacggtacaaggaaaagaaaatgatatctatttgttgttaatcaagtcaaagatacaattttttgaaagcaaatcacaactccgagagtggtctttacgcattaatattggttgttaatcaagtcaaagatacaattttttgaaagcaaatcacaacgtgaatgagcctgcactaactacatttatgttgttaatcaagtcaaagatacaattttttgaaagcaaatcacaactcgttacttttactcttacttttactaacagttgttaatcaagtcaaagatacaattttttgaaagcaaatcacaacactcgaccgttagccgtcagtttacaaaaagttgttaatcaagtcaaagatacaattttttgaaagcaaatcacaacgaggttctggcaggttcgtaaaccttgtcggttgttaatcaagtcaaagatacaattttttgaaagcaaatcacaaccggtaacccagacttggacgcaaaatgtacgttgttaatcaagtcaaagatacaattttttgaaagcaaatcacaacgtagtacctacaatcgcattacctgtccaagttgttaatcaagtcaaagatacaattttttgaaagcaaatcacaacctactatacaggtgaagacgaaccaatttcgttgttaatcaagtcaaagatacaattttttgaaagcaaatcacaacggctaggcgatgatgaaataaaacaattatgttgttaatcaagtcaaagatacaattttttgaaagcaaatcacaacatagcttcctgctttgctgcatcttcatttgttgttaatcaagtcaaagatacaattttttgaaagcaaatcacaactctatttctgcattttctgtttttgttacgttgttaatcaagtcaaagatacaattttttgaaagcaaatcacaacaattactatctccggttcttcgcctaccagttgttaatcaagtcaaagatacaattttttgaaagcaaatcacaactaaaccaatgttctctatattttattgtaagttgttaatcaagtcaaagatacaattttttgaaagcaaatcacaacaatcaatatcaaattcagaatcaaatggacgttgttaatcaagtcaaagatacaattttttgaaagcaaatcacaacattgcaatcatcatttgcttgccgagggcagttgttaatcaagtcaaagatacaattttttgaaagcaaatcacaacgataatgaagcgcgcatctatcccctcagagttgttaatcaagtcaaagatacaattttttgaaagcaaatcacaactttttttgcgtagttgctcaaagtcttcaagttgttaatcaagtcaaagatacaattttttgaaagcaaatcacaacatacttttacaattattcctcttgttttcagttgttaatcaagtcaaagatacaattttttgaaagcaaatcacaacagaaagcgagattgtcagcacgtcaccagtgttgttaatcaagtcaaagatacaattttttgaaagcaaatcacaacccatacaatcctagatggctttgtgcaatggttgttaatcaagtcaaagatacaattttttgaaagcaaatcacaacgggattgtattgttagtgatatacgttgttgttgttaatcaagtcaaagatacaattttttgaaagcaaatcacaacccgttttcctcgctcaaatagtttctacgtgttgttaatcaagtcaaagatacaattttttgaaagcaaatcacaacaaatctatgtcgattgataagtctaacgcagttgttaatcaagtcaaagatacaattttttgaaagcaaatcacaacatgcgcaccgatctgtcgccaaaatgctgagttgttaatcaagtcaaagatacaattttttgaaagcaaatcacaacctaataccattatcatcccctgtggcacgggttgttaatcaagtcaaagatacaattttttgaaagcaaatcacaacccgttttgaaagtcggaatttttcagtaagttgttaatcaagtcaaagatacaattttttgaaagcaaatcacaacaaaaaaagaccaactaataacaaaccgtgtgttgttaatcaagtcaaagatacaattttttgaaagcaaatcacaacacaccacccggcaccgtgcattgcagctacgttgttaatcaagtcaaagatacaattttttgaaagcaaatcacaacaatacggcataaaggacaaaaaaaaatgctgttgttaatcaagtcaaagatacaattttttgaaagcaaatcacaactcgtcgccacccggcacactaagtacggtgttgttaatcaagtcaaagatacaattttttgaaagcaaatcacaactgattttggaagatatggatggcaaacaaagttgttaatcaagtcaaagatacaattttttgaaagcaaatcacaacttattggctcgcatatagtcaaggcataaagttgttaatcaagtcaaagatacaattttttgaaagcaaatcacaacgtaatcagctatgatagcaaatatgtattcgttgttaatcaagtcaaagatacaattttttgaaagcaaatcacaaccataatcccacatattggttttgaagaaatgttgttaatcaagtcaaagatacaattttttgaaagcaaatcacaactagcgattcatacatcacatttatatcagagttgttaatcaagtcaaagatacaattttttgaaagcaaatcacaacgcatgtcaaactagtatagtgaacaaatatgttgttaatcaagtcaaagatacaattttttgaaagcaaatcacaacacaatcgccaagagatatgatgtataaagggttgttaatcaagtcaaagatacaattttttgaaagcaaatcacaacatcatatttcttgccgataatggcatttttgttgttaatcaagtcaaagatacaattttttgaaagcaaatcacaacattgcaatcatcatttgtttgccgagggcagttgttaatcaagtcaaagatacaattttttgaaagcaaatcacaacacgaaatggcaaagcagactatgtacaatggttgttaatcaagtcaaagatacaattttttgaaagcaaatcacaacacactttccatcgtgcaaagcagccgggtaagttgtttatcaagtcaaagatacaattttttgaaagcaaatcacaaccattaccgggttacaatcagtgaatacaatgttgttaatcaagtcaaagatacaattttttgaaagcaaatcacaacataattttttcaaggttgtagttttctttggttgttaatcaagtcaaagatacaattttttgaaagcaaatcacaacacactagggagccgggcaatgaatttagcgttgttaatcaagtcaaagatacaattttttgaaagcaaatcacaaccttgttggaagtaatacattttgcaaataagttgttaatcaagtcaaagatacaattttttgaaagcaaatcacaacacctatggtaagttatattattcggaaggggttgttaatcaagtcaaagatacaattttttgaaagcaaatcacaaccatttatttcggtagagccatcaactattggttgttaatcaagtcaaagatacaattttttgaaagcaaatcacaaccatgaatagctgtaattcgcttcgcaacttgttgttaatcaagtcaaagatacaattttttgaaagcaaatcacaaccgacaacagaaacctacttgaaaaataaaagttgttaatcaagtcaaagatacaattttttgaaagcaaatcacaaccaccgtcccggatgaagtgtcaaattcactgttgttaatcaagtcaaagatacaattttttgaaagcaaatcacaacaccgtgaccacggcatcaataaaattttgtcgaatagccgacggcaatacctgaatgatggaaacttccaaattaagcaccgccagtatagtaggaatataccaagctgcaacaccggcaccggcaagtaaaagaagtttggtaagtttgcccattggtttttcgtttttaaattcgaatgcaaatataaggagggtaaaaaaaaagtgggaaaaataggaataatgggaattttgggaataatgggaaaaatacaaattacacgaattagagaataaaaaaaagccgtaactaattgttagttacggcttttaatatgtttgtgtattttatttatagtgaccccacatcgaaataat

SEQ ID NO: 1725 - DNA, 23753 bp, synthetic construct
  source 1..23753: mol_type = other DNA
  misc_feature 1..23753: note = Synthetic
gacggaggtgaaacccgcttccattcggtaaagaatggattggcttatgttactactccgggattggttggtgtccatgatggggtacgtccgtttgtttcccgggaagtcatagcccgttgttatgaattggctgccgaaaaaaaggcggtgattcccgtgatagatgtggtggagactgtacgccatcttaaaggagaagaaagtgtgaccgtcaaccgggatgagtataaattggtacaaactccccaggtgtttgatgccgatttactgaaacaggcctatgaacaaccttatacttctttctttacggacgacgcttcggtagtggaagcgatgggagtatctgtatacctcgcggcaggtaatcgggaaaacattaaaattacgactccctttgatttgaaaatagccgctgctttgttggattcatgtttgatttagcttctcgtgacataaaatacctgtcgggtgtagggccgcaacgtgcctcagtactcaataaggaattgaatatctattcccttcacgacttattgtattatttcccctataaatatgtagaccgtagccgtatctattatatccatgagatagacggtacgatgccttatatccagttgaaaggcgaaatcctgggctttgagacgattggagaaggtaggcagcgccgtctgattgcccatttctcggatggtacggggattgtggatttagtctggtttcagggaattaaatttctcgtcggtaagtataaggtacatcaggaatatattgtatttggtaaacccagcgtcttcaacggacggattaacattgctcatccggatatcgataatgcttcggaactgaagctctcgacaatgggattgcaaccttattataatacaacggagaaaatgaagcggagttccctcaattctcatgcaatagagaagatgatgagcgccgtagtgcagcaactccgcgaaccgctgcccgaaacgctttctcccgctatattgacagaacatcatttgatgccgctgacggaagctttgatgaatattcattttccggcaaatccggaattgcttcgtaaagcgcaatatcgcttgaaatttgaagaacttttttatgtacagttgaatattctccgctatgccaaagacaggcaacggaaatatcgtggatatgtatttgaaacggtaggagagatattcaatactttctatgccaagaatctgcctttcgaactgacaggtgcccagaagcgtgtactgaaagaaatacgccgggatgtggggagcggtaagcaaatgaaccgtctgttgcagggggatgtaggtagtggaaaaacgctggtagcactgatgagtatgctgatagcgttggataacggttaccaggcttgtatgatggcgcctaccgagattctggctaaccagcattttgaaacaatccgcgagttgttgtacggaatggatatacgtgtggaattgctaaccggttctgtgaaaggaaaaaagcgggaagccattctcaccggtctgttgacaggagatgtacgaatactgatcggtacgcatgccgtgatagaagataccgtgaatttctcttcactgggtctggtcgtgatagatgaacaacaccgtttcggtgtggcacaacgcgcacgtttatggactaagaatgtacagcccccccatgtgctagtcatgacagctacccctattccgcgtacgctggctatgacattatacggtgatctcgatgtttccgtcattgatgaactgccgccgggacgtaaacctattgtgaccattcataaatatgatgcgcaccgtgtaagcttgtaccaatccgtacataggcaaattgcagagggcagacaggtatatattgtatatcctttgattaaggaaagtgagaaaatcgatttgaagaacctggaagaaggctaccttcatatttgtgaggaatttccggattgtaaagtctgcaaagtgcatggcaagatgaaagcggctgagaaggatgcgcagatgcagctttttgtttcgggcgaagcacagataatggtagcgactactgtgattgaggtcggcgtaaatgtaccgaatgcttccgtgatgattattgagaatgcagagcgcttcggtttgtcacagctccatcagttgcgtggtcgtgtaggtcgtggagcagaacagtcttattgtattttagtgaccggatacaagttggtcgaggaaacccgcaagcgcctggaaattatggtacggacaaatgacggctttgaaatagctgaagccgatctgaagctacgaggtcccggtgatttggaaggcacacagcaaagcggtattgccttcgacctgaaaattgccgatatagcgcgcgatggacaactgctgcaatatgtgcgcaatgttgctgaagaagtggtggatgctgatcctaccggtattcgtccggagaatgaaatcctgtggcgccagctaaaggcacttcggaaaactaacgttaactgggcttccattagttgaataacggttaaacatacactttatttgcatttttatgttgtaaaacatataagtccttatcttgccgatatacagggagttaggaggtgatttgatatgtaccttttagtcccttaccgaaaaaatagttaagaacagccttttcatttagagaagaaatactacctttgggagaattttttaaaagaatgacgaaacggaatgaatttcaattgcattaaaacgatcctaatagctgcgacggcaatggtcagcctgaattctttttctcaggatttgattgcccgacaagcccccatcgacaggaaactaaagagcgttgactcgttggctttacagaaacagatacgtgctgaacaatctgcttatccaggtctaagtctatatccgacttggaacaatgagtatgtacaagcttatggcgatgctatcgttcctgaaagctataaagtggacctgacaggtttctgtatgcctaccacgcatacgaagattaccgatgtattcggttatcgccccagaagacgcaggatgcactatggcttggatgttaaagtattcatcggtgatacgattcgagctgctttcgatggtaaagtacgcgtagtaaagaatcagggacgccgtggctatggtaagtatatcgttattcgtcatgacaatggactggaaactgtttacggacacttgtccaaacagatcgtggaaattaatcaattggttaaagccggagaacctatcgctctaggtggtaatacgggacgttctaccggttcgcatcttcactttgaaacccgtttcctgggaattcctatcgaccccgctttaatgttcgactttgaaaagcaagacgttgttgctgatcattatactttcactaagaccaagacttcaaaaggaactgctcgcagcatggcttccggtgaaggtttgttctataaagtgaagagtggcgatacattatctaagattgcatcccgtcagggagtatctattgacaagctctgtcagttgaatcgcattacacggaaaacaatcttacgtccgggacaggtattacgttgttcgtaagatatcaataaacccataaagaagagggcactttaatataatttagagtgccctcttttcttttttctttaattattcctacctttgcaaccaatttgtaaggaaatgaaagataccaaacaacaatttgagcatgtcattgccatctgtcgtgatttgttctccaagaaactacatgattacggtccggcatggcgtattctccgtccggcttccgtgactgaccagatattcattaaagccaatcgtatcaggagtattgaaaccaaaggagtgacgttggtggacgaaggaatacgttccgagttcattgcgatagtcaattatggtattgtcggattgatacagctggaactgggatatgcggaatcagccgatatcacgaatgaagaagcaatggcgttgtatgacaaatatgctaaaacttcattggatctgatgcttgctaagaatcatgattacgatgaggcatggcgcagcatgcgtgtcagttcatacactgatctgatattgatgaaaatctaccgtacgaaacagattgaaagcctgtcaggacagactttggtttcggaaggagtggatgctaattatatggacatgattaattattccgtattcggtttgattaagattgaatttggagactaaacagaaacatataatctggaagagctgggtgaatgtttgccgttttttattggcggtggtattcatcttttccggctttgtgaaggcagtcgatccgttaggctctttttataagattcaggattatctgacggctttcggaatggccgcgtggtttcctacatatttgcagctactgtttgccatcgtattgtcggcgttggaattctccgtgggagtattcctgttcttcggtatacggcggcggtttgctacgactctggcattgttgctgatgatcgtgatgacaccgctgacactgtatctggcgttagcgaatccggtgtccgattgtggttgtttcggtgatgcatgggtgttgacaaactgggaaacgttcggcaagaatgtgatattgtttattgcagccgtatctgtcttcaaaggtggaaaacaaatcatccgctttattacggcaaagatggcatggatggtttctatgtatacgttctttttcgtatttgtgctttcgttctattgcctggacaatctgcccatccttgatttccgtccttacaaaatcggaaagaatatcaaagaaggcatggaaatacccgaaggagcaaaacccagtgtgtttgagagcaagttcattctggagaaggacggaaaaaagcaggaatttacactggataattacccggatagcacatggacgtttgttgaaacacgtacggtgttgaaggaaaaaggatacgagcctccgattcacgacttctctattgtaagtttggaaaccggagaggatctgaccgatagcatcttatccgataagggatatacattcctgttagtagctcatcgtattgaaaatgctgacgatagcaatatagaccttattaacgagatctatgattatagtgtggagcatggttacggcttttatgccctgacttcttcgccggaggaacaaatagagttgtggcgtgacaagaccggtgcagaatatcctttctgccagatggacgacatcactttgaagaccattattcgttccaatcccggactgatgctgataaaggatggtgtcattctgaataagtggagtgataacagcttgccggatgaatacgtgctgacggatagtctggataaactggaactcggtcagcagaaacaagaaagtgatttgcgcacgattggttacgttcttttgtggtttatcattccgttgctgatggttatcggcgtggatattctggttgtgaagcgcagggaaaggaagagagcgaaaaataaagtgattagcgatggagtgatgggtgataagcaagagctttctcagccataaaccacaaattataaattaaaaatacattaacccttttaataaataaaaaacaaaatgagaaaaaacattgttgcaggaaactggaaaatgaacaaaacccttcaggagggtattgctcttgcaaaagaactgaatgaagtattggctaacgaaaagcctaactgtgatgtaatcatctgtactccttttatccacctggcatcggttactccgttggtagaccctgctaagattggcgtaggtgctgaaaactgtgctgataaagaatcaggtgcttacactggtgaagtttcagctgctatggttgcttctacaggtgctaaatatgtaatcctgggtcactcagaacgtcgtgcttactatggcgaaacagttgccatcctggaagaaaaagttaaattggctttggctaacggcctgactccgatcttctgtatcggtgaagtactggaagaacgcgaagctaacaagcagaatgaagtagttgccgctcagttggcttctgtattctctctgtctgctgaagatttctctaagatcgtattggcttacgaaccggtttgggctatcggtacaggtaaaaccgctactcccgaccaagctcaggaaatccatgctttcatccgttcattagttgctgacaagtacggtaaggaagttgctgacaactgctctatcctttacggtggtagcgctaaaccgtctaacgctaaggaattgttcgctaatcctgatgttgatggcggcttgatcggtggtgcagctctgaaggtagcagacttcaaaggtatcattgatgcttttaattaatagataatggaagattgataattgataaccggtgaagtgccggttgtcggttatcagtctctataatcatattatcaaccgtctattattatattattcattatgaagaagcttggtttacttttaattgcatgctttgctttcgctgcttttgcttcggcgcagaataacattgtgaagagtttggaacgcaatgtgccgggacagggtaaggtaaccatccatcaggatgcccgcatcgaggccttgataggtcaggaatatatccccaacggaacggagaacagagtgcttaaaagtcagggtttccgtgtacaggtgtatgccggaaacaataccagtagagccaagaacgaagctcacgctgtgggctcacgaatcaaagaatatttcccggaactttctgtttatacctctttcaactctccccgctggctgtgccgtgtaggagacttccgcagtattgaagaagcagatgccatgatgcgccagttgcgtgctacaggcgtattcaaagaagtttctattgtgaaagagcagataaacatccccttataaaaacttactcatgttaggaaaagaagaaatcgtatctcctgcactggatgaactaaaagaacactatcagcgtattataactttattgggcgaagatgccgaacgcgaaggactactgaaaacccccgaacgtgtagcaaaggctatgctgagtttgacaaaaggctatttcatggacccgcacgaagtgctccgctctgccaagtttaaggaagaatacagtcagatggtgattgtgaaagacattgatttcttctcactttgcgaacaccacatgcttccgttctacggaaaagcacacgtggcttatatccctaacggttacattacagggctgagcaagattgctcgtgtagtggacatcttttctcatcgccttcaggtgcaggaacgcatgacgctccagattaaagaatgtatccaggaaacactgaatcctctgggcgtaatggtggttgtggaagctaagcacatgtgtatgcagatgcgtggggttgaaaagcaaaattccataacgaccacttccgattttacaggtgctttcaatcaggcaaagactcgtgaagagtttatgaacctcattcgccagaattcatttacataacagtcccgtacgttatttcatgaaaggaaactacagttccatgaaggaaaactgttgttcccattaaaggaaacgcgcattccctttaggagaaatcgtcgttctcattaggggaaactgtcgtttctgcatgagggaactatcgttctcattaggagtaaggtgatttaaccgagtacaactctgtctcctaatcgtttggccataatacttttgatctcacgcagttctgagtagcgtttcatgatagaggtacattgttcttcatcattggctacggcagggtcttgcaaggcatacatcatgtgtttcatttcttcactgatgatggcgaacttgaaattaatcatgagcgtaggcaccaattcgaataggcgttcctcgtcggtcactaacctttgggctttggagtgatacttactcagttggtagcgatcggcaatcaactctgtacttagtttactgataatagggtcgggatgtgccaggaaataccgttctgcggtgaacccttcattatgtatatgctctgctgcttctgtcaacatctgcctgtgcagcgggttgtggaaagccagttcatcctccttcaagtcattgactacgtattccgttaccgtgatgggaatttctttcccttcctcatcgggaacgttgcacaatactttctctccgtagcgtactaccatttgcaggataaggcgctcgtatttgtagaattcctgtccttcttttccttcctgcgggatataagatacgtattcggcagcttccggtggaagcggtgtaccaccgtcaggcatttctccatccatgggataaggaggcatgtcttcagggtagggtggttgcattccgtcgggaagcggtgcttgtgcagcgtcgcgggctgcattattctttcttgtttcccggtttctttgttccgcctgcttctcagcctgcgtttcgcgtcgtttggcaacttccgaaaccagcagtttgtcttctatacgaagcagttggctgcattctttaatatatacatcacggacaattgcttcaggaataatagatatactttgtacaagattaccgattaattcagcacgcttgataggatcttttcctgcatcttccagtagaagattggttttgaaacgtataaagtcagtttcattatcttgtatgaatttctggaattccgtagcgttgtgcttgcgggcgaaggagtccgggtcttccccgtcgggaagcaggcaaactttgatattcattccttcttccagcagcatgtcgataccacggagagaagccttgatacctgccacgtcaccgtcatagagtaccgtaatgttattggtgaagcggtgaatgagcttaatttgtcccggagtcagtgccgtacccgaagaagctaccacattctccacgcctgactggtgcatggaaataacgtccgtgtatccttccaccaggaagcaacggtcttgtttcacaatagcttgtttggcaaaataaatgccatacagctcactactcttatgatagatttccgattcgggagaattgacatatttaaccttgactcccttcgtcgcactgctaagcacgcgcccgccgaaagcgaccaccttaccggaaagtgtgtgcaccggaaaaataacacgtccccaaaagcggtcacgcaagcggtgatcgtccgtttcgtaacaaagccctgtcttgacaagatattctttcttgaatcccttcttgatggcttcctgagccatggcatcgtgactttcggtgcaataacctaactggaacttttcgatgatatcatcccggaaaccacgattgcgaaagtatgccataccaatgctacgtccgtccacatggtttttaagtatattttggaagtaatcacgtgcaaagttattcacgatgaacagactttcacgttcgctctgcatcagcttctcttcgctggacagttcgcgctccttgatttcgataccgtatttctttgccagatatttcagagcttcggggtaactcatctgctcgtgctccataatgaagtgcaccgcattgccacccttaccgcaggaaaagcatttgcacaaccctttggaaggcgatacataaaaagatggcgtcttgtcatcatggaacggacacaagcctacataattcacacctcgcttgcgcaacgtaacgaagtccgatacaatgtctacaatctgtgcggcatccagaattctgtctatggtaggttggtctatcattggataattgtttttgcgaatgcaaagataaaaaaaatcccccgttgaggacgagggaacctaatgttttcacaacggaataatccttattgtgatttgcttcaaattagtgtaacaaagatatgatatttttctttaataccattcttatttgcagaaaaaaaagtagctttgtaggaaaacataaaaaaaatatgatatgaagacgatttggggtttagatttgggttcagcatccattggttgggcaattgtgaaggaagataacaatataacaaaaatagttgctttgggtagtcgtgtcattccttatgatggcaccgaaggtcaagattttgttaaaggtacaggagaaagtcggaatactttgcgaacaaaagctcgtactgttcgaaaaggctatgatcgttatcaattaagacggaaatacctcgttgatgtacttgtaaagaataggatgatgcctgatgaaaacttgaaatgtcttcctaaaaaacagttatgggaattgcgtagtaaagctgttaccgagtatatttctaaacaggaattagggagaatattactttggctcaatcaaaagcgtggctataaaagtagtcgtagcgaggctaattttggtaaaaaagataccgaatacgttgttgcggtaaaatgccgttatgaaataataaaggagagaaaccttacgattggacagcacttctacaatgaactgtgtaatgacgagtattttcgcattaaagagaatgtttttccgcgtgaagcgtatattgaagaatttgataaaatttgtgagaaacaaaaagtgcatttgggcttatctaatgaactaatagctaaaattcgcaatgaaatcatctactatcagcggccgttgaaatcgcaaaaagggcttgttgcggtatgtgaatttgaaggaacttggaaaacaaaggatggtaaagaatattttgtaggacccaaagttgcacctaaaagttcacctttatttcaactttctaaaatatgggagaatgtaaataatatcaagttgagtacaaaatacggtgaggatgttgaactgacattagatgaaaagttgaaggtttttgactacttggataataacgaaagattgacttctacagatctattcagaatcttacataaaaacaagaaggaatttactgtaactaaacaattagaaaaaggtattcaagggaatattgtaaaaacttccattctaaaaatattgggtaaaaactataaagaattgctgaaattagacttagccataattgaaacagagcagtttggctatttgtatgataaaaaaacaggcgaaattctaggcgagaaatcccttaaatgtattgattcaaaagtggagaaagagccgttttatcaattgtggcatactatttattccataaataatgtgcaggaatgtagcaatgcgttgcaaaaaggcattatcgtagtgagaaaagagggaaaaaatgacgaagtaagagtgaaaatagataaagaaacagccgataaacttgctgctattgatttctgtaaatttgcttttgggaacaaatctgcgaaaactattcgtaagattctgccatatttgatggaaggagataaatacagtgaagccatgagctatgccggttatgatcattccaattcttggacgaaggatgacaatcttagacgggacttattggataagttgaaaccgatagaaaagaactctttacggcagcctattgtggagaagattcttaatcagatggtaaatgtagtaaatgctattattgagaaatatgggaaacctgatgagattcgtatagaactggcgcgtgagttgaaacaaagtagggacgaacgtaatagtgctgatttaaaaatgagcaaacgccagcgtgaaaatgaaattattgcaaatcgtttagaagaatatggtttgagagctacaaggaataatattgtcaaatggagattgtatcaggaaatagataatcaagatagtaaattaaatgctatttgtgtttattgcggtcaaccaatttcgctaactgaggcgatgctgggaagagaggttgatgtggaacacatcattccaaaatcaaagttatttgatgattctcaaagtaacaagacgttggctcatcgtcattgtaattccactaaaggtgatatgacggcttatgatttcatgaaaacaaaatcaaagcaagagtttgataattatgtagaacgagtcggtcttttgtattctaaaaaaataattagtaagacaaagcgtgataagctacttatgtctgaagataaaatacctgataattttattgatcgacaattgcgagaaagtcagtatattgctagaaaggcacgtgaggttttacaaactgtatgtcacaatgtctgggctacaagtggaactgtgacagcggaattgcgtcatttttggggctgggatgatgttacgatgaatttgcagatgtataaatataaagattttccaaacttgattgaaacaatagagtgggaaagtgaacatggaaaaagaaaacattcaaaagaagttattaaagattggacaaagcgtgatgatcatcgtcatcatgctattgatgcactaactattgcttgtacaaaacagggattcattcagcgtttcaatactttaaatacgagtaggactcgtaatgatatgtggaatgcgatagaaaaatgctcggtggagtataaagataaactcaccttgttggagaaatatattattttgcaacgtccgctatcagtaaaagaagttgaagatgcagtgtcacaaatacttgtgtcttttaaagctggcaaaagagttgcagtttggggtaaacgaaaagtcggtaaaggggggaacaaaagggttgtacaggatagaattattgtgccgagaggtgcgttgagtgagcaatttgtatatggtagaattcgttcgatcgagaagaataaaactctaaaatatttatttaataatcctcacttgatttttaaaccatacattaagatattggtggaacaacgtttaaataaatacgagaatgatactaagaaagcattagcttcattgaaagaagatcccatttatttagacgtagataaaactaaactattggaatatggcacttgctttaaggaagagtttgttataaaatatgatgttgatgtgaattttgctagaactgaaaaaattattgatgaaaagattaagtatattcttcaaactcgtttgcaaaggtttggaggaagctctaaagaagcatttaaagatgtacaactaggagaaaaaactttgaaatggtatgaagatgaaaagttggagcatcccattcattctgtgcgttgttttacaggactttctgctgttgtgccgataaaaaaagacgaatatggaaatgaaatagggtttgtaaaacctgggaataatcaccatattgccatttatgtggatcgagatggcaatgaaaatgagcatgtttgcactttctggcatgcagtagaacggaagaaatatggaattcctgttattattaaaaatacaaatgacgtttgggataaaatttggcagcaaccagacaatgcttatccacagagttttttgaaacaacttccatctgtcaatttggagatgaagttgagcatgcagcaaaatgaaatgtttgttttggagatgacgaagggagatgtaaaagtagctattgaaaatagcaattataagaaaatcagcgagcacctatacagaataaatagtatatctacatctgattattgtttttatcatcatttggaaaccaaaaaggatatcaaaaatgcagattcaaaggcaagtaaaagattttttaggattaaaagtatgaaagctttattttcacttaatccggtaaaagtgaagatagattgtttgggtaatattattgatatgaataagtaaaatcttaaatatttgcatgtcagttgaataaaaaactgttttttttctttggagattatttacaatgaaaatgaattagatatcaataaaccaaaataaaataatcatgagatggaaattaaaaatggaagacaagtacttgtcttgtaaaaaaaagcttgttaaggcggggattaaccgtcatctaattaaacatttggaagaaagaggaaccaaagggcgattcggacgccctttgggagtgagaattgaacaatatttaaaatggggaaggactcgctattttctttcattttggatggatgatgagataccaataaatggtaggacgaagaatatatttagtgaggagttgaatttgcaatatgggcatgatttgggaagttctactgagttgattctagaagttattgcgggatgttctgtgaaatttggtgataataggaaagtggaatgataaagaaaacactctattttgggaatccagcgtatttatccttgaaaaatggacaactagttatcaagttaccggaaattataaataatacttctctgtcccaggggtttaaaaaacaggcggaagtgacaaaaccggttgaagacattggtgtggtggtgcttgataataagcatataactattacatccggtgttttggaagcattgttgggaaataattgcgctataattacgtgtgacagtcgcagtatgccagtcgggttgatgttacctttatatgggaatacaacacagaacgaacgtttccgacagcaattggatgcatctgtacctttgctgaagcagttatggcaacaaacgattaaaatgaagattgaaaatcaagcggctgtgctgaagaggtgtacaggagaagattcaaaatgtatgaaagtgtgggctgccgatgtgaaaagcggtgattctgataatttggaggctcgtgcagctgcttattattggaagaatttgtttgatataaagggattcacaagggagcgggaaggtattcctcccaataatttattgaattatggttatgctattttgcgggcgattgtagcacgaggattagtggcgagtggattactgccaacacttggaatacatcatcataatcgttataatgcttattgtctggcagacgatatcatggaaccatatcgtccttatgtagacgagttagtatataatattgtaaggagtaggcaagattatgtggaattgactaaggatttaaaagcaaaattactctctgttcctgtattggatgtgacgattgcagggaaacgcagtccattgatggtagcagtgggacaaaccacagcatcactctataagtgttttgatggagaaattcggaaaataatatatccaagttttgaatgacaatcttatgaaatactaattaccattctattatggaaaggttcagtgaatatcgtattatgtggatacttgtattatttgatttgccgactgacactaaaaaagataagaaggcttacactgattttagaaaaaatctacagaaagatgggtttacgatgtttcagttttccacatatgtgcgtcattgtgcgagtagtgaaaatgcagatgtgcatataaaaagagttaagtcttttttacctgaacatggacaagtcggaattatgtgtattacggacaagcagtttggtaatatagagcttttttatggtaagaaatcacagtctgtaaatacaccggggcaacaattggaactgttctaaaaagagaaatcccactcatcagtgggattctcttttatggaaacaacctcatttttaattctaatttgttttgtaagtgtttgaaatacaggttgtaatgggtaatcagctgtttccagtaggtcaaagatactaatttgaaagcaaatcacaaccgctccgcgagtgggcggtattctatgaagctgtttccagtaggtcaaagatactaatttgaaagcaaatcacaactactacactgagacgatagtagttcaatttgctgtttccagtaggtcaaagatactaatttgaaagcaaatcacaacgggccgataggagataacttctacggttgtgctgtttccagtaggtcaaagatactaatttgaaagcaaatcacaacttctttccttgttataatcatatagtatatgctgtttccagtaggtcaaagatactaatttgaaagcaaatcacaacattctaaataatatatatatttgcatatcagctgtttccagtaggtcaaagatactaatttgaaagcaaatcacaaccatatcttggatattatgattttggggaagctgtttccagtaggtcaaagatactaatttgaaagcaaatcacaacaatgctcatgtcggtaaaggtgaaagatacgctgtttccagtaggtcaaagatactaatttgaaagcaaatcacaacagccatgtgttttgattatgagatgataatgctgtttccagtaggtcaaagatactaatttgaaagcaaatcacaactccttcaggtcaacattcctaagatcccaggctgtttccagtaggtcaaagatactaatttgaaagcaaatcacaacagccgtaaacgtatgttcacgaagacggtcgctgtttccagtaggtcaaagatactaatttgaaagcaaatcacaacgcttctttccggtaaaggaagtatgttaaagctgtttccagtaggtcaaagatactaatttgaaagcaaatcacaacagtggatgaggattatatgtttattcttccgctgtttccagtaggtcaaagatactaatttgaaagcaaatcacaactcccaacaggaaggaaagaaatggctgtttgctgtttccagtaggtcaaagatactaatttgaaagcaaatcacaactctttggtagttatctggattttggctcatgctgtttccagtaggtcaaagatactaatttgaaagcaaatcacaacacctcgataagagtgaaatctatcagaaaggctgtttccagtaggtcaaagatactaatttgaaagcaaatcacaacagaaagaaagagctgtataactaactatagctgtttccagtaggtcaaagatactaatttgaaagcaaatcacaacgggtatgaatactggattgccaaggcaggagctgtttccagtaggtcaaagatactaatttgaaagcaaatcacaactacttgccgcctctctctaaagataaagaggctgtttccagtaggtcaaagatactaatttgaaagcgaatcacaaagccaagcccctagtatgcagaagagttaacgtcgttttccagtagatcaaagatactaaaaaagtaagtaaattactacatgaactaagatgtgaacatttttattattaacgaattgaagagagaagccccacttccttttccgtaccctcttctctctccaatcccttaatcccacctatctattttatcttttccctaatcttcgtcagatactgcttcatcccttccgcatccttcgtactgataatttccagcaaattcttcagctccagacgaatattttccacttgcgagggagtgcgcggattaaagagaatttcctgaagtaagtaatcatcttcactcagcaaacccttggcaatagccatatgcttcttgaacgtagtacccggagcctcctggtgcttcatcaccgctgcaaaaacaaacgtagagacgaaaggaatagacagagaataagctaccgtctcatcatgttcgtcgaaagtatattcgaagatattgaggcggagcgtctggtaaaggtccttgaagaaaatttttcccaggtggtcaccttcactgatgatgatagcattctcgctgctcagattgctgaggctggcaaacgtagggccaaacatcggatgcgacgatacataacgaaagccactttcctcatagaatttcttcaatcccgtcttcaccgaggcgatatcactgatgatacaatccttgggcagcacaggcagcaccttgcggaatgcgtccagcgtatatctcaccgtggcggcattgattaccaactccggttcgaagtcctttatctcttccaacgtggtgaaacgatacgtgttatagacaaaacgcaactggtgcggattcacgtcgaacactgctgtttcatgttggaaacttagaatatctgtaaagaaagagcccatcttgccggctccgagtattaaaatacgcataaatttagtgtttaggtattaatgattagtgataagtgaaagatagcgtagccattaatcacttatcaccagtcgctaatcacttgtttataatttccatttgttgcctcacactctcctcgtgtatcagctcgaataccttcttgataaattccgaatccacgcccagaagcacaccttgtgaaccgcgtttatccagaatttcattgtaacgtcccgtttgcagaatcgtcatatcgtgttctttcttgaacgtaccgatttcacgtgccacacgcatacgcttggcaagttcctgcatcaggttgttgtcgcactcgtcaatctgcttgcgcagttcgctgaggttttccgtggtctgtgtctctttacggatgacgagtaggttcaggatgtaatccagtacgtccggagtcacttgctgcgaagcatcactccatgcacagtcggggttgcagtgactttcgataatcagaccgttgaaaccgaggtccatagcctgctggcaaagcggtgcgatgagttcgcgcttaccaccgatatggctggggtcgcagatgatcggcaggttcgggatgcgacgacgcaactcgatggggatatgccattgcggcagattgcggtacaacttcttgtcgtaactgctgaaaccgcggtggatggctgccagacgtttcagaccggcattgttgatacgttccagggcaccgatccagagttccagatccgggtttaccgggttcttcacaaacacaggaatatccacacccttcagtgcatcggcaatttcctgcatggcaaacggattggcagtggtgcgtgcgccaatccaaaggatatcgatacctgctttcagacactcgtatacatgctttgaggtggctacttcggtagaaacgtacattccggtttctttcttcacctctttcagccatgccagaccgtctacgcctacaccttcgaaaccacccggtttggtacgcggtttccagattccggcacggaatatcttcattcccttttcggccagttgcttggcggtgcacattacttgttcttctgtttcggcgctgcaaggccctgcaattaccataggacgtttgtcctcaatacccggcagcaaaatcgattctaattcaagttccatattcttttatttttgttcaattatatttttattgtatagatatttctcagtgtcttctgaaccctctgtaacccccgtcgataaagcctttcgaacgtgttaataaatacaggcctcgttttttaaaaacgttgcccttattctttaaaaacgtcgggcacgttttttaaaacggtgagtggcttgtgttacaggagctcttttttgtaaatatattacttcatctccctgatacgcttcaatgcctcttccaatttatggtctttgcagcaaagcgagatgcggatataccgttttccgttacttccgaagataaatccaggtgtgataaatacgcgtgcgttatgcaacaccttttcagtcagttcttccacgtcggcgcagctatcgggaatttttccccagaggaacatacctacctgtttttcatcgtatgtacatcccagtgcatgtatgatttcccctgccagatggcggcggttgcggtagttcttgttatttccgtcgtaccattcctgttcggcttccagagcgttggcggctgccagttgcatggcgcggaacataccgctgtcgatgttgctcttcactttcaggatccattgcacaaagtcggcgttgcttgccagcataccgatacgccagcccggcatattgtggctcttgctcatggagttgaactcgatgcaacactctttggcgcccggcacactgaggatgctgagggggtggtcgttcaggatgaagctgtacgggttatcgtttacaatcacgatgtccttgcggcgtgcaaagtccaccagctttgcataaagttccggggtggcgttagctccggtcggcatgttcggatagttggtccacatcagctttacgcggctcatgtccatcttttccagttcgtcgaagtcgggcatccagccgttttcctctttcaggttgtagttgatgacttcagcgcccagtatcttgctcaatgaggtataagtggggtagcccggattgggaaccaatacctgttcgcccggattgacgaaggccagtgtgacgtgcaggataccttctttcgagccgatgagcggctgtatctcagtattaggattcagttctacgccgtaccatttcttataccaggcggcaaagctgcggcgaagttcggggataccgacataaggcatataaccgtgtccgtcaggattttgtgcttcgcggcacagggtctgtatggttgcttccgagggaggcatgtcgggactgccgattccgaggctgattacgtcttttccttcggcattcatttgtgccacctctttcaacttcttggagaagtagtactcgctcacgctggccaaccggtcggcgggcttgatcttagatgtttgattttccgtctgcatattcgcctaatattttaagttctttggttagcggtgtgatggccgcgatggattgtttatatctcagtaggttgtcgaaaacaacgtctacgtaaaattggtattcccattcccgcccgatgatgggcagtgactgtattttggtcaggttgatgctgtagaacgaaagaatggacagtacttgcgagaggctcccttccgtgtggggcagtgtgaataccatgcttgccttgttggtttccgggtgtggatggcggcgtatttcgtctacttgccagggatcggcaactaccagaaaacgggtgaagttgtgcttgtttgtttcgatgccttcctgcaacaccttcatgccgtaacgctcggcagcggccttggaacagatggcggcgtgtcctttcaggttctcccgcttgatgatttcggcgctgagggcggtgtcttccgcttccactactttcatcttcgggtgctgggcaaggaactcgcggcattgcatcagtgcgatggggtgggagttgacttccgtcagatcgttccagtcctcatcgggcaggcagacaaagctgtgtgaaatgcgtagtttgtattcgcctatgatttgtgttccgctctgccgcagcaactcgttgttgtgcaacaggctacctgcaatggtattctctattgccaacattcctatggtcttgctgtctttcttcacggctgcaaacacgtcctcaaaagtagcgcaacagattaactctatttcttctccttcgaagtacttgtgtgcggcaatgtcgtgatacgaccctaatgttccttgaatggctattcttttcatactgtttctttaaaataaaaaatcccgcttccatacaatggagcgggattaagtatattactttagttctctattcagttcttaagcatcactgtcacttgacacatacaaactcccgctctactttctggctaaagtaaaagtaaaaaaagaagtaatatgtataagtaaacaaattcatactttcgttttctttttgtttttaatttcgtggcaaaagtaatacttttctcttatatgcaagcaaaaaatgatattttttttatttcttcttcaaaattagctttcagacgagtgcttccggttgtctttttctgccggtaatccgtcaatcgtcgtgcatgattcccttgatttgctcccatttgttcacggcatcgttggactgtgccttgcccggagtgctacggccttcgcggatgtacttttgtaacaggtctttcagcttgctgactatttcgggatgttcctgatatacatttttgctttcggtgggatcgtctttcatattatagagttgtatcggtgggagctgggcaatggcttccttgtccacacccggcttgggatagctccaaccgccggaactgggggaacacaacagtttccagtctcctttacggatggcaaactctccgcggatggagtggtgcacggtggcttcacggatggttggtatgtggtgcggattccggatgaggggaagaatgttgtaactgtcttccgcttcgttatctttcaggggataatggttgagggcggcaaaagaggcgtagaagtcgttgaggcagacggtttgtgtacaagtgcctcggcctgcaccgttggcccattctacgatggtgggtacgcggtgaccgccgtcgaagagatcggctttcatgcctcgccagatgtagttggcatgatgccctttagctgccatttcggggatacctccggcgggagagcaaccgttgtcggtggtgaaaactacgatggtattggaatctataccgttgcgtcgcagggcttcgcgcacttgtcccactacatcgtccaccatcaggacgaagtcgccgtaatgacccagtccggtttttcctttgaaggcttcggtgggcaggatgggggtatgcggggcgggcaggggcagatagaggaagaaggggcgttcgtcttgtgcgtggcggttgatatagtctactgcgcggtgggtcaggttgggcagacagtcctggtggttgaagtcgttgcctatggcgcctgcacgccagaagcccggtttctttcctgcgggtacggtgcctatttgcgtggtggtgggctggcggttttctatatatacatagggagccatgtcgagggaaccgcagaagccgtagaagtagtcgaagcctaagtcgacaggaccgttggtgatgggtttagagtagtccacgtcttcgtcgttgagggcgttggcgtcgggtttctcatgtcccggtttcgtgccccagttccagcctaaatgccatttgccgatgcaggcggtggtatatccatttgctttcagcatggatgccatggtactgcgggtggtggggatgatagggcgggagtagccatagagtacaccgcttttgaggctggaacgccagttgtagcgccctgtgaggatgccatagcgggtgggggtgctgacggctgaacaggaatgagcatcggtgaacattacgccgttggcggccatctggtcgatgtggcgggtttggatatgcgagtctttgttgtaagcggagacatctccatagcccatgtcgtcggcgaggatgaaaatgatgttcggcttttgctggggttgtgtgtcggggtgaggggatgactgtgcatgggcatgttgtccaaggcagaagggaacggataataatccgagataggtgaggtttttcatgatatgatgtttggggtttgattttacttggttattatgtacaaagttagctgttagatggaaagggctttattagttctgtctcaaaagtttgagatattgttgcaaatgcagagtggttattacgaattttaacaagggaagaattctgttaatgtattattctttttctgatcccataaaaaagcattcttccttttggctattccctgcaattcatctatctttgcattagccgaagagaaatgcggcgtgttgaagctatttttgacaaggagaaaactggtaattttatttaagtcaagaaacagaacttcaataaagatgtttcacgcagaccatatagggtcgggcgtgcaagcgtatttattggttctgtgggtataccagtacctctccttggataaatatgaactatacgtccgacttctttttgtataaagggggatgagggcgattttaaatatttaaaatcc

SEQ ID NO: 1726 - DNA, 23750 bp, synthetic construct
  misc_feature 1..23750: note = Synthetic
  source 1..23750: mol_type = other DNA
gtaaaatcagttcgggcatcatttctttcagggcattgaaccagggattaatgtctgcttcactgggcaaatcagagctttttacagcggagcacggtgatgaaatggaacgtctggttcttggcattgcggaagagatcctgaatccttcactgcccttcattcaaaccatggaagaaaagcattgccaatactgtattcacaaacaggtttgtctcagggtttgaacaggctgttcagcgctcttgcttctttcttctttgcatttcagccctgatcatgctcagctccctgccgctttgtcctgcaacagaagtattttcctgagcacgcctgagcaggtaaggaatcacgtgacgcagttctccgtaaggaaggtacttacacacctgatagccggcggacgccaggttatgggtaatatgatcactcattccgaaaagctgtgaaaaccatatccgggagcaagcgggttccagtccgtattcagccatcagacgacagagcaggaggttgctgttctcattatgtgaaccgcagaatactgcagcattcccggggtgcgccagcatcatcgtgagcgcctggtcaaaggcttcatcagtttccttctttgacgagtataccggagatatcaggcctagtctggcggcccgttttctttctttctccatataagcacccctgacgagtttgaaggcagggacgaaacctttctgaagagattgggacaatacatcttcaaggtgctgaagacgatcgtgccggtacatctgcagggtattgaacaccacggcccggtcatggttcagcttcagcatcatttccataaccacttcgtcaatggccggctgtatccaactctcttcagcatcgatcagtattgatgttcccttgcctgcagcagattcacagaggctgatcaaacgttgccgtcccctgctccaggcctcattctcagaagcattcaatattatcccggtgctgattttctccagcagatccggccggatcagaccgctgggtttgaacaccgcaaaggggattgcgctatcgtttgccgaccactcaatcactttcatgacttcattccaaagcttctccatatggctttcgtccggattgccttccacactataatcgggaacagatcgaatcccgaagctttgcagtttttcgacaacgggcttacattcacttaaggtttccccgccgcagaaatgacggaatactgtaggcttcagagcccacttcaggggcaagcgcagcatcagggataggctgatcattgcagatccggctctaaccagccagggccaggagatcagtgagaaaaggcgctgcgctcttttcagggattttgcgtcatactgacgaaaagccagggagaggttatgaaaatccggaagtgtcatatcgggaatcaggagtaaagatatgattattccaggaattttttgtttaggtaattttacttcgttgattttggtacttttaccaaagaatcaaccttcccaaaaggcatttattacttacccattaacatattaatctgatgaagaagcttctgattagctcaatcaaatccacccctttcattttcctgctgatatcctgtatgggtatttatgctcagtctccgcagaaattcaactaccaggcagtatgccgtgacaatgcaggaaatatcatcgccaatcaggcggttgacctgcgttttacgatccacgacctactccctgcgggaacagcactctaccaggaaacacatactgttacaaccaataccttcggcctggttacagttgaagttggcggtggaagtgtggtttcgggaaacttcagcagtattccatggggcgctggtgccaaatatctggaggtggagctgaacactggcgggggttatgctgtggtcggcactccgcaattgcttagtgtcccttatgcattatacgccaatcagtcgggcacaccgggccctgccggcgcaacaggggccacgggcgttacaggccctaccggagtcgggctgaccggggcgcagggaccaacaggagcgacagggattaccggtcccacgggagttggcctgaccggggcccagggtcctaccgggcccaccggaattacgggtcccaccggaacaggcctgaccggggcccagggtcctaccggacccaccggaattacgggtcccaccggaacagggctgaccggggcccagggtcccaccggacccacaggaatcactggtccgacaggagtcggtcttacaggagctcagggaccaacaggggttacgggccccacgggacctgtgaatctttccgggacacaggattatttaacacgctggacgaccagcaccacgctgggcaccggtgtgagccgcgacgatggaagtaccgtggggatatacacagcgccctatcctttgtaccgcctgaatgtggatggcaatgacctgattggtgtatatgctgtgaataatccctcagttgccggagttccaagcatcatgggttataatatgtcgggcatcagcggaaccgcaaatacagctaacgggtcagtgaattcggtttacggaattgcctataacggttatgcatatcattacggaatctttggtacccgctgggatgacgcctatggcccttctgccggaatcatgggcacggtaagccataatgacgggatgaaaccctggggcgctctgggttatcaggatgcgatgctgagagaattcggcggatatttccagggaccggttgccattaaagccggaaactattacacttccttttcaacgactgcgcagagtgccaatattgaatacactctgcctgacacacagggagcggcaaacacttttctacgaaatgatggaagcggcgtattgacctggcaatttgccagtgggacgcccggccccacaggtccgacgggcgtcacgggtccgaccggtgtcggactgaccggagcacagggaccaacggggcccacgggtatcacaggacctaccggtgtcggattgacgggggcgcagggaccgaccggacccactggtgttggtttaaccggcgcacagggaccgacaggtcccacaggcataactggtcccacgggggtaggcttaaccggggcccagggaccgaccggacctacaggcatcacgggacccacaggaattggtttagccggagcccaggggccaacgggtcctacgggtatcaccggacaaaccggcgcgaccgggccaacaggtccgtcaggatcattggatgcctggtcgagactgggaaatgcggggaccgttgacggtacaaattttatcggaacaacggataatgtaccatttagtataaggacgaataacatccgttccggatacattcagccatctacactttgtacttatctgggttatatggccgggaatacatcgggaggttcgttcaatactgccattggtgcttatgccttaagtaccaatgttgccaactcgggctcaaccgccatcggttatggcgccctttattatgccgatgataatgtcggtggcggaatgacctataatactgccattggaatgagtgccatgagaggaagtactacaccatcgaacaacagcggcaaacaaaacattgctatcggctaccagagtctgtattctttcacaacggcaaactcaaacttctcggccggctaccggtcattgtattacaatacatcaggcagttataatgtttcaattggagatatgaatatgtttgctaatcagaccggaaatgagaatgtcgcggttggcacctcggccttgtacaccaatgttgcgaacacaagaagcacagcggttggcacccgggcgatgtataatgcagacaacagcggcactgcgcagcaaacatacaacaccgcagtgggacatgaagcactgaaaggaagcacaactgccgccaacaataccggaaaacacaacacggctgtcggcgatgcaagtcttgccgccaacagcagcggtgcatacaactcagtcctgggctcctctgccctgtcggccaacaccagcggaagcaacaacgtggccattggttacagcgcgctcaggaacaatacggaccggagtcagcttgttgcggttggtgactctgcactaatgaataatggcacgggggcaacccacgctgaccacgggacattgaattcggctcttggattcagggctttgtattcaaatacaaccggtgctggcaatacagcagttggttcaagatccttgaattcaaacaccataggatggggcaataccgctatcggtacttttgcaatggattccaacacaagcggagagcaaaatgatgcgttcggatttgaagcacttcacaccaataaaagcgggaaccgcaatcttgctataggaaggggggcacttgcgggcaacacgacaggtgaagaaaatacggcagtaggacaatatgccctaagttccaatttagcgaatacggggagtacagccatcggttatggagcaatgaccctttgtgacgacaggacagtgagccggagaacatacaatactgcagttggatacagcgctatgcgtggacaaagctttactccatccaataatattgcaagatataatactgctgtaggttatgaagccctgatggaaatgcgtacaggagataataatacagctatgggttaccggtcacagtacaggaactatgcaggaattgaaaattgctcatttggcaatcaatcacttgagaacaatactgatggtgatgcgaatacagcgatcggttatgcatcattaaattcgaatgaaacaggttcacggaacacagctcagggatatggagtgctatccaacaacctgtccggatgggaaaacacagcctcgggctggagggctcttgccgcaaacaccacgggctcaggaaatgttgcaatcggcagcagtaccttgtactctaacgttggcaaccatcggtctactgcagttggaacgggagcactcgttaacgcagataaccgcgcaactggtcaggaaacttacaataccgcagttggctatcttgctttggcaggcagcggagatcccgctaacaataccggacgatacaacagctgtttgggagaccagacactttatgtcaattcatcaggatacagtaatacggcaacagggtatttatctttatccggaaactcaagcggattcagaaacacttcctccggagtgaactctttgctaatcaattcaacaggaagcaataattctgcattcggatataatgcagacgtcacatctggcggcttgaacaatgcatcgtcatttggcagcaacgcagttgtcaacgcctccaacaaagtccgcctgggaaacacctcagttaccgtggtcgaaggccaggtggcttacactttcccgagtgacggccgctttaaatacaatgtgaatgaagctgtgagcggattggatttcatcatgaaactccgtcctgtcacctacaatttcgacacaaagaaattcgatgaattcctgatgcagcatatgactgacagtgtgcgccaggcccggatgaaagatcaggattatgcaccatcctcggcccttgttcacaccggctttattgcacaggaagtggaacaggccgccagggaatgcggattcaacttcgacggggtcagcaaaccacaggatgaaagcggcaactacggtatcgcatacagccagttcaccgtgcctctggtaaaagccgtgcaggaacagcaggaaatgatcagggaacaacagaaacttatcgatatcctgcttaacgaaaacaaggatctgaaagtccgcatgcagcaactggaagagaagatgaaataaaacccttaattttgcttctgatcaaaacgaaaatatggctcagaagcagaaaaaatatcacccggcgcccgtcaagcccatcattggcgggcgttcgcttgagatactcgaccgctggctgatgcagtcaggtcagaaaggctgcaggctgttcattctggcagacgaccacaccctgccctcctgcctcccccgctttgttggggaagtcagtatggcgcaacaggcggaaatcatcgaaattccttcgggtgaagacagcaagagcctgaatatctgtgaagggatatggctcagcctcgcagaatcgggtgccgacaggcaatctatcctgatcaatctcggcggtggcgttgtgactgacatcggaggctttgcggcatctgttttcaaaagggggattcgctccgtgaatgttcccacctcgctcatggccatggcggatgcaggcttcggcggaaagacaggcatcaacctcggaggcgccaagaaccagatcggcacattcacccagccctccggggtttactgtgaccctgaatttctcagcacattaccggataagcattaccgttccggatttgccgaagtgatcaaagccgcgctgatttccgatcctgaattctgggaaaagataaagaatcatccgaaggacaaaaaagcatccgtcaccggactgatccgtctggccgcagaagttaaaatgggcgttgtaagcgccgacccggaagaggaaggcgtgcggaaagtcctgaatttcggccacaccatcgggcacgcgctggaatccgccagtcagggaaaaggaaagaacaatttgctgcacggtgaagccgtcgccatgggaatgatctgcgaagcctggatctcgcaccgtattgccggtttggatgaggacatgctgggagagatcggggatgtgatccttcaccatatcccgctccggaaaatctctgcagatccggaagaactgatccgctggttggggtatgacaaaaaaaatcaaaacggcagtccgcgtttcaccctgatctgcgctcccggccaaaccctcacggatcagtcaccgggtactgatctgatcagggaaagtttcatctactacaacagtctttttgaataatggtaacggttgagcataatgctgaatttcttcatcccggtttcagcctgccggcatcgaagagcatcagtaaccgattgctgatcatcagggaaatgatggccggcccttcaagctatcattggatcagtgaggctgacgacagccgggttcttcagcattgtctcagcgcgttcaaatcaggaaaaaccatcaatgcgggggattcgggaaccgcttaccgctttatgacggcctttctggcttgtcagccgggcacatggaaactgaatgcatcagcccgcatgtgtgagcgtccggtcggcccgctggtggacgtactcagatctctgggtgctgagattaagtatttgaagaatgaaggcttcccgccccttctcatcaatggaaaaacgctgaaaggcggctccgtcagcctcgatgcgggaatcagcagtcagttcgcatcggctctgctgctggttgccccgaccatggagcaaggactggaaattgagctcacgggagagatggtctcccgtccatacattcagatgactgttgatatgatgcgtcatttcgggatcacctgcaatattgagggcaggcaactcagtgtgaagcccggagtttaccgcgaaaaatttttcctgaacgaatcagactggtcctcggcggcctttttctacgagcttgcggtggtagctccgcgactgaatgtgaccatttttggtttgaagaaagacagcatacagggtgatgcaggatgtgccggattatttgagagtctcggaatcaaaaccagttttacaagtaatgcagcaggcctttatcacaaaaagtcaggagtgaaatccggggaactcagcatagatttccgcgacatccccgacctgttcataccctttgccctcgcctgcgcggccaaaagaatcaggctgaccgccacgggtctgcaacatctggtggtcaaggaatcggaccgcttgtatggcttcagcgaagaactcatcaggctgggttacgactgtgaagtggtgaacagcagtaccttcaatctgtatgataccccgcgcaaagcgcttgcagaagttccgctgatccgcacagctaacgaccaccgcatggcgatggcgttcgcggtatttgccgctcatgacggagcgatccggcttagtgagatcaattccgttaagaaatcctttccttcattcagaaagatactgacggctaacggcttcagcttccgttaaggaaaccggaggtaattaagaatgattcatctccggttctgatgtttttattccaaaaataacagccttttaacaaatatttgtaatttcgccaaaacaacattcctcagcgctcatgaaactccatacccggatcagcctgcttctggcctccatcaccattataatgatctgtgtcttagcggttttcttttacctgaggagcagtgaattaaccatttacctgaaatccaagttaaaaagcaatcaggcgattgtcgaaaaagttctggaattcaaagcttcgtcgtactcacaaccgatacgtgacaatgctgcctgggacgggatgtacggattcacaaagcacagggacaccacctgggcaccggtcaatatgggcagcacatacactaccttcagttttgattactatactgcaaaagattcaagcggtgagcgactgtacaccatacggaatgaaaagtcgaagaacttccagactccggcggacaccgtgctgaaatggttcagcgacaaaaggatgctgcatcactttgtcagaacccctgagggtgtttgggaagttttcggttgcgtaattgtgcccacggcagaccagcaattgaagagccgcgaaaacggctatctgatctcggccatattgtgggactctgcctatcttgaactgatcggcaaggccaccgggtttcaatgtcgtcttgacaccaatggtaaaaaacttaccgatgactattctctcgaaaaaatgctgatttgcaaggagctgaaaggcaataacggatccacggttgccaccgcggttttcacggatacgcacccttttcaggaggaactgatcaatctcaggcatgtgatcattgttttgggtagtttgtgtttgctggcacttgctatattcatcatcctgatccaccgctggacggcaggccccctgcgggcgatcaaccgcagtctggtgtatggtgaaatggagtcgatccggcatctcttaaagaagaaacaggatttcggtgaaatcgccaggctgatcaagcgctttaaggagcagaccaatgacctggttgaagaggtgaaggccagaaccctggcagatgagaaattcaatattatctttgagaagagtgctataccggctgccatcatggaatctgacagcaggataattcaggttaatgaggcattctgcaatgtgagcggatttacgaaaaatgagcttgtaggtaaaagctggatggatttcgttgccgaaagtgacagggaaagaatgaaagaatacaacaggaaccgtctgcaggatccttcagccgcgcccgcttcatatatattctcatacattcacaaagacggcagcatccgtcaggcccgtattaccgtggctattatctacagcacagaacaggtggtggcaacgatagaggttttgccagccagctgattcaacattcatccctttcagattcttctataaccacaaagttccgggaatcctccaggcgggcggatgacaagcacgtctaaatcagagatatcgtcctgatcatcaagcaattctgcatgcgatatgttaaaaaattatcggatttgcatagccgattaattagtgtatcaaatattgctatatttacgatcacaaaaaaaaggcgatccccctttcggagaaccaccttaaatgttttcacaacggaataatccttattgtgatttgcttcgttctaattgcaaatgtataaaaaatccttataaaacaagcacatgaaaaaaattttaggtctggacttaggatcatcctcaataggatgggccatgattgctgagaatgacaatgcttcaaccggtaatacttcgattttgggaatgggagtccgaataataccttacgagggtacagaaggaaaagattttagtaaaggcaccggcgaaagcagaaatgcgaccagaacactggcacgaacagctagaaaaggttatgacaggtatcaacttcgcaggaagcttttggttgacgctctggtgaagaataatatgatgccgggtgaattgcttatgaaggcaccgaagatggatctttgggcattgcgaagcaaggcggctctcggggaaatcacgccatgcgaattagggcgacttctgctttggctgaatcaaaaacgcggttacaaaagttcgcgcagcgatgcgaaccttgataaaaaagacaccgattatgttgccgctgtaaaaagcagacatgaaagattacggaccgacaatctcactattggacagttctttttcaaagagcttagtaataatgagtacttccgggtaaaagaaaacgtttttcccagagaagcatatattgaagaatttgatacaatttgcagtaaacaaagatttctttccgacgaattagttgcaaagatcagaaatgaaatcatttattaccaaagaccgctaaaatcgcaaaaaggcctggtgtccgtttgcgagttcgagggattttataccacaaaaaatggcaaggagtattttgttggtccgaaagtagcgcctaaaagctcacctctttttcaagtcgcgaaaatgtgggaaaacattaacaacattcaactctcaaccagcaaaggcgatgacattactatttcgctggaacaaaaacaggcaattttcaaacatttagacaataatgaaaaactaacggtgactgatcttacgaagattctcggctttaagaaaggccagttcactgtaaacaagcagatttcaaaaggcattaacgggaacattacaaaagttgcgatccaaaaagttctgggcggaaacaaagcgtacgatcaactcctgaattttaacattaaaatcgatacgaaagatggatgtggttatgtttatgacaagaaaacgggcgaggttttaagagaaaaaccaatactcgttgtcaataccaggattgaagaagagccactttaccgcgtttggcacaccatttactccattccagatattgaaatttgcagcagaacattgcaacataaatttggaattgacgaagccactgccagagaattggctgcaatagattttacgcgtcaaggctatggaaacaaatcagcaaaggccatacgaaaaatcattccctatttatcagagggcgatctgtataatgaggcaatgagttttgcaggttatgatcattccaattctttgacgaaagaccaaaatctgaatcgcaagattcttgaagaattaaaacctattgcaaagaattcacttcgtcaacccattgtggaaaaaatactaaatcaaatggtcaatgtggtgaatgcaattataaaaaagtatggtaaacccgacgaaattcgcattgagctcgcgcgcgaattaaagcaaagtaaagaggaacgtaatgatacggaaaaagcaatcacgaaaagagaacgcgaaaacgaaaatattaccaaacgccttgctgaatatgggcttcgtgcaacacgcaacaatattattaaatggcggttatatgaagaaattgataatgaagataagaaactcaacgccatgtgtatctactgcggtcagcctatttcactcacagaagcaataaaaggagaagatgtcgacattgaacatattattccgaaagcaaaacttttcgatgactcacaaagtaacaagaccctggcacacaggcattgcaacagcacaaaaaacaaccggactgcgtatgacttcatgaaaagtaaaccggaacaagtattcaatgactatcttgaacgggtaaacacactctacaataatcacatcatcggaaagtccaaacgagacaagctgctgatgacggagagcaaaatccccaataatttcattgacagacaattaagagaaagccagtacatcgcaaggaaatccagagaaattcttcaaaccatttgttatacggtttgggcaacgagtgggagtgtaaccgccgtattacgccatctttggggatgggacgacgtaacaatgaatctccaacttcccaaatacaaagagctgcaggaatcaacagggacaacttttattgaaacagtagaatgggaaagtgaaaaaggaaaaaacaagcatacaaaggaaatcattaaaggttggtcgaagcgtgacgaccaccgccatcacgcggtggatgcgctcgttattgcatgtacacgacaggggtttattcaacgcatcaatacacttaacgcgtccaggacacgggatgaaatgtataaaactgtagagcaatacgggcaaaaatttaaggaaaagctcacattgctcgagcaatatctcattacacaacaacccattacagtaaaagaagtcgaacatgcagttgcgaatattctgatttctttaaaaccgggcaaaaaagtcgccgttaaaggaacccgcaaagttggaaagcgtggcaaaaaacgtgtggttcaaaccgggataatcattccgaggggatcccttagcgaagaaagtgtctatgggagaattaaaacaatcgaacaaaagaaacctgtcaaatacctctttgaacaccccgaactgatttttaaaccctacattaaaaaactcgttgagttaagaatggaggaacacgggcaagatgctaagaaagcgctggcatccttaaaaaaggaccccatttatctcaacccggagaagaccattttactcgaatacgctacctgtttcgcagaggaatatgtaattaagtataaggtcgatgtaaacttcaacaaaacagaaaaggtgattgatcagggaatcagggaaattcttcaaaatcgtctggcaaaattcggaggcaaggagaaagaagcctttaaggatgttcttacgacagataaaaccattaaaaaatggtatgaggatgaaggcctggaaagaccaatactttcggtcaggtgttttacaggacttgcaagtttggtaacagtacgtaagaataataccggtaaagacatatcgtttgtgaaatccggaaacaaccatcatattgctatttatcaaaacgcggaaggaaccccatcaacacacctgtgtacattttggcatgcagtcgaccggaaaagattcggtttgccaatcataatcaaagacacttctataatgtgggataacatattttcggagtccgataataaataccctgaggactttctggaaaaattacccgcatccggcctcattctaaaggaaagcctccagcaaaatgagatgtttgtttttaatcttcaacgcgacgagctgaaactggccattgcaaataagaactttaaactgatcaccgacaacctttatcgtcttcaaaagcttactataaagccaagtagtggacaggtggacatagtcttcagacatcatctcgaaactcaaattattgatgacaatttttccaaaacaagccgtcgctatattaacattcaaagtctgaaagcttattttgatctaatccccaataaggttattattggattaacgggcgacattgtcttagcagaataagtacgcccagggaaataaggagttctatgataaagcgaacgattgtaatatctaatccagccaggcttcatttatccatgggacagatgctggttgaacctattgaaaaccataatgatgcgcaatcaatcgtgaatgaaaaccaggatgaagagaagaaacttacgtcaaaagcatcttctgttcccattgaagatattggtatgttaattctggaacatgagcgaacgagtacgacccatggattaatgcaggcattgatagagaataatgcggctgtgctgtattgcgatcctaagcacatgccccagggcttaatacttccgatggccgcccatcagacattcacagaaaaagtacacaagcaattatcagccagtgaaccactaaaaaagcaactttggcggcaaacagttcaggccaagatcttcaatcaggcgtgcgtattgaatgaactgggacaggatactgagaatttgctttacttatgctcaaaggtcaaaagcggagatccggataatatagagggaagagctgcggccatctattggaaaaacctttttgaagacaatgccaaattcacacgtggccgtttcgatatgccccctaataatttgctcaattatggctatgccatactacgtggcgttgttgcccgcagtcttgtggcttcaggaatgttgccggtatcaggaattcatcaccggaacaaatacaatccgttttgcctggcagatgatattatggaacccttcagaccctacgttgaccgtttggttttgaacatagtaaaagaagctggcgatgccattcccgatgaactgacaaaggagataaaaatcaaattgcttcagattcctgttgtagatatttgtattgatggaagctggagtccgatgatggtagggatgcagcgcacgacgtcgagcctgatgaagtgctttgaaggattatcacgaaaaatcctgtatccggagcttggcacatgacagcaacatttaaccggattaatcaatatcgcatcatgtgggtgtttgtctattttgatttaccaacagaaaccaagaaagaccgacgtgagtatgccctgtttcgcaaagcattaataaaagatggcttttcaatggttcaatacagcatttatgcacgtcattgtccaagtgccgagaatgcggaggtccataaaaaaagggtgaaacgctcacttccgccgcatggagaagttattattttcgaaattaccgataaacaattcgggagcatggaattctatcgcggattcgaaaaaaccgtatcgcccgacacccctcaacagcttgaattgttttgaattccttcaaaacaaaaaaaacacccccaaccaaagtggctgaggatgtttccatctgaatttcatttctgatttatgccttatgatattgcatatcagcccattgatcttgggtgtactgttgcaaatatcacgaaatgtaagaacgaaagcaaatcacaactcatgtagtcgtattcctcgccctgctgaaactgttgcaaatatcacgaaatgtaagaacgaaagcaaatcacaactaccccgactgagtatgtttttttgaacgaactgttgcaaatatcacgaaatgtaagaacgaaagcaaatcacaactacatgaatctgatgttactagacctaataactgttgcaaatatcacgaaatgaaaaaacaaaagcaaatcacaacttacgatgttcggaggcatttcccgggacactgttgcaaatatcacgaaatgtaagaacgaaagcaaatcacaacttggcatccttgctgttcatcatcttcagcactgttgcaaatatcacgaaatgtaagaacgaaagcaaatcacaactgatcccggtatgatgtcgaacaccaattcactgttgcaaatatcacgaaatgtaagaacgaaagcaaatcacaacggccttcccgtgacatgcaacaatgtcaaaactgttgcaaatatcacgaaatgtaagaacgaaagcaaatcacaacgcagcagcacgtcgccgtcaaggtcacggtactgttgcaaatatcacgaaatgtaagaacgaaagcaaatcacaacaccggagggaatacaggtgtgcctacctgcactgttgcaaatatcacgaaatgtaagaacgaaagcaaatcacaacttgtttcgttttgttgcctcctccatcaccactgttgcaaatatcacgaaatgtaagaacgaaagcaaatcacaacttgcgctgtcggctgacctgaccacgtgcaactgttgcaaatatcacgaaatgtaagaacgaaagcaaatcacaactgctgaaagtcccgctgtgactctgtttgtactgttgcaaatatcacgaaatgtaagaacgaaagcaaatcacaactctgacgggtcagggttctcattctttcaaactgttgcaaatatcacgaaatgtaagaacgaaagcaaatcacaacttacgtgttgccataatattaacggtttttactgttgcaaatatcacgaaatgtaagaacgaaagcaaatcacaacactgggacctgttggataccggcatgatcaactgttgcaaatatcacgaaatgtaagaacgaaagcaaatcacaactcagattgtggtgatgcctgagaagcttatactgttgcaaatatcacgaaatgtaagaacgaaagcaaatcacaacgcaagtgtggcttctttctcaagctctgccactgttgcaaatatcacgaaatgtaagaacgaaagcaaatcacaacgtacgaaagagcagacaaccattatcataaactgttgcaaatatcacgaaatgtaagaacgaaagcaaatcacaacggcaaattgcagaagaagaagagtaaaacaactgttgcaaatatcacgaaatgtaagaacgaaagcaaatcacaaccccggagatgtggaatgtcagggatatcctactgttgcaaatatcacgaaatgtaagaacgaaagcaaatcacaacacaccagcggttacacagatttttcaaaaaactgttgcaaatatcacgaaatgtaagaacgaaagcaaatcacaacttgtcttcctgccaggtcttcacccgttggactgttgcaaatatcacgaaatgtaagaacgaaagcaaatcacaacgtatccgtaacggcatctctgagttctatcactgttgcaaatatcacgaaatgtaagaacgaaagcaaatcacaacccgtcaaggtcacggttgttgaacgcagcgactgttgcaaatatcacgaaatgtaagaacgaaagcaaatcacaacgaacagagcaaagcgatcacagcagcagcgactgttgcaaatatcacgaaatgtaagaacgaaagcaaatcacaacagcccactggagttgcatgggtttacagtaactgttgcaaatatcacgaaatgtaagaacgaaagcaaatcacaacaatgcaccgtaagctaatccccggccagatactgttgcaaatatcacgaaatgtaagaacgaaagcaaatcacaacggtccatctgcgggtgttgccgccatgtatactgttgcaaatatcacgaaatgtaagaacgaaagcaaatcacaactatcatagtacgcatacccagcccgttcaactgttgcaaatatcacgaaatgtaagaacgaaagcaaatcacaacctgacctcgtttcgcttccgccgtatgggaactgttgcaaatatcacgaaatgtaagaacgaaagcaaatcacaaccgcaaatcctttacggcctgttcagaatacactgttgcaaatatcacgaaatgtaagaacgaaagcaaatcacaacgctcctgcgttgccacaaaacgttatttctactgttgcaaatatcacgaaatgtaagaacgaaagcaaatcacaacgctcggtatgcccgcagcgggctggttttaactgttgcaaatatcacgaaatgtaagaacgaaagcaaatcacaacttaggtgcagttgttttttaatttttaaacactgttgcaaatatcacgaaatgtaagaacgaaagcaaatcacaactggggagcttgttgcttgcaccgtatggaaactgttgcaaatatcacgaaatgtaagaacgaaagcaaatcacaacattgtgccatgccatggccacggggttccgactgttgcaaatatcacgaaatgtaagaacgaaagcaaatcacaacacccatgcgatggtattcaatcttcggtcactgttgcaaatatcacgaaatgtaagaacgaaagcaaatcacaacaaaatccaaaatgcttcaccaccccgggaaactgttgcaaatatcacgaaatgtaagaacgaaagcaaatcacaacgtaggaacccactgctcactgattgctgcttgctgctgactgtatcagggctgagcccactgaaaaccaactgctgactgtttgctgcttgctgctgactgtatcagggctgagcccactgtaaacccactgctcactgattgctgcttgctgctgactgtatcagggctgagcctactgaaaaccaactgctgactgtttgctgcttgctgctgactgaacagtgtgagtccggagggaaaaaagagagtgagcgatcggttcgaccctctcgggtcacaggttcacgggtgacgggtgacgaaggtgatgaaggtgacgaaggtgacgaaggtgatgaaggtgatatagtgatggagtgatgaagtgatggagtgacggaggtgagggagtaccggagtaccggagtatcggcgtggctgagcacactgtaaacccactgctcactgattgctgcttgctgctgactgaacagtgtgagtgccagtgtgagtccggagggaaaaaagagagtgagcgatcggttcgaccctctcgggtctcaggttcacgggtgacgggtgacggaggtgatgaagtgatgaagtgatggagtgatggagtgatggagtgatggagtgatggagtatcgggggagggtgagcccactgtgaaacccactgctgactgtttgctgcttgctgctgactgaacagtgtgagtctggaggaaaaaaagagagtgagcgatcggttcgaccctctcgggtctcactctcacgctcactctcttttttgtagcggggacggcaacaataccctgatatcataggaaagcataagaaattataagtcctgttttacagacttttaatcttgacaaagaaagacataatttccctttgtcggatgttttatttctattttttgtcccccaaactgtcccccggattgtttttgatattatatttgtccaataaaggcaaacaaagtaatctcaaagacaaagattatgggcgtaaaactcagggaaaatatcaaagcaagcggagttaagtccctgtttctggacataaccacaaacggcaagcgttataaagaatatatcgggctgcatcttattcccggcacaacaaaagatgtcagggagaaaaacaaagaaacaaaaaggctggccgagggcatccgtgctaacagggaacttgaactacaagcccgggaatacgagtacaccccggagttcaaaaaaaaggtggattttgtggcctactatcaaaagtttgtgagtgagtacacccaccgggatatcaggattgtaaaatactcctttgaatggtttgtcaggtttttggaaacacagaagataaaaacgatcaggccaaaagcattaaccccggaactttgtagacagtatcttgaattcatgcaaaaggacctccatggggaaaccccctacaattacttcacaaagtttaaacgggttgtcaggaaagccattaaagaaaagctgatgtttgataaccctactgaggatatcagggtaatcagggatgaagggttgaaaaaagacattctgacctttgcagaaattcaaagtctggccggggctttttgtggaaacgctgaggttaagagggcatttcttttcagtctgaacaccgggctaaggtggtgtgatgtaaaagagctgaaatacaaatcagtggactttgcaagcaagcgactgacagtatcacaggaaaaaacaaagcacagttcaaaaagttcaaccgtaaacattgacctcaactcaaccgctttggtattgattggagataaagggaaacccgatcaagctgtttttacgctcccctcccatgctggtagtttgaaaatcctgcagaattgggtaaaacgggcagcgattgagaaacatattacctggcactgtgcccggcatagctttgccgttaacctattaggggagtgcaaaaccgatataaaaaccgttgcctcacttttaggacactcaggcttgaaacatactgagaaatacacccgggcagtagatgaattgaaaaaaagggctgttaatagtatgcctgaaattaacatataagaatgctatgacttttgacattgaaaattctttaagggaaattgctgagaggaataaacgaggcgaaaagcttcccgtgttatttactgagcaagaaattcaggcaaaaatgaatgaatttattagtacagcaaagtcaataatttctgaatcaccaattaacctttcaagatttcaagaaattaatgatttgccctctgaaattatccaacactatgaatacaggtgttcaaatggtgaaattagctttgatgatcttgcgggaaaggtttcagaaatatctgattcaatcagggaagtaattggctggctattggttaagatcaccaaacaaagtgctattgacaaggtcgattcattcattagagagaatcctgttggctcaaatagttttaatgaacttttcaaacggttgtcaaggaaggccattttattacctgaatatgcaggaagagaaaagattttttaccagacgattattcagttacttcaatttgaaattagttccccaaaacaaacaataaaatcaatcagtaatataggtttcaattcaaccctgagccatgtacagatcaataccctgtgggagaaattaacaaccgctaagcccccttatattgatgctcaacatggggttaaaaattttgctgcagtattcagcggaggaaccttgccctcggactttaagcccgtggcatggattgacacggcccccaaagataaaaacactaaaaatacacagacactatttgagctggttaattgcctcatcccggaattgacacagccggaaaacgcctcatccctctataatttcattattgaaaggtttaaagacaaccaagaaaatgagttcaaacgggctaacctgaaacaggcctatgccgcatgggggaaaaaaagcggagcatcaaaacccccaaggaacaaagccattattgatatttttaaaggcctgaaatagcatataccaaatcccacttgtttaacccatacccttactgtaagggtatgggtattttattgattttccgatggttgtatctttgtatcttcaattgaatgataggatttgatcaaatccattttattaactaaacatcaaaataagatggatgtcttaacagctattcaggagcagttaacccggattgaatccggattgctcacccaaaaatcagttttaaccattgaggaggttgtaaaattcacgggattaagtcgatcttacctgtacaaacttacctcaacaggcaggatcccacatagcaaaccccacggcaaaatgatatactttgaccgggctgaggtggagcggtggttgcttcaaaaccccattaagacagcctcacagattgaaacagaagcggcaacctatgtcacattaaacaaagggggggctgcaaaatgattttctcagattattacaagtttgaaaagctaaccgaggcaaaaagccgctttgattgcactgcctccactggggaatatgacctatttgaaaacctgttaatcaataaacggggtttcaatatcgggggactctccctgaactacacgccacaacctgaaacacacagggggcatagggttgattccatattatgcaaaggaagtcacagcattacaaaggtgatcagacccgacccggagagtccggtatcttatggagatgtatacagatcaaacgatgcctgcataatccttttaaacagcgactaccgggaaaacggggttaattcaattgaggtacttgttgcccggggttcaaggaatgacaaagtacaactctatcacttatttgttgatggggaactgcagcatgaatttgaggacctcaggaagcgggcggttaccagattagtaaccggagaatgataacagtggtggaagtggctcaggctcctcccaccatctcttatgttaagatgtttttgtaccctaaatcagtaaccggtgtatgactgtatagattttaacctgacattagaaaaatgtcccggaattgactttctggcctatgtaccacaatacctgacggggggaataaataacggggaaaatattcatggtcgatatgttacggggtatctggacaatctgaaaataagcacaacagaagggcgagtaaaaatatccgggggcagtttgtgtaggtattatctgggtgataactttaaaacccttagccgctcagatactgcccgggccattgaaaagatcagcgacagtttgcacctgccctttgatcgggcacgggtgacccggattgatgtagcacacaatctcatcatgcagcaccccgagcaagcatattatccgcttttagggcaagccccttattataaccgctcagagatgaataacggactttattacaccaacggtaaaagacagatggtattttatggcaaagagcatgagcagaaagttaagcgacaaccaataccggaactatacaggaacaagaatataatccgctatgagttgagatatatgaatcgcctgacagagcaattcaacaggccagagataacggcttccctccttagtgatcaggttttttaccgggagattgttaggcggtggcatgatcagtatttttcaatatctaaaatcaactcaaaagtaaacacattgaggccaacaggaaaagccacagaatttgtgaaaaatttagccctcttgacgattttagagtatgggcagccccatatattgaccctagtaaaaacatggcagaaaagcggggatatcactaaaaaacaggcatacgatcttagacacaaagtcatggagctaaacaaagcccgggagaatgcctccgggagtgatctgattacagagcttgacaaaaaaataatgcaaatagcgacatactattaaaaaaacccaccgagatctgcgagtcatctggtgggtttgaaaacaaaaaacaaataaatctcagcaaaaataaaaacaaaaaaatcacaaagcatatattatcagtaatttatatccattcaaatttcttaatacggccttaatttcaacacgaggctctcatttttgcagaccaaaaagcaaaaattacaaataaacttattactcattagataaaattgatttaatttcctatgaaagaacacaagttagaaccccttaacaacaaccacctacaaaatcatctattaaaactcacaaagcttcttcgcgcccatgatataactattcaacaattcggcttgatcctctctcttgactcaaaaagcggaaaaactctatcggaaataaatcgaatagggttatattcccataaatgttatctttatgccgtcttaaagcaattacaagcccgtggattgatcgttaaggtcggattaaggtattacgctaccggaaaggccgaggtcgtcagaggggcttatttgaacctttttgaaggatcatgaagagtattgaatcaagagtagacgaacttattagcatcaatggtgaattagcatcctttattaatgaagggattaaaccgtataatggaaaaccccccgattttttaacatt

SEQ ID NO: 1727 - DNA, 23747 bp, synthetic construct
  source 1..23747: mol_type = other DNA
  misc_feature 1..23747: note = Synthetic
ccacaggtgaatcaggtaattccaaccgatgaatttgaatttacagtactggaagtagcaaaaaaccggattgtaaaagtgaaactgaccattaaagaacgcggtgatgaataaatggatattggggttgttaatatttgcctgcattgttttttatgcctgtaatagttcgtttacacctaagcagactggctattttaaaatagattttccagagaaaaagtaccagttgttcaacgaagcagggtatccgtacagctttgaatatcctgtttacgcaaatattagcaaagacagtacctattttaatgaaactactgaaaacccttggtggatcaatatagactttccgcagttcagtggtagaatttatatcagttacaaacagattggagagaagaataagtttgatactttaattaaacatgcgtttactttaacgggcaaacattcttccaaagcctattccatagaagacagcctgtttaataatccgtacaatgtggaaggtgtatttttcagagttggtgggaatgtagccaccgccaatcagttttttcttacagattcaacccgccactttttaagaggggcattgtattttgatgctacgccaaacgaagactcattgggcattgtaaataagtttttgattgaagacgtgaaacacattattaatacatttacctggcgaaagcaaacaaagcagtaatacgcaaacaatactaataatgatagcaattgataatattctgattagtgacgaagtggttgaagaacattttgtttgcgatttaagcaaatgcaagggaggatgttgtgaagatggagatgccggtgctccaatggaaaaatgggagctggaaaaactggatcaatactttgatgtaattgcgccctatttgaatgaagcaggaatggaagagattaagcgggtgggcaaatacacgtatgacaaagagtttggctgggtaacacccactatcaacggtggtatttgtgcgtacggaaaaaaagatgcaagtggtactattatatgtggaattgaacaagcatataacgatggcaaactagactggaaaaaaccactgagttgtcaccttttccctattctgattagaaagagcaagaaggatccggacgttgaatatgtaaattatcacccccgggaagacttgtgcaagccaggctgtaagctgggtaagcaattgaaggttccggtttatgcttttctgaaagaagcgttgattagaaaatatggccctgaattttatgaagcattggaagcaaccgccaatgaattaaaaaaacgaaacgatgagtaatacagcagccagttttattgccaaaagcaccatcaaagctgcggatctggaacatcgcagaaaaatcaatttcaatattgggaagtacaacgcggtagttcctattggaaaaaaacagtttaccaatgtaatggaagccagggaaatggcgaaaattaaaaagtgggatgcaatagaacaccttgatcaatatcttgaaatgttcgagcaaaagataactgaaagaggggcaaaagtattgtgggcagagacggcagaagaagcattaaagcaaattggaaaaatctgtaaagagaagcagtgtaaaacattggtgaagagcaagagcatggttacagaagaaattcatctgaatgattttctggaaaaaaatggaattgaaagtgtagagacagatctgggagaatatatacagcaactggacggagaacctccttatcatattgtaacacctgccatgcataagagtaaggaagatgttgcacgtctctttgcagataagctgggcgtacctggcggattgagtccggaggaattaacacaggtagccagacaaaagctgagagagaaatatattgctgctgaagtaggtgtaacaggagccaattttattttgcctgatattggaggtatagctttaacagaaaatgaagggaatggcagactaagttgtgcctggcctaaaacgcatattgtggtggttggaatagaaaaagttataccatctgttcaggatctctctttgttctggcctttgctttccactttcggaaccggacaaagggttaccgtatataataccattattactggccccaggcaagccaatgaatcagatggtcctaaagaaatgattgttattttactggataatggaagaaccaatttactggccagcaaatcggcaagggaggcattgtattgcattcgttgcggagcttgtttaaatgcctgtccggtatataagaatattggtggacatgcatatgaaacaacttacagtggccctattggtaaagtgattacgccttatttaaaaggcctggacgaatacaagcatttaagttatgcctcttctctatgtggtaactgtacagaagtttgtcctgttcaaattaacctgcatgaattattactggacaaccgtcacgaagcagtggtgcaggggaatagcagcctggctgaacgcatagcctggaaagcctggaaaactgccagtttaaacagggttatgatgaatgcaggaaatgggaaaatgaaaaactggatcgtcaataaaatttttaaaggctggacagcccatcgtgcagatctggatttcagtcccaagactttcaatgaaatgtggaaggagtctaatcaatcctagtatatgggagaattgggtacagatattattgtgtattccccaatagcaagtgcccgactggattatattgtaaaattactgtttcagtcaagggctattgtaacgaatgaaattgcagtatttgaatcctattccggaaaaaaaattaattattccaacgagtttttatcaggagttgatgctcaggttatacctcattcgcttttatttgagaaacaaatacaggcacaaagaataatcctaagcaattgggagggtgttccggttttttttgaaacagccggaggtaccatactctttgatattttcgcagcctctttttatttaatttcccgctacgaagaatggcttccacatgaaaatgactacctgggcaggtatgattatcaacaatccattgcttaccaacatggttttttagaccaaccattggtgaatagatggatggagaaatggacttcgcaaaacaatctgccctatacaaaaccggctagcagtttcaaacccagctatgatatagatattgcttacagttatgcatatcattccgtaataaggaatataggcgggtatttcaaggatttactgaacgcaaacttttccggaattacagagagggttcaggtgctggcaggtactagaaaagatccctatgatgtgtacgactggctggatcaattgcacaatcaataccagcttgatccgatttattttttctggtagcatccaaacgagataacattcataaaaatattgctccggataatcaaggaatgattcaattgattcaaaggatcgcgagtaaatacaaagtggggcttcatccatctgtgcagaaagcatctgtatcagaacattttttcacaagtgacaaattgggaaatctagaggataataacaaaaaggatgggtatgaaaagatactgcgaaatgaaaaaatgattattgaaaagcttagtgcaaagcgtgtaacaaaatcccgacagcactatattcaacttaattttcccaccacttatgaagcaattttgcagataggtattgcagaagactattcaatgggatattcaactatatcgggcttcagagcctcctatacaggagcatttagctggtttcatttattgaacaatgaagagactgctttgaaaatttttccattctgttatatggatgctacgcaaatttttcatgaaagaaatacacctgaagcagcgagttcaaaaatggaatattactaccagcaattcaagcaatatggtggttgctttattcccatctttcacaatcagtttttaagtgagcagaacaactttgcagagtggcgaagaatttacgctgatttctgtttgcgcaggctttgattcaccaggtatacgcctatcagggtaatgcaggaaccaatgatgatttccttggttaaaggttctttgattaaaaaggatccgataacaatggcaacaattggattgacataggcgtacaatgcagctacagaagcttccaggtgcttcatggtatataagaaagctactaccgcaattaaagaacccatcataaccagataaccaatggcataccaggtttgagcagggaaggtgctaaaggaaacaagattacctgtaacagctgcaccggcaaaaagaaatagggatgcaaaaatcatttcccatcctatggcataataaggattcaggttgatttgttttctggaaataatgatggtccccacactccagctaagcatggcaattacggaaaccagaattccaatccagtaattgggtccctggtgatgaaaggcgttgtcgtaaaatacaatggcaatgcctgttatgcccagcacaattcccagaaaagtaacccagccaatctttctgttcttaaagaatattttttcaataacaactacacttaaaggatacaaagctgcaattaaagctgccagtccactggatataaatttaacgcccactgttgcgaggccgttggcaaatacaaatagcagaatcgacatccccgctaaccaaagcatttgtttgggattgggaagtttttcaccttttaataaaaaaaatccggcaaaaagcacacccgcaatcagttgacgagttgcagatacctgtaatgcaggggcagattgaactgcaaaacggctggctacccagctagttccccatacaatactggttacagaaagagcgaaatatgctttttgcttggtagtcaaatccattaatgtttaaaatgtctggtgccggtcataaccatggctagcccgttggttacacaatattcaacactgtctttgtctcttacagaaccacctggctgaataaatgcttccatgccagctgcgtgcgcaatctgaacacaatcattaaaaggaaagaatgcatcagatgcaagcaccgcatcttttaaatcgaagttaaattgtctggctttttcaattgcctgacgaagcgaatcaattctgctggtctgtccacatcctttacctaccagctgcttatcttttaccaatgcaatggcattgcttttcagatgtttgcaaataatattggcaaaagcaagattttctttttctgtttcagtacaagctctagcgcccacttcttcccatttttcaaaattgccttcatctgtatcctgtattaatgttccattcagaatacttttttgcatggaagcggtcttgaaatcttttttgtgtagctgtaaaaggattctgtttttcttggtctttaaaatggtcaaagctgctgcttcgtaagatggcgcaattaacacttcaaagaatatttcattaatggcttctgcagtagctgcatcaatggtttgattacaaaccagcacacctccgaaagcactttccggatctcccgccaatgctgcgtcccatgccgttttcacagtggctcttgccgcaacaccacaaacattggtatgcttgatgatagcaaatacggcttcctgatactcactgaaatctgcaatgagctgaactgctgcatctacatccactaagttgttgtaagaaagttccttcccgttaagttgttcaaatacgctggataaatctcccacgaatttggcatgctggtgtggattttctccatagcgaagtactttctctgcactcgggttgaaatagttgctgatggcaatatcgtaatgcattaccacttcaaaagcttttgccgcaaaagctcttctttgttctattgtggtagtgccttcctgatcaatcaataatttttctaaatctgcatagctgtcttttgctgcaataacggtaacgtctttaaaattcttagctgctgctctaatcatggaaggaccgccaatatcaattttttcaataatcagtttttcttcactggtgctgcgcaatgtttcctcaaagggatacaggtctacaattaccagatcaatctcaggaattttatattcctgcatttcctgcaaatcctgtgcttcatatcttctgcctaaaatgcctccgaatacaaccggatgaagtgttttaaccctgccacccaaaatagacggataagtagtcaggctttcaacaggtacgcaggcaatgcccagattttccagaaaagtctgggttcctccggtagaataaatagtaattcccagcttctgaagctgacgggcaatgggttccaggccgtccttataaaagacggagatgagcgcagattgaatttttttttgcatatgttttgctttcagcccttgggcagttaatggggcaaaagttagagattgtattcaaaagcacctttttcaggcaccgaataatggcgcaaatgtaagcgctctgcttcttttttccatttttgtattttccacaatgggttactgctatcaaaaaccagtagggacgcaggaaaatactttgcaattgctttcagtggaactgcgtaaccatcggttacgatgatcaggtgtaggttcggtattgtgcttaaatcgggaaaaggaagttgtggcccggttaccagcaccactttgttgctgcttattataaaaggtttttttaattcaacagaaacaggttggataggctttcctgccctgtataaagttctgccaggttttactacctgattcattaaaacaggattgaatacaactgccgagtctcctacaaactggtgccctaatccctccatgatatccatggcactaagtttgggcgcatgatagacgattagttttttttgtcgactatagttcaggcaatctattgaatgtatacctagaataagcaaaaaagatccagcagctaaaaaaaagtactgtttgtttttatgcaacagccactgatacagtaaaatcagacaaacaaaaatcaataacatctgccaggcattgatttgaatgtattctgtcagggcaaaggggagcgaagctgttttttcaatcaactgattcaactgcagcaacagccagtcaatacagccccccaatggaatggcaataaacgaaaaaggtgcaatcaacaataaggcgagtaacaaatataaaatgagtccggaaatgggaactgcaatccaattggcaatcagaaacaaattggggaaactgtgaaaataatacagcaataatggcaaagtaagcatttgtgctgccagtgtaatgctgcacatttgccagcctagttgtaaaaacttgtttttgagatacaaacttttttcaattggcctggaaaaaaacaaaatgccaagaacagccgcataagaaagctgaaagccgatatcccaaaggaatgcgggtttaaaaatgagtaaacaaaaagcggaacctgccagactgttcagttgatggtgaggcctgttctgctgctctcccagtaagagaaaactgaacataacagcagctcttaatacggaagcccctgccccggtcaacagtgcaaatccccataaaaaaaataagatgcaaaaggttctgacaaacttaagttgcctgaaccttgcaaaaggcttgaaaagcaaaaacaataaactgtaaatcatacccaggtgtaaaccgctgatggcaataatatgaatcacgcctgtattgctgtaggcattcattaatgtcttgtccagatgggctttataaccaatcagcaatgcttctgcaacacttctttctctgttgttgcttatgtattgatgcaaagttttcaacacatagtcttttgctttttgcagtaatgaacctgtgatggaaagtgggtattggctgatgattcgataatctttttggttaaatacacctgatgaaaaatctgctgagatgcagcgtattgtttaaaattgaatccacccggattggtgacggataaaatagtggctggttttttaaatagctgaatttccacaccctctttgagagaatcaacaggaatatgcacattaaaatagatcagcagttttgtctgatgcatagctgccaaagcctgataactattggcttttttaacaggcgtttccagtagcaccactttattgctgatgggaatagctccaggtttgctttgtttgtatagcatactgcctgcgcaaataaatagcaactgaacagacaatccagtcatccagcgtcgcttaaaaaaaacgaaaagcctgccacgaccattgaaaagccaaagtaaggagcttgctataaagacagttccaatcaacccatacggcactacttcatatttacccaataataatcctgtaatcagtgcaagggcaatgcgtatcatgggaaattgccaccagctttgtgaggtatagattttcgccatggaataaacctaaacaaaaaggccacagtattttactgcggccttcaaaaagggtattaataccttatctgctcaggttcatactacgctctttgtagagtgttctgaaataaggatctctgagatctttaataaaacggatggcttctccggtactcttcatttctggtcctaattctttgtttactccggggaatttttcaaaactgaatacaggttctttaatggcgtatccttccagttttttctccatggtaaactctgataatttagccgcacccagcattactttggtagcaatattcaaataaggaatctgataggcttttgcaataaaaggggttgttctggaagctcgtggattggcttcaatcacatatactttaccatctttaatggcaaactgaatattgattaggccgcggatatttaaagcacgggcaattttttctgcatagaactccatggtttctattaccagtggggtaagattaaatgcaggtaaaaccgcattgctgtccccgctgtgaatacctgcaggttcaatatgttccatcactcccatgatatgaaattcctcaccatcaaaaatggcatctacttctgcttcctgacatctgtcaagaaaatggtcaatcaaaattttattgccaggaatatgtttcaataaactgataaccgctttttcaacttcttcgtcgttgattacaattctcattcgctgaccgccaattacatagctaggtcttacgagtactggataccctactttattagccacttcaattgcctcgtctgcattgtaagcagtaccatattctggataaggaatattcagttcttttaataaatcactgaaacgacctctgtcttccgcaatgtccatgttctcgaaagccgtacccacaattggaacacctttttcatgtaaacgcttcgccagtttcaatgcagtttgtccacccagctgaacaataattccgtctggtttttccagttcaatgatttcccaaagatgctcccagaataccggctcgaagtacaatttgtctgccatgtcgaaatcggtggaaaccgtttctgggttacagttcaccataatggcttcgtatccgcattccttaatggccagaagaccgtgtacacaacaataatcaaattcaattccctgtccaatgcggttggggccgctgcctaaaacaatgattttttctttttagaagggattgattcgttggagttcagagtagggttcattttttctaagaattctgcaaaattaaggtctctgaacgatttggtagtttattttttgaatttgctcatataagaatttcgtcttatattggtattcctccccaattgttattttataaagtattctctgttttgtagaaagcgcataaaaatgccccgtatggtaagacgaggcggcttaaatgttttcacaacggaataatccttattgtgatttgctttcaaaatgaaattagtaaataaaagtatatgaacaaaaaaattttgggattggatttgggagtcacctcgataggctgggcggtaattcaagaaaacgactctaggaaagagattttaggcatgggctctagaattgttccgcttgataatgatgaaaagaccgagttctcaacagggaataaaatttctaagaaccaaaagagaacggcaaaaagaacgcaaagaaaaggatatgatcgatatcagttaaggagaagctacctaaccaaagttctgattgaaaataaaatgttcgatgaatctttatttaagcttccatcaatagaattgtggggtttgagagcaaaaggggtaacagaaaaattatcactaaaagaaattggaagagtactttatcatttaaatcaaaaaagaggttacaaaagttctaggtcagacgcaaatctagataaaaaggacacagaatatgtgttggcagtaaaaggaagacatcaggaaattaaagaattaggattgacgataggacaaaaattttataaggaattacagcaaaatgaattctatagaataaaagagcaagtttttccacgcgaagcatatttggaagaatttgatgccattgtaaaaattcaatctggcttttatccagaaatttttacagaacaactaattagtaaaattcgtaatgaaattatttactaccaacgacctttaaaatcacaaaaagggcttgttagtatttgtgaattagcaggatttactacaaaagatggtaaaggaaacagcatatttgttgggcctaaagttgcacctaagtcatcaccaatctttcaattgtgtaaaatatgggaaattgtcaacaatatttcattgaagataaaaagtcaagaatcgaagggaaataagtggattgatttcgttccaacaattgagcaaaaagaaaggattgtaaattatctgaataacaatactaaattatcatatacagaattaatcaagattttgggattgaataaagaaaacgtttacgcaaataagcagatacaaaatggattgcctggaaatataaccgttgccgaaataaaaaaagtcttagaaaatgatattcctgattttgatattgaaattttgctcttagatagcattcaagttctggttgataaaaaatctggcgagattcttagtgaggtatcaggagaagttatttcagaaaactttgaaaataatacactgtatagaatttggcacaccatttattctattaaagatgaagtagagtgccaattggctttagttcaaaaatttggcatatctgaacaaaaagcaaaggcacttgcaaaaattgattttactaaacatggttttgggaataaatcgagtaaggcaattagaaaaattttaccctacttaatgagagggtacgtttattctgacgcatgtgaattggctggctttaatcatagcaatagtttaactaaggaggaaaaagctaaaatggaatatgctgaaaaattagagttgattcccaaaaattccttacgacagccggttgtagaaaaaatccttaatcaggcaataaatgttgtaaatgcaattatttcaaaatatggaaagccagatgaaattagagttgagttagcaagggaacttaaacagagcaaggatgaaagaaatgaaatggattttcgtaatcgatccaatgagaaattaaatgctgaaatagggcaaagattgagtagtttaggtattccagcaacgaagcggtatattcaaaagtataaattcatatttccatccttaagtaaaaatttaaaagatgcccatgttgaaaatatatgtatttattgtggcaagtcatttaatatatcagaggcattaacgggtgataattttgatgttgatcatattgtgcctaagtctttgctctttgatgattctcaaacaaataaggtattggttcataggagttgcaatgcacaaaaaaccaatcagactgcctttgactttatagctaaaaagggggatgtagaattgaccgattatataagtagggtagatgactggtttaagcgaggcattatttcttattctaagatgcagcgattgaaaatttcttatgaaggttatttagaaagaaaaagacagaagaaagaaactgaaagcgataaaaaaatttgggaaaacttcattgacagacagcttcgtgagacacaatatatttctcgaaaagctagaagcattttcgaaaaaatatgcccgctagttactacatctgaagggactgttacagctgagttaagaagattatggggctggaatgatgtattgatgaatttacagaaacctaaatatcaagctctgggattaacgcaaaaaatagaatggagtagtaatcatggacaaaagcaacattcaaaagaagagataattggatggacaaaaagagatgatcaccgacatcacgcagttgatgccttagtggtggcatgtacaaaacaaggatatattcaaagaatcaacactctaaattctagtgatgttaaagacgcaatgaggagagaaatacttgatgcatcaattgtttttgacgaaaagagaaatttgttagaacagtattttattaaagagcggccattcacaacttcggaagttgagaatgaagcagcaaaaattttggtatcatttaagtcaggtaaaaaagttgcttctaaagggattcgtaaagcaaagattaatggcgagaagcagatagtgcaaagaaatatcattgtgccaagaggagctttgagcgaggagagtgtttatggtaaaatcaaaattattgaaaagggtaagccagttaaatacttatttgaacatccagatttaatagtgaatactgacataaagaatttaataagagaaaggttaaatcaaaatgaaggaaatgtaaggttggccttagcttctattaagaagaatgaattattaacccaatcaggagttaagattttggaaggggattgttataaagaagaatatgttataaaatatcctatacagaatataaaatctaaggatgttgagtttattgtagatggggcagttaaaaatgcaattcaaaagcggttggacaaatatggaggtaaggaaaaggaagcttttaaagagactgtttggttaaatgaagaaaagcaaattccaattaaaacggttagaatgtttacaggactgtctgttgttgagcccttttcaaaagataatcggggacatgcaattggctttgttaaaccaggaaacaatcatcatattgctatttatattgatgagaatggtaataaattggaacatatatgcacattctggcatgctgttgaaaggaagaaatatggtttacctgttataataaaagatacaaatgaagtttggtctaaaattttggaggggaatgattaccccgattcatttttagagaagttgcctaaggacaagttgatatatcatgagagtatgcaacaaaacgagtactttcttttaggaattgatgagtctgttttaagtgatttagagaatatagattatagttttctttcagactatttatatcgagttcaaaaaattggtgcttcgtattatgtttttagacatcatttagaaacaagtttagttgatacgaatgaagccaagttaagtaaaagatatatttctattagaagttttgcggcctatgattcttataaacctatcaaagtttgggttgatgtaattggtaaaataaggaaaataaatgcttaaacgaaccctttgcatcgaaagcccatgccatttgcgttttcaaaatggccaattggtagtgagctattcacacgtaaagggcatggaggaaatgccggaaaaatcagtgccgattgaggatattggaatcttggttttggaacaccagcaaattactttaacacactttttattagataagttgtcctcaaataatacagccgttgtaacctgtaatgaacaacatatgccaagtggacttttgatgccattggaaagtcatactttacaaagcgaacgatttaggtttcagatagaagctacagaaccgcttaaaaaacaattgtggcaacaaacgataaaggccaaaatatataaccaagctatagttttaaataaatggcagattcccaaccagttaatgattaatctagcccaaaaagtaaaaagtggagattccgataatcatgaagctcaggcttctgcccattattggaaaaatatttttcctccagcctggcagttttttaggcacagagaaggcccaccccccaataatcttttaaattatgggtatgcaattattagagctacaatggcaagggctttagcaggaagtgggttactacccgcattgggcattttccatcgtaatcgttataatgcgtactgtttagcagatgacattatggagccatatcgcccttttgttgatttaacagtaagggaattagtggataaaacctcgcaactggatgttttgaacagggacttaaaaaaccaattattaaaattaccaacactcgatgtgaaaattgaagacgaaaaaagccccctgttcgttgctacacaaagaactgcagcttctttagctaaatgtttaatagggcaacaacgaaaaattgcttatccggtattgacatgaaaactgatcgcttaaatgcatacagaattatgtgggtacttgttttttttgatttgccggttgttaccaaaaaggacaggaaaatctacgcagattttcgaaaaaatttattaaaagatggatttggtatgtttcagttttctatttatttacggcattgtccaagtatggaaaacgccaaagtgcatattaaaagagtccagaaaaagctgccagaaaaaggccatgtcgtcttaatgaccataacagataaacagtttggattaattgaaattttccatggaaaaaagcagattgatccaatcgaaacccctcaacaacttgaattattttgacaataggaacttgaaaaattgctttaatggtacaaattgtagtttttttggtgatttttttagaaatacaatctttgaaaacccttgctcatattgcgtttaagcttaagccgttgtattcaaagatcgtagtttctaaaaatgaaagcaaatcacaactatttgtcctatcaattaatcaaaacaacggttgtattcaaagatcgtagtttctaaaaatgaaagcaaatcacaactctatggtacgcaaaagaccataatgtaacgttgtattcaaagatcgtagtttctaaaaatgaaagcaaatcacaacaataacaacgttgtcaccgtatttaataacgttgtattcaaagatcgtagtttctaaaaatgaaagcaaatcacaacgttaacaattggctgtcttcagcgcgaagcgttgtattcaaagatcgtagtttctaaaaatgaaagcaaatcacaaccccctcgcctcttgtctcaattagaacaacgttgtattcaaagatcgtagtttctaaaaatgaaagcaaatcacaacgaattactttttcaatccaattcttatctagttgtattcaaagatcgtagtttctaaaaatgaaagcaaatcacaacacagaagtggtagggtatcaattacagattgttgtattcaaagatcgtagtttctaaaaatgaaagcaaatcacaacgtaactcctaaacctaaccaatgcaaacaagttgtattcaaagatcgtagtttctaaaaatgaaagcaaatcacaactaccaaagcgaagagacgtcgagcattgtcgttgtattcaaagatcgtagtttctaaaaatgaaagcaaatcacaactgacttatatcggcagatgtatttcaaaatgttgtattcaaagatcgtagtttctaaaaatgaaagcaaatcacaacaatggaagccgtctttattcatgccaaagggttgtattcaaagatcgtagtttctaaaaatgaaagcaaatcacaacgcgttctgaaggtattatacgcaaggtttagttgtattcaaagatcgtagtttctaaaaatgaaagcaaatcacaactgttcataggttaaggtttaaaggttagttgttgtattcaaagatcgtagtttctaaaaatgaaagcaaatcacaacatcactccaggctggccttgtttcttaaatgttgtattcaaagatcgtagtttctaaaaatgaaagcaaatcacaacgcctttaaggttacttcctgaccgttacttgttgtattcaaagatcgtagtttctaaaaatgaaagcaaatcacaacttttgagccgtacaagacaaataaaaaagggttgtattcaaagatcgtagtttctaaaaatgaaagcaaatcacaacaatcaaaaaatatatgaacaggcactacaagttgtattcaaagatcgtagtttctaaaaatgaaagcaaatcacaacattcttttgtaaccattgaatgagtttttagtcgtattcgaagttcgtggttttttaattaaacttatattattcgtcaaaccaggatttttgaggcctgcttactggataaccatgctcattgcgaaatttttttctttcttgggtaaagttccaccacattttttttgtgtccttagtgtttgcatagtatactactaatctaaattggtcttcaacgcaagggtctgtccaaaaacctttctttatttcgaattcgtctgtaagctttgctccgtctttattaattagttcattaattgaataataacctaagaatacaaggtcttcagcaaatttaattccaaccgatggtatggtttggaattcagctaaagcataaatttcttttgcccgttgaggtgttgcatgaagcaacacttccaattcatcctttgcatagtcaagaatatttgcaattttgattttgttctttctcaaatttgctttttcaaaatcggtaagtgggagttttatgcttgatttacttttcatctttataaagtcgatttacgaatgtataaaaattcaagcccaataaaaaggagcaggaccaacttagttaatcccactcctctgtctttattcatttctgtactatctgatctgtcctctgattaccccggatggtcgcatagaagaatgcacatttacataaagcgcatcatttttaattgaattcaaaatagccatgctgggtaaaaagatttttgtcatgccaaaatcagcagccgattcacaaatgcctattaataccccaccattgattccggcagcacctgtatgaatatgtgcagcacttaaggcatcactcgactccagattactaacagttactttgctatataatttgttgtctgtagtaattctgataagtgccattcctgttgcggtagtagttacagaaggtacttcattcatccctgataatgctacgctggctgcaaaattcacttcattaaatagttgtcctcttacaattccagaaggcacttgcgttgagtgaatatttacatacaaatctgctgttcctgcttttaagctatcaatgaaagaagttcttactcccttcacacttgctttaaccatactgccggtaaaaacaggcataaagtctaataccacagggccattggttaccggatctccggcgtgaatatgtgccatggttaaattgtctcctgaagccaatcctgtaacagaggcatccattgtaatggaattgtcgctatatactttaatagtagccattcctctttctgttcttccggttggttgcgggttttcattggctgcagccagcgataccatgatttcttttactacctgtgcttcaggtgcagaatctgactttttgcaagaagcaaaaatagccgttgcggcaaagacggttgcgaatagtttgtaatttctcatagtttttttctttatctacgagaaaccatttgctttggatttctttattcaaaaaaatctgcattgtttaaagtaaatttgatacaacactttaaccctttacaaaatcattggtatgaagtatctgtttattgctctattaggtttattgtttgtttcctgttcgggtccccgcgttttagatgtggctactgcacctgacgccaatttcagtaattacaaaacttttgctttttacgaagtgactgcttatggagacaccatttcggatcggttcaatgaacgcattgcgtatttaaaaaaggaaattgcccaggagatggagcagcgtcgttttacgcaggtagataaaaatcctgatttgtttgtgaatatcggagtagcggttaaactggaagtacaaacccgagaaaccacctggccgcaggatggcatgatgcgttatatgggacagcgtaattataaatggaagtcagaagaaatagaagtgggccgatacagacgaggagccataaccctgcatgtagtagatgccgcaaaaaatcatatgctgtggacagcaaccctgaagggatcattgccagacgacagcaccaggctcaaaagctttacggataaagctatagaggcattgttcagccgattccctatccggtaagcggatgcattacagtgaaatcttttttcttttgtgagaagttgatttctctggcaatgttattttgaaaggctttattttatttaatataattttaccggaagcggtaaaaaggtcgtagttacgctgcatgttcagccaaaactcaggtgttgtattaaatgcctttgctaatcttaaagacatttcagcacttacacctactttcccattcaccaattccgatattgtttttcttgcaacgccaaactttactgccagctctgtaattgtaatattcaatggagtaagatacatttcttttaaaagtatacccggatgggttggggtcagtcctctttttaatttttctttcatgatttctgaattttaatgatagtcggtatagtcaactagatagacattttgattttcaaatttgaaaataattcgataattgcctgtaatggtcactgcccaaaatccttttaattctccttttaatgcatgtaatgctgagccaggataatttatatcttcaattacttctgctgcatcaagaatttccaataccatttttagcctattaacttgcgcagcgggaagttttttcccatcgtttttagtccaaagcagctttaatcccttatgtcggatactgacaatcatgcataaatgtaactaaataggttacactaaaaaaattttattctttatatgacttcccgtaattcattccagcgtgaagtatagcgtgggcttcgcagttcctgtcgcattttccagttgcgtgtagtacctgctgctgcaaattgtacaatatcgttgcgcatggcaaaattgatattgtcaatggcgctcatgagttttctgttttgttgcggaacggcatcggtaaataaatttccttgcaccgattcatcgggtacgagtccgctcagaattacaccggcttttttgtaaacagccccttcttcaaaaagctgatctactgctgctacggcgggtttaatcagcaagtgcgtggcagaagtagcataaggtaaatgcacataggtacctacactgttgccatgtctgaatcttccttctgttctttcctgtttgggaataacaaaaacataaatgaccgaagcggcactttgttgtcttcttaatttttcggtagccctggtaatataggtagctactgcttctttaatctggtccttgctggttacatttttcccgaacatgcgggtagtggcaatcatttttttattcagcaaaggatctttcatttcaatgctctttacaccattcaattctcttaagagtctttgtcctactacaccgcccaggtttttctgaacccatgcttcaggcatgccgcgcaagtcgaaagccgtattgatattgtatttgcgtaacttttctgcgtactgacggcccacgccccagatatcttctactgcagtttgctgcaatgcagtggctactttttccggtgtgttcaacaccataatacaattggtggcctgcttgtttttttttgcgagccgattggccactttgctcaatactttggtggctgcaacaccaatagatactttaatgccggtccattgctccactgtgtttttcaggtggagcgaaaacgcctctaaccgagagggctcaatatgatcgagggttacaaaacattcgtctacggaatacacttctactgcaccggcgggcaaacatagccgcagggtctccatcacgcgccagcttaaatccccatataaattatagttggaagaaaaggtatgaacacccttttgttgaatcaattcctttgcctgaaaatatggaatgcccatagcaatccctgcctgcttggcttcgtcgctgcgcgacacaatgcatccgtcgttattgcttaataccactacgggtgcattgtgcagggcaggtaaaaaaagtctttcgcaggaacagtaaaaactattgcagtcaattattccaatcataatattctgtccggatgattataccgtgtgaattgaatacgtaacgactccccaaacctgggcccgttcatcgaagccccccgttaaaggaatgtctgcaaattttttgttctctgccaccagggttaactggttaaaatttttatgcaaccggcgaaccagtaattctccgtctaaaatggcaatgatgattttgccgctcacaggtttaatactgcggtctacaattaaggtatccccgctaaaaatacccgcgcccgtcatggcatcactgttcatccgaaagaaaaaagtagctggcttgttgtgcaccagttgttcgttcaggtctatgccccgctccatataatcgtcggcagcagccccgaatccggtggcattggcagtaggcacttcccactgcgaataccgcttggagcctttgtaggcggctccgtacccgatttccccgtccataaaatgattttttacttactaaataatttagtaaatttatactaaaataattatcaattcaatttttgtttatgcaggaaggatatgttttacccagggatcaacagccgctgatggccagcgaaagggagcaatatttgctgatggcttatccttttgaaatggctgtttttgaagctacggagcaaatggaagaaaccattattcgctggatgcaccgcatcatcagtaacaaatcggcctttaccgtgcaagtgcatcagcagatacaggaagacactggtcagctacagttctgtctggccgatcaaggtgcttttgcgcaactggcgaatgaattgaaagtagtgagccagtttatcagcagctaccagtgcagggaaatgtatttcaatctaaggccggcgattcagcatcagttactctgtcattcgcccagttataccattaccgaactggtgttattgcgcaaaccattcggacaggaacaatacaggcaggtaaacgtatttgccttaaaaccctgatggatgccattgctttggattcttagctttattttcgttgaaacgaagcgcattcatggaatccattattgaagcaatccaacaactttgtcagcaggctttacagctgacaccagacagaatagaaaaattaccacagagcggcagtgatcgcgtttacttcagggtatatagcgctgctaatacctatattgccacttacaatatcaacacaagagaaacagccacatttgtatatttcagtcagcactttaaaaaagccgaacttcctgttccggctattttagcagtaaacgataccaataccatttatttgcaggaagaccttggaacggaatcgctgctgaataaactggaagcaaatggtcacggtgaatatgtataccagctttttcagcaaagcctgaaagaactcgcacgcatgcaggtgctggggcatcagggtttagattataactggtgtttaacagccaaggaatttggcaagcaagccatcttgagtgatctcctgtacttcaaatattatttcttagatacactgcaattgccttacgataagcaggccatgctcgacgactttgatgcattgagtacctatttaacccgtacgcagaataagtatttcatgttccgcgattttcagagcagaaatattattgtacaaaacgacaaagtgcattttatcgattaccagggaggtatgcagggtgccttgcaatacgatgtagcatccctgttatggcaggcaaaagcagagttaagtgaggaatggaaagaccagttgctggaatattatatggatcaggtagatcctttattgccggagcctgttgacagaatcacttttgtaagtcagtacaatggctatgtattgatccgtttgctacaggtattgggcgcgtatggattcagaggcttgtttgagcgcaaagcacatttcctcgcaagcataccactggcattgcataacctgaaattttttatagagcacaagcgggtagggattgtaacacctgaatttgatcgggtactgaaactggtcgtggaagacagcatgattaacaagtttgtggcaccacaggccaatgaaaaaacgccactggtgattaccattaacagtttcagttataagcgtggtttgccccatgatgaaacagagaatggcggtggcttcatgtttgatatgcgcggtattctgaatccgggcagatttgatgaatacaagaagctgagtggactggacaaaccggtgcaggattttttagaacagcgaaccaggatgggcaagtttttaaacagtgtctgggatttggttgatatcaccgttgaagattatctgaacagggattttgctaacctgatgattaatttcggatgcacaggtggtcagcacagaagcgtatatgctgcagagcaaacggccagacatctgcgaaacaagtacaaagtaaaagtggtattaacgcataccaatcgtgaaaactgggtaaaataaatgatgatatgaaagcaatgatttttgcagcaggattgggtacccggctaaaaccctggaccgaccatcaccctaaggcgctggcaatggtgaatggaaaaagtttgttgcaaagaaatattttatacctgcaggaatacggaataacggaagtagtggtaaatgtacatcactttgccgatcagattattgatgcggttaagcgaaatcagggatggggttcttccataattatttctgatgaaacggatgcggttttggaaacaggaggcggtttaaaaaaagcagcaccgctttttgcaggcgaagaaaatatggttattctgaatgcagatattttaaccaatctgcagttggatcagatgatattacagcataggcaaacgaatgcactggccacactcgctgtttcgcaaagagaatcatcccgctattttttatttggatccgatagtcaattaaaaggctggaccaatgtgaataccggggaggtaaagccggaaggattaaacactgcaggattatttaaccgggcttttagtggtctgcacgtaatacaaactgccttacttcagaaaataagcagagagggtaagttctcaatggttgatgtgtacctggatctttgtgctacagaagctatttacgcatttgatcacacaggtgccttattgctagatgttggtaagccggaaagtctggtaaaagcagccagtttatttgattaat

SEQ ID NO: 1728 - DNA, 23747 bp, synthetic construct
  source 1..23747: mol_type = other DNA
  misc_feature 1..23747: note = Synthetic
agcagtcacctgccatttccggaaaatacggtattcatcttccgcatcttttgcatctgatgctgttctatggtctggttacttatgttgttttggcggtaaccttcaatttgccgtttttgatggaggcacatcatttttcaagtggcaattccggattgatgatttccttgtttttccttgctgtcatggctcctggatttgcattggaccgtattgtgaaggttctgggtgagaaaaccaaattctacagtctgttgtccattgccttgggactgttgctgatttggattgcacctgtcgagtggctgattataccgggatgtctgtcagtcggtttgggatatggagtgatccagcctcttgtttatgataagacggcagatacggccatgccggagaagacgacactggcactggcttttgtgatggtgatgaattatctggctatcctgttgtctccctttatcacggattccttccagcacttgtttcattcccattcaaaggaattccccttcatctttaatctttgcgtcactttgcttgccatgtattgggcgtatgcaaggaggaaaagtttcttgtttgatgatagattgtagaggaacagttcattcatggatattcattttcaggcgcgggctatgcggagcgcatccggtgctccgttagtccgcgcccgggggatttatccatgttggcggtttacaggccgatgagttcgtatttcagtccgaatacatccgctacggctttgtaggttacttttccttctacaatgttcaggccaagtgccagtgccggatcgtctttgcaggcttgcttccagcctttgcatgccaaggccacggtatagggcagtgtagcgtttgtcaatgccatggtggaagtgaacggtacggcaccgggaatattggctactgcatagtgtacgataccgtctatcacataagtaggttcactgtgcgtggtaggatgagacgtctcaaaacaacctccctggtcaatggcgacatccacaaggacggtgccgggcttcatcattttcagcatctctctggtgatgagatgaggtgctttgtcaccgggaatcaagacggaaccgataacgagatctatattgggcaactccatcttgatgttgtgggttgaagagtagagcgtttttacattcttgggcatcacttcgctgaggtagcgcagtctgggaaggttgatatctgtaatcagaacctcggcacccattccggcagctatttgtgcggcattggtgcctacaatgccgccgcccaggatcagtacacgtgcgggacgtacccctgtcacaccacccatcaatttaccttttccgccttggggcttttcaaggaaacgggctcctacctgggtggccatacgtccggccacttcactcatcggagttaacagcggcaatgagcggtcttctttttctaccgtttcgtaggcgatgcagacggcgccgctttcaatcatggcttcggtcagtaatttatcggcagcgaagtggaaataggtgaacaccacttgtcccttttttatcagtttgtactccggtgcgataggttcctttaccttgacaatcatgtcagctactgcataagtgtcttcaatggttggcaacatttgtgcacctacggcgatgtaatcgtcgtcagagaaaccgctgtttgcacctgcagaggcttgtacatacaccgtatgaccgcgtttcaccaactcggctactccggcaggggtcattcctacacggttctcgttgtttttgatttctttaggtactccgataatcataaccttaagaatttagggggttaaacatgtcgcaagatacgaaaatggaaggtagggtgttatcgtatcctccatgtttaaaaacaggaaatcagttggtgtgccgtatccggaatgagtttgtctttgagtacgtccatatcggctctaccttctgcttcttcggtagtccggttgcttacaatgaaggtgcttgtcatgggaatttgtggatatgcctcattgtttatttgcttttatggggcaaagatatagattctttttatctttgtccgtgttttgaaatgacttattgtaatgaaaataataacaaatcccattttatattcttttttcttcttctcgctgccgtcgggaatgcaggcgcaggaagtagccgacacattggataccgtacatgctgcggaggtttcctccgtaacggaggatacacctttgcggaatgcttcctttattcctccttttgatttccccatcactttctccggaaatttcggtgagattcgtgccaatcattttcatggcgggctggacttcaagaccggggggactgtaggcaagcaggtacacgcattggccgacggctacatttcacgcatccgtgtcactcacggttcgggatatgtactcgatgtagtctataataatggttattcgactatcaaccgccatctcagtgcttttgtcggcgaaatagcccgtagagtgaaagacctccaatatgaagaggagagctgggaggtggaaatcactcccgagccgggggaatatccggtcaaggcgggacaggtcattgcactgagtggtaatacaggttattcttttggtcctcatttgcacctggatatgattgaaaccgaaacggacgagtatgtggatccgttgcccttcttcatgaaggaagtgaaggatcatacggctccgcgtgccgaaggtatcatgctgtttccccgtcccggcaaaggggtagtggatgggaagcaggcacgccgggcttttcctgtcaggcctgccaagacaatcactgcctggggaacggtgggcgccggtatccgtgcctatgattatatggacggagtgcataaccggtatggagtaaagaccgttgttctggaagtagatggtgaagaagtgttccgcagcacggtagatcgttttgcatataatgaaaaccggtatatcaattcgtggacgcacggacaatatatgaagtcgttcattgagccgggcaatcatttgcgtatgttgcatgcatccaatggtaaccgcggatgggtagatattaaagaggagcgtccttatctgtttgtctataccctgagtgacgcattgggtaatacttccaaggtccgcttcactgtgcagggcaagagagcggatattcttccggtggaacatcgtgaaaagtatgtgttcaagtgggataaagtgaactatctgcaggaaccgggactggagttggttattccccgtggcatgttgtatgatgacgcgtggctgaactatgccgtgcgtgccgatagcggtgacattgcctttacttatcagcttcatgatacgcgcatccccctgcatggagcctgtgacttacgcatcggtttgcgccgccgtccggtggaggatatgacgaaatattatgtggcgggtgtcacagcccgtggcggaaaatacagtatcggaggcaagtacgaagacggttttatgaaagtgcgtatccgcgatttgggtacgtatacggttgctgtcgataccgttccgccggtgatttcccctgtaaaccagacccaatggggacgtacgggacgtgttgtgttcaaggccaaggacaaagagacgggcatcaacagttaccgtggtatgattgacggtaaatatgctttgtttggcaagccgaactccatcagcggaaatctagtttgtgaacttgatccggaacatgtggaaaagggaggaaagcatctggtggaaatgaccgtgactgacggatgcggcaaccagacaacgggacagtacgagtttgtgtggtaagacacctcctctctgcccccggcttccccgttatcgggggagagcaatccggtgggaggggaggttggaagttacttttgctgtatatagtgtaatgaataagtgtaatataaatatgtgtaacaggctatcattctcttctcccctctctttcggagagggacggggatgaggccttaatttattagaagtatgaaaaataaaagactgactctttccgtcttgtttgttgtggcagccgtagtgaatgcattggcttgtaccaatcttatagtaggcaagaacgcctctgccgacggctctaccattgtgtcctattccgccgattcttacggactgttcggcgagttgtatcactatccggcaggcttgcacaaaaaaggaacgctgattgatatccacgagtgggatacaggaaagtatctgggacaaattgaacaggcacgtcagacctataacgtaatcggtaatatgaacgagtttcagcttaccatcggtgaaaccactttcggcgggcgtcccgagctggtggatacgaccggaatcattgactatggaagtcttatttatgtgggattacagcgctcgcgtacagctcgtgaagccattaaggtgatgaccgaactggtacaggaatacggctactacagcagcggcgagtcatttacgattgccgatcctaatgagatctggatcatggagatgattggcaagggacccggtgtacgcggtgccgtatgggtggctgtccgtgtgcccgatgactgtatttccgcacatgccaaccaaagtcgtattcatcaattcaatatgaacgacaaggagaactgtatgtattcttcggatgttatctcttttgcccgcgaaaaggggtattttgaaggagtaaacaaggacttcagttttgccgatgcatatgcgccccttgattttggcgcacgccgttactgtgaggcccgtgtatggagttactttaatatgtttaccgaccgtggcaacgaatttctgccttatatattgggtgacaccgataccccgatgcctttgtttgtgaaacccaaccgtaaaatttccgtacaggatgtgaagaatgccatgcgcgaccattacgaaggtactccgcttgacatcagcaaggatttcggtgccggcccgtatcatactccgtaccgtctttcgcctctgtcctttaaagtaggtgaccaggaatactttaacgagcgtccgatttctacccagcagtcgggttttgtatttgtggcacagatgcgttccacattgcccgatgctgtaggcggtgtgctgtggtttggtacggacgatgccaatatggctgtctttactccggtatattgttgcacagacaaagttcccgtgtgctacacccgtgtcgatggtgccgattatatcaccttctcatggaattccgctttctggatattcaattgggttgccaatatggtttatccccgttatgatttgatgatggatgatgtacgtgccactcagacagagctggaagctactttcaatgaggcacaggaaggcattgagtctgctgccgtaaaactgctggagaaagatcctgccaaggcaaaagcccttcttaccaactatacccatatgactgcccaaagtgccttcgacacttggaagcgtctcggcgaattccttatcgtaaaatataatgacggtgtggtgaaacgtatgaaagacggtaagttcgaacgcaactccatcggccagccggcaggtgttgtccgtccgggttatccgaaggagtttttggaggagtatgtcaagcagacaggagacagatataaaatgcctgaataaaacattggtgcgggttacagcgtttgtttatctctcttgtaaaaactgtgtaaatgtatgcaatccgcacaatctgtgttgaaaaaaattaggatatttgaacttattctcctacatttgtgactcaacaagtagtttatattaactttaaaaacaatgatagtcttatggaaaataaggaactgattagacaggtgactgagaaagccgaaaaatggcttaccccggcatacgatgccgaaactcaggctgaagtgaaacgcatgttggaaaacccagataaaaccgaattgatagacagcttctacaaggatctggaattcgggacgggcggtctgcgcggcatcatgggtgccggtacaaaccgcatgaacatctataccgtaggtgccgccacacaaggtctgtccaattatctgaataaatgctttgcaggcaaaggcccgatttctgtggtagtgggttacgactgccgtaacaatagtgacaagtttgccaagatttctgccgacatcttctccgcaaacggtatcaaagtttatcttttcgatgaccttcgtcctacaccggaagtctcattcgccattcgccactttggctgccaaagcggtatcaacatcactgcaagccataatccgagagaatacaacggatacaaggcatattgggatgacggtgcccaggtacttgccccgcacgacaccggcattattgacgaagtgaacaaggtgactgtagccgacatcaaattcaacggaaacaaggagctgattcagattatcggcaaggacgtcgatcaagtttatctggataaggtacattctatctctattgatccggaagtaatcaagcgtcagaagaaccttaatattgtttatactccgcttcatggtgcaggacgtgtgctcattcccgattcactgaaagagtggggatttgagaatgtgaactgtgtgcccgaacagatggtgaaggatggcaatttcccgactgtggtatctccgaaccccgaaaatgccgaagctctttccatggctattgccctggccaagaagattgatgccgatattgtgatggcaagtgatccggatgccgaccgtgtaggcatggcttgcaaagacgacaagggagaatgggtgcttatcaacggtaaccagacttgcctgattttcttgtattacatcatcaagaaccgtattgcgatgggcaagatgcagccgaacgactttatcgtgaagaccatcgtgaccactgaacttatcaaggctgtggcggacaagaacaagattgaaatgcgtgactgctataccggtttcaaatggattgcccgtgaaatccgtctgagcgaaggcaagcagcagtacatcggcggtggcgaagaaagctacggcttcctggcagaagatttcgtccgcgataaagatgccgtttctgcatgttccttactggcagaaatctgtgcgtgggcaaaagatcagggcaagacgctctatgacgtgctgatggatatctatgtggaatatggtttctctaaggaaaccactgtgaatgtcgtgaaaccgggcaagagtggcgccgaggaaatcaaggccatgatggataatttccgtgccaatcctccaaaggaaatcggcggttcggcggtttctctgatcaaggactataagactttgaagcagactgatgccgcaggtaaggtggttggactggacatgccggaatcatccaatgttcttcaatatttcacggaagacggtacgaagatttctgttcgtccttcgggtacggaaccgaaaatcaagttctatatcgaggtgaaaggtgagatgggatgtcccaaatgttacgtcagtgccaatgcggaagctgaaaagaaagtggaagcagtgcgcaagtcacttgggatttaaggattgtacgttcggcagaaagaacggtttccataaataaaaatgaaagggtacaaccggaatgcggtctgtaccctttttcttttgcctgtaaatgtggaagttccggaagagttaagcttcttttgctttctttaagccggtattcgtaatcattatccgtcggatgctgtttctatatgcgacagaagtcaatgagttgacaggttgtactacagattgcggtcgcacgccgattggttgatgtgaatgagagtcgtttcattcgtagttgttcgtttgtgagtgcgtgccttccgcaatctgtttttatttcctttccctttttaatacttcttttcccatttttcattccttatccttccttcttttcatttttctccagccaccagtctatcaatttccgtgcaatgcttagcttgcgcggtatttccggcagattttccttggagaagaatgcggctgcgctgagttcatcttcctgcagttttatttccccactttcgtagtcggcaatgaagcccaccatcaacccgctggggtagggccagggctggttactgaagtatcggatatttttcactttcagtccggtttcttccatgacttcccgttccacgcattcttccagtgtttcgccggcctccaggaagcccgctaccagtccgtagaacgtcccccggaaattacgggcatgtaccagcaagatttctttgcctttttgtatcaatacgatgatggcggtggaaacgggcggatacatttcgttgccgcagttggggcatttcttcatgataggggtttgctgttccatgggcgtaccgcatacgggacagaagcggctgtgctcgtcccagtagagtatctggtatgcctttccggcggaccggtattcgtctgcagaaatgtagtcgtatgaagcccgcaagcctatcatcacccattcttcggtttctgcgacgggctgtcccgcagcaaatgcacgcacctgcttgccgttgggcgggaatacgtcgtgtatattgcatccgctttccggtgtcaagggtggatttatgctgacgggtacgctgtattttatctctcctttttccgtatatcctttcttcaatagcagttggtccttgaagaagacgaaccactgcgtggagggtttgatttctgttgaatcttccattgcttgttttctattatttttttttgaggggggggatgaacacgggaacacagaggcacagagactcttttcaaagagataaagcattcatttctgtgtctttgtgttgtctctgtgttcgccccctaaatttcgtttgctgtgtctttttcttgtcgcacatagaccgttgaccttcccatcccgcggcggcgcaggaacccttgcaggatgaatttgttcagttcgtctatggcggcatgcctggtcagcccgctcaattggatgtattcgtttttgttgatgcatacattctgcttgaggaacaattccaattcggcttttcttgtttcttcggtggtctctactgcctttttcgatttcttggtagtggagtgtacacgttccaacgtcattttcttcttgatgttgttgcggaacgtgctgctgatacgcaggtgcacgttttggaattggacggattcagagcggattttctttttctcgtcgtcggtctcgcgcaagcatttcagtgaagtgctgaagaatccgagttctcccagctccacgatgtttccgttggcaaggaggtcgcacaactcgtcaatgcaggcatccaatgctgcccctatcacattcttgggcagatgttggaaagttgcgatatgttccacaaactccttttgggtataagtccttttcgggcagatacgtgcatggagtgatttcttgtcttctttcccgtcgggcgaaggcgtttcgtaaaggtcgtaatacgcgctcataagatagttgtttttgtttatagcgataaacagttctcgtcgcttcggggaattatttttgtcgctaagcagattaattttcttcttcctaaaaactaatcgtccgacaactgttgcattatcgtccgacagttgtttaattatcgtccgacagctgtcggacgaaacagaaatgggtatgggacgattaattcttagtgaacaaaggtataaaatattgtgatacgaagggtagtgtttggggaggaaagttttagtttgcaggaagtttctgcttgaccccttaaatgtttctattgatgttacaacaaaaagggcgagtttccccgccctaaatgttttcacaacggaataatccttattgtgatttgcttcattttagtgtgacaaagttaagaaataaattgaaaaaaaacaatggaagtgaaaggaattttgattatatttgacagaaacataaattatgtattatgaaaagaatattagggttagatatgggttcagcttccattggttgggctattatagaggaagatggtaatgtaataaaaatcatcgcattaggtagtcgtataattccgtataatggcactgaaggacaagattttgttaagggtgcaggagaaactcgagacgctttgcgaacaaagaatcgtactgcccggaaaggttatgaccgttatcagttacggaggaagtatcttgttgatgtgcttgtaaagaacgacatgatgcctgatgaaagtttgaagtgcctttccaaaatgcaattatgggaattacgcaataaagcggtcactgaatatgtctctaaacaagaattaggaaggatattactttggctcaatcaaaaacgtggttacaaaagtagtcgtagtgaggctaacttagataaaaaagatactgaatatgttgctgcggttaagtgccgttatgaaatgataaaggagaaaaaccttacgattggacaatgtctttataatgagttgtgtagtaacgagtatttccgtattaaagagaatgtttttccgcgggaggcatatatcgaggaatttgacaaaatttgtgagaaacaaaaaaagcatctgggattaaccgatgaactgatagctcggatacgtaatgagattatttattatcagcgaccattaaagtcacaaaaaggacttgttgcagtgtgtgattttgaaggtttttatgaaaaaacagatggtaaagaacgttttgtcggacctaaggttgcgccaaagagttcacctttatttcagcttgctaagatctgggaaagtgtaaataatataaaattgagtacaataagtggcgaaaatgttgaattgacattagaagaaaagaaaaaaatcattcaccatttagacaacaatggtaagctgacctccatagagttatttaagattttacataaaaacaagaaagactttattgttcccagacaattagaaaaaggtattcaaggaaatattgtaaaagtctcaataataaagatattgggtgaaaaatatagtgaattattgaaatttgacttgactgttattgaagaaataggaaggtgtggttatttgtatgataaaaagactggtgaagttctgaatgaaaaaacattgaaatgtgttgactcaaaagtagaaaaggaaccatattatcaattgtggcatacaatttattccataaacgatgttcaggaatgtagtaatgcgttgcagaaagggattataatagccgggaaagtaaaggatggtgatgaggtaagagtaaaaatagataaggaaacagccgacaaacttgcagccattgattttaataaattgggttttggaaataaatcagcaaaagctattcgcaagattctgccatatctgatggaaggggataaatacagcgaagccatgagctatgccggttatgatcattccgtttcttggacgagggatgaaaatcttaggcggggcttattggataagttgaaaccgatagcaaagaattctttacgacagccaatcgtagagaagattcttaatcaaatggtgaatttagtaaatgctattatagagaaatatggtaagcctgatgagattcgtatagaattggcacgtgaactgaaacaaagtaaagatgaacgcaacgctgctgatttaaaaatgagcaagcgtcaacgtgaaaatgagattatagcaagtcgtttagaagaatatggtttgcgggcaacaaaaaataatattgccaagtatagactatatgaagaaattgaaaatcagggtgggaagctaaatgctatttgtgtttattgtggccaaccaatctcacgtactgaagcaatacttggaagagaggttgatgtggaacatatcattcctaaatcaaaactttttgatgattcgcaaagcaataagacattggctcatcgccgttgtaattcttttaaaaatgatatgactgcttatgattttatgaaaaccaaacctaaacaagagtttgatgcttatgtagaacgagttggtcgtttgtattcaaaaaatatgataagtagggcaaagcgtgataagttacttatgtctgaagatgaaatacctgataattttatagatcgtcaattgcgcgaaagtcagtatattgctaaaaaaactcgtgaaattttacaaaccgtatgctgtaacgtttgggcaacaagtggaactgtgactgcggaattgcgtcatctttggggatgggatgatattacgatgaatttgcaaatgcataaatataaagagttgggattgacagaaacagtagtttgggaaagtgaacatggaaaaagaaaacattcaaaagaggttattaaaggttggacaaagcgtgatgaccatcgccatcatgctattgacgcactgatcattgcttgtacaaaacaaggattcattcagcgtttcaatactttaaatgcaagtaagactcgtgaggatatgcagagtgagattgaaaaaagctcagtggaatacaaagagaaactcaccttgttggagaaatatatcatttcacaatgtccactctctgtggaagatgtgaaaaatgctgtttctcaaatacttgtgtcgtttaagtctggcaagaaagttgcagtctggggtaaaaggagagtttacaaaaatgggaaaagagaggttgtacaagataagattattgtaccgagaggcgcattgagcgaacaatttgtatatggaagaattcgtgcggttgggaaggagaaaaaaatgctgaaatatttatttaataattctcacctgatttctaattctcatattaagaccttggtggaacagcgtttaaatcaatacgggaacgatattgaaaaggcattggcatcagtgaaagacaaccctatttatctggatgcggataaaactaatatgttagaatatggtacttgttttgaggaaaaatttgttatgaaatataatgttgatgtaaactttacaaaaacagagaaagttgtagatgaaaagattaggaatattcttcaaactcgtttgcagaagtttggtggaaagtctaaagaggcatttaaagatgtacagtatgaagaaaaatctctaaaatggtatgaagatgaaaaattggaacgacccattcattctgtacgttgttttacgggactttctgctgttgtgccgataaaaaaagatgaatatggaaatgagataggttttgtaaagcctgggaataatcaccatattgctatttatgtagataaagatggtaataaaattgagcatgtttgtactttttggcatgcagtggaaaggaagaaatatggcatccctgttattattaaggatacaaatgatgtttgggataaaatctggcagcagccagactgtacttatccacagagttttttggaacaacttccaaccgtcaatttggaaatggaattgagtatgcaacaaaatgaaatgtttgttttagagatggctcaggaggatgtaaaagttgctattgaaaataatgattataaaacaattagtgagcatttataccgggtaaacagtctttcctcttctgattactatttttatcatcatttggaaactaaaaaggatataaaaaatacagatgcaaaggaaagtaaaagatattttagatttaaaagtgtgaaagcgttatttttacataatcccgttaaagtgaaaattgattgtttaggtaatattatacaatgaatcagcaaatggtattttattaagaaagcgaggatttatctgtaaatgagaataacattgaataggaagattatgagtaatatcaaattgtttcgagataagaaaatccgttctgtatggaacgaagaggagcagcaatggtatttttctattgttgatgtagtcgaggccttgactgatagtgctgatcccaagcaatatataaagaaaatgcgttcaagggacgaaacgttgaatttgaactggggtacaatttgtaccccagttcaaatgacggcagaagacggtaaaagaaggaatattcagtcagctaatataaagggactatttcgtattattcaatccataccttctcctaaagctgaacctttcaagctttggctggcacaagtggggtatgagcgtgtacaggaaattgaaaatccggaattggctcaggaacgtatgaaagaactctatgagcagaaaggttatcccaaggactggattgacaaacgtttgagaggaattgctattcgtcagaatctgacagatgagtggaaggaaagggggattacggataaaagtgattatgccattctcacggcagaaatttctaaggcaacgtttgggctgaccccctcagactataaaatgtataaaggactgacaaagaaaagtcaaaatcttcgtgaccacatgtccgatttggaactgatatttacgatgcttggtgagcgtgttactaccgaaatatctcagaaagagaaaccggatacatttaccaaaaataaacaagtggcacagcgtggcggaaacgttgctggggtggctcgtgagcaagccgaaaaagagttgggtggaagtgttgtttctcctgaaaattttctatcggattccgataaacaggatgatactttagaacttcctttctttgaaaatgatgaatgaataattgtaaaatctatatgctatgattaagaaaacactttattttggaaatccggtttatctgtctttaaaaaatggccagttggtaattagattaccggaagtggttaaaagcagcactttgcctgaaagattcaagcaaatgtctgagataactaaaccaatagaagatattggagtagtggtattggacaataagcagataaccattacttcgggagtgttggaggctttgcttgaaaataattgtgcagtcataacttgcgattctaaaagtatgccggttggcttaatgcttcctttatatggaaatactacacagaacgaaaggtttcgtcatcaactaggtgcttctttaccattaatgaagcaactttggcagcaaacaataaaagccaaaatagaaaatcaggcagtggtactgcgtgagtgtgctggagaagaaataaagtgtatgaaggtatgggctgccgatgtgaagagtggggatccggataacttggaggctcgtgcagctgcttattattggaagaatttgtttaagatagagggttttacaagagatagagaaggtattcctcccaataatctgttgaattatgggtatgccattttgcgggcagttgttgcccgtggattggttacaagtggacttttacctactttagggatacatcaccataatcgttataatgcttattgtctggcagatgatataatggaaccttatcgtccgtatgtggataggttggtatatgacatgttcaaagaagaaggattgaattgtagtgagttgacgaaagaacagaaagcgaggttattgacaattcctatattagaaactgttatttcagggaagcgtagtcccttgatggtggctgtgggacagactacagcttctctatataaatgtttcagtggtgaattgcgcaaaatattttatccggagatgtaatggaccggtttaatgaatatcgcattatgtgggtgctagtgttgtttgatttgcctaccgaaacaaagaaggataaaaaggcgtatgcggactttaaaaaaaatctgcaaagggatggatttaccatgttccagttctctatatatgttcgtcattgtgcaagtagtgagaatgcagaggtacatataaaaagagttaaatccttcttaccggagcatggaaatgttggaattatgtgcattacggacaagcaatttggaaatatagagcttttctatggcaaaaagacagtagatgtgaacactcccggacaacaattggagctgttttaaaagaaaatcccgcatgatagcgggattttttcttggaaaacggcatccttttttagattctaatacttaatataaacatttgcatatcaaataattatatatactctactgtttccaatggttcaaagatactaaaatgaaagcaaatcacaacgaggaatagcttgcggtttatttcaagctcactgtttccaatggttcaaagatactaaaatgaaagcaaatcacaactggggcataagtgttagtggttacgcctctactgtttccaatggttcaaagatactaaaatgaaagcaaatcacaacaccgtatgcgggtcggaaggtgtcctctgactgtttccaatggttcaaagatactaaaatgaaagcaaatcacaacagacatgtcattttttttttttaaaattaactgtttccaatggttcaaagatactaaaatgaaagcaaatcacaactaatgaacaaaactgaatatgataaacttaactgtttccaatggttcaaagatactaaaatgaaggcaaatcacaacaaatccttcgacgcatctgttattcagaaactgaattctttcaataaaaaccatcttttctgccggctttcaacctccttaacctctcgttcggattgtttctgataccttctaccatcaggaccaagtctctccattccacataggataagatctgctttcactgttataggccggcaaccggaacgtaccctcttccagacgttttacatagagcgccatgccttcgtcctcagcatgaagaagcttcatggtcgttctgctccggtttataaaaaaacatcaccgagccggacatcatatcccatccagtcatgaaccactccgcaaaggagttgatttctttgcgcatatccgtcttgtcgggacataggaaattgcatcggaatcattcaggcagaacatggtcgcataacttatgaatgagtcctaatagcagctccggatttccatgactgtccggatgaatcttgataccggatggaaattctattgtcatgtcagcagtcggaccggatggatgattgctactgtgatgctggttttgaggaatgaatgtattatcaagaactttattcagattactggtatagtcacgacttagactgaacttctttttccaataatgaaagcaggatgcggaatatgcttcattctcacagaaatcacgtatcgttaaaccactggattgttgcctctcataaacagccaggaactcttctttacttcattatacgtttcatggtttttggttagcaaagtaatagaagagttcttggatttacaatgtgcactttatcggatgcttacttttgggaagttatataaaaaggtcttagtgtacattacgttattctacatccatagttgcatttcaattagaacgaggtccctttaaagaccgatgaacgctctttgggaagcaagtaaccgcccagtgtgatccggttggagttgagattcgggttgacggtaacggatgctctgtttgtccctttgggtaatgaaaggtcaaccgttgccgaaattcctgcccccatgacactcatggagaaagtgatgttcccttttttgtccgtcttcatcttgatgttcgacgcacgtccttccaccgttatgcctcctacgccgttggggcctccgccattgaaaggggctatctgcacgacagcattgtcatccgacagggagataaaattcgtattggaagttacaaaggccgtctctccccgtttgaagacaagacggtccgcttccaaaacaaaatccagttcttccagtgctttgacagcatccgcatagtttatggaatccatgacggtttccattcttttctgaaacttgcgctcttcggcacttttccgctccgctttcgtatagatacgtttctcactttgggcatatgctgacattccggccaacagtactgccatcataacaaatagtctgttcatattcaaaaggatataaatgattaaaaagtcaatgtatatgtctgatccttctcccttcggtcatatacacacaggcgagagagcacactgcgcacgccacaaacacgattcctgtggtctgtagcggattcccgattccaaccagtggcgagacaagccctccgaatgcgaacgagacggctcccaacagggcggaagcgcttcccgaatgctccctgcctttgtccatggcaagggtggtggaggaggtgaagcaaagccccagcgagaaaaggatgccgagcatgaacccctcataaatggggaaactgcaaccggcaaacaatgccaccgcttcacaagccgaaaagacaagcaaaccggcactgcccaataacgttcccctctctatacgcctgaacttggcggcaagagcagccgatatgaccacggcgagcgcattcatgccgaaacacatgctgaattccaatggggtaaagccgtagtattgctgcataatgaacggtgcggaagagatgttggcgaaaagtgcagcctgggcgaacccaagctgcagcatataccccatgtagggacggtttctcaataaaggcatgaaatatgaaggtaaacgtaaaagaccggatgaggcacgtctctccacgggtatggattcttggtaatacaggctggcgaataatagtaatatgccgataaacagcaggatggcaaagatgccctcccagcctccaacctcggtcattgctcctcccaataccggagccagtaccggggctataccgttgatggaacctacaatcgccaggactctggccagttcacgtccggtaaacatatccgttgatatggaacgggcaatgacaatgcttccggccgctgcaattccttgaaacaaacggaatatgacaaacagatatatgtcagccgaaaacagacaaagcaacgtggacaggataaagaggaatagcgtccatgataataccggttttctgccataccggtcactcatggggccaaagagtaactgtcctgcggccagtccaaccatgcaagaggtcaggcttagttgtaccattgatgtgttggtaccaaacatatctatcatggccggcaaggcaggcaggtacatatcggtgacaaacggaccaaaggctgtcagcaatcctaggaaaatcaacaggaatatcctataggatcccgtttttattgtcagtgttctcattatcagtgttttcattcacatcctcctcctaacgcattatacaaattaataatagactggcaatatgtgaacctgtcggaaaccgcatttaaccgagcgttcagcaacgactggcgtgcagtaagcaactccagataggtggcattgccggttcggtacaacgcctcggaagtctgtacggcacgttccagctccttacactgtctccggtggctgtcaaggcttctttgtaccgactccgtggcatacagcgcgtcgttcacctcctgtccggcatccagcagcgcctgtttgtaggcgagcagggctatctgttcctcatccttggacacacgcaggttggatatgagctttccccggttgaagatgggttgtgtcagggatgcgacagccgaaagtatccagccgccgggattgctcaccacttgtcccagagagttggtccagccggcgtttccggacagtgtgagattgggatagaaagccgagcgtgcctggttgcttacatagtaagcatttgctaatgtcatttcagcctgcaccacatccgggcgtttggacagcaaccgcacgggaagtccggcgttgatccgttccgggaatgtctgttgctccagactgccccgctcaatgcttcgagcggttgttcccaacagcgtgcaaagcgcattttccgcctcgcgttgctgccgcagcaggtcgttgtgcgtggcctccagttcgtgcaggctggcacgtgcctggcttacggcattctctgtttcctcacccactttgaatttcgactccatgacccgtatctgctctttccatacctccaacgtggcacggctgatttccagctgcccgtccagcatcaggagtgaataataaccgttggcgatgctcgctatcaagtccgaacggattgcctgccggtaggcttcctgttgcaacaacgtggcctgtgagcctttcttggcgttgcgtaggttcccgaaaagatctatctcccagcttgcctgaatgggcaattcataagtcttcaccgtcttactcccgtcagtaccggtcagtgtaccctgtggagacagggctaatgaaggcaggaacgacaagcgtgcggcctttagctgcgctttggcctggtcgacgcgcagcagggcggtctgcatgtcggtgctgttctccagtccgtaacgaatcaagtcttgcagcaaagtgtcccggaacatctcctgccagggaaggtcgcccagcgtcagggaatcttcttccgacggtccgttggccgtatcccggtaaagactgtccgtcggcaagccctccggccgttggtaattgcggtagatatggcagctgctcatcgctgccatgcacagtatcatatatattatcttcttcatgattgtctctctttttttcgtttacccatcacccgttcttcgatgtattggaatacgatgaagaatgcaggtgttacaaataacaaggccacagtcccgataagcaggccgcctactgtacctacacccaaagaacggttgccgttggcacctactccggaagcgaacatcagcggaagcataccgaaaatcatggtaagtgctgtcatcaggatcgggcggaagcggacggtagcagcactcatggcggcttgtgtcaatgacatacccgcttggcgacgttcggttgcatattcagtcatcagaattgctgttttggaaagcagcccgatcagcatgatcagccccgtctgcaagtagatgttgttttcgattccccatatacgggcaaagaggaaacttcccatcagcccgaaaggtacagaaagaatcaccgccatcgggataaacacactctcgtagagggcgcagagtatcaggtagatgaacaggatacatacaccgtagataataacggtgtcatgcgattccgccatctgttcctcctcccttgtcatgccggaatactcgtatccatagccggtagggagggtctgtgcagccacctcgctcacagcattgatgacgtctcccgagctgtatccttctgccggcattccctgcacgttgatggaggagaacatattaaaacgtgtcaaagactccgcaccgtaggtcttggtcagtttaacgaattggctgaccggtgccatcccgccgcttgtcttcacaaagatattgtccaacgactgcatgttcttgcgactgtccgaaggagcctggataatgacgcggtacagtttagtgaaacggttgaaattggaggcataaatgcttccgaaatagccggacaacacctcgagaactgcatccgtggtagtacctgcacgctgacattgcgcctcgtccacatccacacggtattgagggaaattggcactgaacgacgtataggccatctgtatctccggccgtttgttcagctcggcaagaaacccgtcggtcactttgctcaaggcgtcaattccctttccgctacggtcttgaatataaagctcaaagctgtttcctgtaccataacctgaaatcatgggcggtgagaacacgaagatgttggcattcttgatgcccgccgtgcggcggtagatttcctcggaaatggcatccacgctgctctcctcatcctgccgttcatcccagtgtttcaacttgatgataaacatgccgtgagaggagccgctgcccgaacccatgccgaatccggcaaccttgttgaaattgtcgatctgcggaatctccttcagctctttctccaccttgtccatgatacttgcggtctcggccagcgtgcttcccgcgggcgcgtccaggctgacaaagatggacccggtatcctccgacgggacaaggccggtcttggtggtgttcatcagatagccgagcaacaggaccgccagccccaacaaggaccatgccagccatttatgcttgacaaagaccttggttaccgacttgtatttcagcacaatgcgtttgaaggccgaatcgaaagccatgcggaaacgggtggagaactccggtcttttcccttccaccaggatctcgttcggacgcagtatcagggcgcacaaggcaggtgaaagcgttagggcattcacggccgagatacctacggcaaccgccatcgtgataccgaactgcgtatagaaaatgcccgatgttccccccatgaaagataccggaacgaataccgccataaaaaccagggtggaggtgacaatggccgacgagataccgctcatggcgtcaacggatgccttatagggcgaacggtaaccttcatcgaaacgggtctgcaccgcttcaaccacaatgatggcatcgtccacgattgtaccgatggcgagcaccagcgcgaacagcgtcagcaggttgatgctgaacccggcgacatagagggcggcgaacgtaccgatcagcgacacaaagatgctgatggtgggaatcagtgtggaacggggattctggagaaatacatataccaccagtactaccagtataatagcttccagcagtgtcttgatgacctcgttgatggaagcgtcaaggaagttcttcgtgctcatcagctccacgatttccatgtcttccggaagggtttcctccaactcgtccaggtacttgtctatattagtgatgatttcattggcattcgttccggccgtctggttgatcatacaggtgcttcccggggcaccgtttaccgtaccggtataggagtagctctgcgctcccaactctacggtggcgatgtctttcagtttcagtacacgtccgtcatcataagccttgatgacgatttcctcaaactcctgttcggtttccagccttccgcggtattttaatgtatattggtatacgttcttggagtcttcgccgatggagccggtggatgcctcgatgttctggctggaaagcgccgtctccacatcgcttggttccagttcatattgtgccattacttccggttttaaccagatacgcatcgcataatctcctcccatcacattgacttcacctacacccgagatacgctgtatctgcggttttacattgatagtcaggtaattggtcaggaatgtttcatcgtatgtccctttcggactgtaaagtccgaagattttcagcatactgctttgccgcttcatggtggtgacacctactttagtcacctccgccggtaacagcgaggtcgcagtggacaccttgttctgcacattgacggccgccatgtccggatcactgccctgcttgaaataaaccgtgatttccgcactgccggtattgctggcggtggatgtcatgtaagtcatgttctccaccccgttgatggcttcttccagcggcacgataacacttttctgtacggcttccgcattggctccgctataggtagtagaaacacggatggtaggaggagcaatgtccggatattgctccacggacaacgcatacagaccgattaatccggctactaaaataacgaccgaaatgactatcgaaagaatcggccggtctataaatctttgcagtttcataagctatccctccttttcttcttttactgcggcttcttcttttcttgc

SEQ ID NO: 1729 - DNA, 23738 bp, synthetic construct
  source 1..23738: mol_type = other DNA
  misc_feature 1..23738: note = Synthetic
tccggcatactgcctgttgacgtcagtgtttttgaagcggcatcccagtcgccggttgtattcataatgcccgtacccatgttgtcgatccaggaagacgtgaattttttaagcgcattatcatatcccataatgctcataccctcgaatggcatgcccatcatgttaccggtatgtctgcttacctggtaccttccatccatcgccatgctgtttgaggcggcggttttgaccatttgcggggcggcgccttcatagttccacaccgtcatttctccctgccagttacctgaccaggatgccatcattttgtgcatgtcgccgggtgtggcatactccatcattttcgccatctgcgtggccgaatcgatgggaacccaggcttcttcagtcttggacgcagcggttgcgctgtctttgttgccggtttcggttttggttccttctttacaggcaaccatcgatatggctgccatgcagaaaaccaggatcgtgtgtttcataagcaagattttagtgtgataaggtagcaagtttcttttgcttatgcaatacccctgtatgaatcacttattaattccgcccccctgcatcccgggttattgtttaaccggtgttacccggaaccagtcgatatctgcaaaacccgaatcattgatctgcgtggttcttgaacagaacagtcctgctttggcacctgtccacctgcccggttccgcctggaaagtatcgggtatctccgtaaacatttgtccgtcggcactgtaggcaaaccgaacctgcgctcctttggtaagtgttgcgcgcaggtaaatatcccctcctgcatacgcaccgagtatcttttccgtttcctgttttccttttatcgcgtccttgcagtgtatataggcaagaaaatttttaccattcctgaacaccagctgcaatcccgcgtaactgcctcccatcaccaccagcccggctctttcgttttctattttgccattgggtgtaaagcggagcttggtggtaaacacacaggctgttgccggtattttttgcaggaacaggttaccggcatcccaaaggtttttggcgctgtcgggtaatttatctgagaacagccgaagtgtacctgcggccgggttggtgaatgcccaggtgcttttggggttcgattgccattgccactgcaggccgatcgtattggaattgaattcatcggaagtggcgggaaccgtcacgggaatgcttttggccacaaccggtttccggtaggtggctaccggctcgcctttgccgtctccatctttatcgataccgatcaccggccagtcgttcacccatttcatcggctgcaggtgcactacccttccgtaggcggctttgtcctggaaatggagaaaccaatcctctcccgaaaccgtattcacccaggcgccctggtgcggaccgttgacactgctgctgccctggtccatcaccactttccgctcgtacggtccgtaaatatttttcgaccgcaatgccagctgccagcccgtacttacgccgccggccggcgcaaaaatgtaatagtagccgttgcgcttataaagtttaggaccctccaccgtagggtccttgtcatggccgtcgtataccatcacgccttcatcaagtgttgccgttccggctgcattcatttttctgataatgagtaggcttttgataccggcgcggctgccggcccaggcgtgaaccaggtaagcgttgccgtcgtcgtcccaaagcggacaggggtcgatcagtcctttgccggcaaccacctttaccgggtctgaccagggacctgcgggattttttgtttttaccatgtaaataccaaaatccggatcggggtaatagatatagaattcgtttttatgataacggatcgatggcgcccagacgccttcaccatgcgttgtggtggcaaaatgttcaagcggaatttgtttcggcaatgcatgtccgatgatcgtccagttcaccaggtcttttgaccggagaaccggcagcgccggtgcgtgttcaaaagaagatgatacgagatagaaataatcgtccaccctgatcacatcgggatccgaataatccgcattgatcaccgggttcgtataggttccgttgccgttatccggaacccatacagttcctgtctgtgcttttgcaacggcaaccgctgccagcatgcacacaatataattaaccagtttcttcatctgcatggtttgaattattgaaacaaaggctgccagccgggaaagataacggccggcgtgtaccgtctggcttcatcatcttgtaattgtttgctccagtttatccgcgcatcttttgcagcgccggggccggtattccggtactcgtaaaacctggcggtattttcattggcagggtttttccagttattccatcccgcgggaagaatatgcgcactgatttcgcaatgaagataagctacagcggcatacggccgccatggtcttccgagcgaaacatggtgcaggctgctgtcgcccgtgagctggcagcggaggaaaacaaaaccgaaagctttgtcggcgggagtggaggccgcggttacatgcgaattctttttactgtgaatacggcattcctcaaacacagccgtagccggtccgaaaataaaatcggtggttccttctatgtaacagtttttgtaatactggcgactgccctcgccgctgcagaacaatacatcctggaaaccggtgaaacggcagttccggaatgcaagcttatcgcccttggcaaacacggcaacggcctgcccggcattgaatcctgcattgttctcgaaacagatattttcggcggtaacattatcggccagcagaaaaaaactggcagaggtataagtgtttaccgtatcgccgttaggtagaatggttcctgtatggttatcatatgtcaacaccgttgatgcaggatcatcgccgataagatgtacaaaatcttttcctttggccagctccagccgctccctgtacactcctttcttgatgcgtatacggataaaagctttgttaccggcgggcaccgcatcgagcgcctgctgcacggttctgcagtcgccgctgccatcctgcgcaacaacaactgttcgctgctgcgcaaacaggaacagggctgtcaataaaaaacaaaccagtattataaaccgcttcgggagatgagctgtatgtctgcaggaatgagaaaacataagatgagcgctatagtgtaaacttaaaagataaggccgccttatgcaagcagccttatccgattcaattggtttgccgaacggaatgcgcttagtatcccggattctgcgcaaggtttacgtttgcatcccttgcaggctggggtatcggcatcagttctgatttaccggttacaaatcctgtggcataccttgcaaccgttgttgtattgatggcagcgctcagccaggtaacttttgtggtgcctgccggtgtactggcaggggccgctttgtagaacgagtttgcccacagtgtactggcaccccaggtattgtcatcgctcgttgaattattgcgaaagtacatggaaacaggcaggttattatagggcgccgccagggtggacatagcggtaagcgctgttttggtatcggcgatggtttttgccagcaggttccagcggatcaggtcggatttgcgtacgccttccccgccgagttcgagcgagcgctctttggtgatggccgcaaaaaaagttgccttcgtaagtcctgcgggaagatccgctgttacatcggcggtgccgatgggtttgccatatcctctcctgcgcaccatgttcaccgcattgtaggcagcggcggttggtccgttgagttcgttctctgcttctgcaaacatcagcaacacatctgaataacggatgatctgccatttcaatccaaaatactgtatggcattggttggggcataggctggattggtaacccagtcgcggcggtatttaccgtcacagatagccgtgatcgcctgtcctaccttggttgcaccatccgaagccacattataaatggcgcaggtaacatcccttctcaggtcggttgagtcaaacaggtaaaaataggtaggcaatacgttaatgcttttgttgccgaaaccatttacactgggaccgttataatatcccagtttggtatcttccgccgctacgcctccgatagcgcttgcctggaacatcagctcgccctgcggatcggttaccgcatgtgcatttacctggtctttccacagcgctttgaagcttgggttcaggttgtgctggtttgatttgatgatatcttcgcatgcatccctggcgatctggtaaaaactgaggtaatcggcggcacgtttcaggcttccgtcctggcgcagcgcataaccgccgcggaacagagccagcctggcacgcaaagccttcaccgttcctttggtgatccgttcatcgggctggtcaccgatcgcagccaggtcgttacgccagggaaccaggtcttcggcaagtttcagatccgcgatcaggcggttatagagcgtatccctgtcggtacgcgaagggaaaggattgctgctcgccagctgcgatgcgggtgcaaaatgcgcgggcaggtcgccccagtgtttgatcgcttcaaaataatactgcgcgcgcagcgtcagcgcttcgccatacatacgctgcagtttctttttttcctggtcggtgccattcgtatacaatgccatcctgggtatattggcgatgcatatattggagaactcgatgccctggaacagctggttgaaaggattggtgatctgcgcattgcccgatgtggcggcataacgcgcaatatcacggcggtcgttgtctgaattacctgtaggcccctgcatttcatcggtgtccacggtgtagtataggctaagccgtataccgaaacctgcatcgcccaccatacggctgtacgcaccggccagcgctttgtaagcacccggcacatctgcaaaagccacttctgcactgacatctgtgatgggttgctggtcgaggaattttttacaacccgtcaacagcaacatacaacctgttgcagaaagagcggcgagtttaaaaatatgtctcgtattcataagaaagagtttattgtttttagaaagttgcgtttataccaaaaatgaagctgcggcttttgggataagccgaataatccaggccgggtgtcagcggactgttacgcacgcttacttccgggtcgtagccggtatatcctgtgagcaccgccaggttattggcggttacataaaaacgaagcttgctgatcttcatcttcgacaatgttttggaaggcacggtataaccaaccgtgatattgttcaaacgaatgaacgatccgtcttccatagcccatgagctgggataaaacgcgcccgcacttttgatcggctgccatatgctggcattggcattcagcgcagacagctggtcgggcgcgatgcccacagactggccggttgaattcacccactgtgcggtctggccggttgccgttaccactttccatctgccgttcatgatatcgagcatattggaattggcggtatacccgttggtgaactcgatcttgttggcgttataaatggtattgccataagagaagttgaggaacatgctcatatcccagttcttataagtgaactgctggttcagaccgccggtgaatttgggcgtagggttaccgatgatggtacggtctttatcaagatcgatcacaccatctccgttcaggtctctgaacttcacagaaccgggctgcaccgtaccgatgatacctgcgttggtgactacacccgatttcaacgtatacaccatcgttgcggggttatagtcgaaatcggacactttataaaaaccgtcgttaatcagtccgtacatggcacccaccggatcgcctacacgaatgatgtaatcggttggctggcccgatacaccccagctggctccgggataaaagaatttctggttctgcccgagctgctcaacacggttggtgttgaaggacatattataactggcattccaggtaaaatcttttttacgcatgatcacgccattcagctgcaattccacgcctttgttgctggttttacccacattctgcaactgcgtggaataaccgtaagtggaagcgatcggtacattcagcagcaggtcttttgaactgttgttgtatatatccacgctgatggtaagcctgtctttgaacaatcccaggtcaacaccaaagttgcggttaacggtagactcccatttcaggccttcgtttacgagacccgcggaatagtatgcgataacagattggttgttgagtccgtaataatagctgccatcgttgcggaatgttgtcaggaacaggtaatccgcaatacggttattacccaccgtaccgataccgaacctgaatttcaggtcgctgatcacctgcgaacgctgcaggaatgcctcgttcttcacgcgccatgccaaagagccggagggaaaatagccccattgcctgccaggcgcaaatttggacgcgccgtctgcacgcaggttgaagttgaggtagtatttgttgttataggcatagttcatctggccgaagaacgaaagactggtgtacctggtggcgctgtatttcgggtaaccggtaaaagaagtgccgatcgtagccgccttgctgaaggcatcgccgggtgatgtgttcaaaggcaggttacggaaaagctgggtatggctttcggtgcggagatcataggtttcctcgcccaccagcagcgtaaaatcgtgcacacctttgaatttgctgacggaataggtaagcacattcgaattggtgatggttttccgcgtaacggaatccagctgcacaatgggttttcttccaccctgtatcaccgcatacggcgtgattgaatcgctgaactggcgatcgatcaggttattgtagtcgtacccgaatgttgatttaaaagtcaggttacgggttatggtgtaggtaaggctgggagagatattgaatacatcggttgattttttccggtactcggcattggccagcgaaatcggattgatcaggttcaggccattgcccacattctggtctgccagcgggtcggcatcatcgatatcctgcgtggcagaaaggaacggacggtattttaccgcgttacgcaaacggctgtaggaagatccctgctcggaagaaacgccggacccatacacatcggtatgcgtataacgcgccgcaacagcaagtttgatcttatcggtgatccggtagtctgccttcaggtttaccaggtgcctgcggtagtttgaattcagaataatggctttatcgttattgtaggtatacccgaaattgtaggtaaagcggttgttaccgcccatggcatttacgttatgcgtggtggtaatgcccgttctgcccgccacttcatcctgccagtctaccaccggaacattcttatacacgctgagcgtatcccaggcagtgccgaagttgcgggtaaaagtggcgctgtctgtgctgctgcccctggatctttcagactggtagaccacgtaatcgtaaggactcatcactttcagtttttttgcgagtgattttacacccacaaaaccgttatagctaagcgtgagtttacccgggcgaccggatttggtggtgatcaccaccacgccattggcgccgcgcgcaccgtagatagcggtggccgcagcatctttcagtacatcgatagactgtatattctgcggggaaagggcagacaggccgttttcgacctgtacaccgtctacgatgtataagggtgaattatcgccggtgatagacataccgccgcgcacacgcaccctcacttccgcatcgggagaaccttcggccgtagtggcggtaacacccgctaaccggccgttcaatgcttccgcagcggagttgatagggatatctttcaggtctttggcgcccacgctcgaaacagaagccatcaggttctttttccgaacggtctggtaaccgatcaccaccacttcttcagattccctggcttctgcggcaagggacacgttgagggttgtgcggctgcccaccgtctcctccctgccggcgtagccaacagaggaaaataccagtacagccctgttattgtctacgccgatggtgtattcgcccctggcattggtggcggtgccctgtgtggcaccttttacccttacactaacgccttcgagcgggagattatcggaggaaactttaccttttacggtaatccttgcctgggcaaataactgcggggatccggacagccatgcggctgcgatcaggcatatgcacaggcatactttgttcattcgcatacgaaactggtttaagcgatctataatagagggttttggaaaacgcagcaataacgaaacaaacatttgttcgttactaacgggagacaccgttaccacgggaacagggtttttacgaaaaggcatagcaagcagttttacatcgttgaacagcgccggggaaacgcatgttggcccaatgctacacctatatagacaaccgcgaaaaggaaaacgctattttttctacgcaatcgttcccggcaacgttatcggctgaagctgagtaaattagagtcaaaacaaccgcgcaaaagcagtaattggcattcaaaaaaaacgggcaccggcacttacagcagttattgtgaaaacgggcaccggccgcgttttcagtattggctggctgcttttttcagttgccgctttcttacatttaccaaaacggccgtatgaaaatcctctgtatcggtgaagcactgatcgatatgatctgtaccgacaagggcaccaggcttgccgagggtacgcattttctgtccaagaccggcggagcgcccaccaatgttgccgcagccattgcagcgctgggtggtgatgtggcgttaagcgccaaagtgggcaacgatgcttttggagaaaaactgcgttcagccatgcaggattttggtgtggatacacaatggatgctgaccgatgaaaaccgattcaccacttttgccttcgtatcgctgatggaagacggcgaacgcgattttgtattcaaccgcggcgccgatgccgaattaacggtggccgatgtggatgcgatcgatctcggcaatatctcaatcattcatttcggttcggccactgctttcctgcccgcccctttgcagcaagcctatacacacctgctgcagaaggccaaaagccagggcatctttatcagcttcgatcctaattaccgccatttattgtatggcaacaggcaaccatcgttcattgaacaaagccggcatttcctaaagacctgcgattttaccaaactcagtgatgaagaggccctgctgatcacgggaaaaaaagagatcacggaagccgctgattatttgctcaataccatcgatgccgtatttaccatcacgctggggaaaaaaggagcactggtgggcatcaacaaaaccttgtttactgtgccctcggttccgctgcaggcggtagacaccaccggcgccggcgatgcatttgtaggatcggtgctgcagcagctggccggtaagaaaagcaaacaactcaccgaagaaaactggaaagcgatcatcgctaacgccaacctggttgccgccgaaacctgccggtatatgggagcgatggaggcatttaagatgttgaaaagataaaatgtatttttttgtttctctgtttttttaactaagttagagtggcagctccctcctactgcctgttttgccgcaaattcccccatgctgcaaaaccaaaaatctcgatatcctacaaaaaagaaaaaagcgagttaccccgctttggatgttttcacaacggaataatccttattgtgatttgcttcaaattgtttactaaagatatacaaaactgattacgcatgaaaaaaattcttggactggatttaggtgtaacatcgataggctggagtgttgtaaccgaaaaagaggatacaaaagaaatattgggtatgggctcccggattattcccttgagcacagatgacaaagacgagttttcctcgggaaataaaatttcgaaaaatcaaaagaacacaacccggagaactcagagaaaagggtacgatcgataccaactgagaagaaagagactaacagaaattctcatcagcaaaaacatgtttgatcctgctcttttcactctgacaccgttgcaactctggggactacgtgcgaaggctgcgggagatatgtcaaagccgcacaaaatacaagacaacgcaaaagtaacgttacaggagttcggccggatactttatcatctcaatcaaaaaagaggatataagagcagcagatctgatgctaatcttgacaaaaaagaaacagaatatgtagctgaggtcaagaacaggcatcagcaaatacgcgaacaaaacttgacaataggtcaaaattttctacgtctcttaaatgaaaatgcaaattatcgaataaaacagcaggtatttccgagagaggcatacatggaagagtttgattcaatatgccggcaacaacaaaaacatcaccctgatcagattaccgacgatttcattgatcaggtcaaaaatgaaatcatatattatcaacgaaaactaaaatcgcaaaaaggtctggtaagcatttgcgacttcgaaggcttttggataaaaaataaaatcactggaaaagacattttttccggcccaaaagtatgtcacagaagttctccattattccaggtatgcaaactctgggaaaccatcaacacaatcaccctcaaaaacaaaaaaggggaaattctttcaatcccgctagaaaaaaaacaggacatattcaactacctggatacgcatgaaaaaatgtcagcggcgcagctattacagatacttggcctcaacagaaatgaaggatggtataccaacaaacagatagaacgtggtttacagggaaatgtaacaaatacgcagttactgaaatacttttcggatggcgatccactgctgaaatttgatttaactgtctcagcgacgggaaaggatgcgtttctagtcgataaaagaacgggcgaagtaatcggttctgctgcacacaggctagtcgaggatagtttggagcaggagccgatgtacagattatggcacaccatttattctattcgggatacggatgaatgcaaacaggcgctcactaaaaatttcaatattgacgaatctgttgcggaaaagctttccctgctcgattttgccaaatattctttcggaaataaatcggcaaaggcaatacgaaaaatgcttccttttcttctggaaggctatgtatacagtgacgcatgctcctttgcgggatataatcattccgattcctatacaaaagaggagcaattaaagaaaaaactgcttgatcgccttccattgcttgcgccgaacagcctccgtcagcccgttgtagaaaaaatactcaatcagatgatcaatttggtaaatgcggtactcgaaaaatacggcccgattgatgagataaggattgaactagcaagagaactaaaacagagtaaagaggaaagaaacgacacttttgccaatttgagcaagcgtgaaaaagaaaacattcaaatacaaaaacgaattgagggagaatatggacttcgttccacccgaaaaaatgttattaaatggcgccttttccatgaaataaaaaacgaagaaaccaacataaatgctatctgcctttattgtggaaagcctttcggaattacggatagtcttcgtggaaacagcattgatatagagcacattattcccaagtcgctactgtttgatgactctcaaagcaacaaaacgctaagtcatagatcctgcaacgagctaaagggaaataagacagcctacgatttcatgaaaagcaaatcagaagaagaatttgcagcctatcttgacttaattgacacgctctttaaaaacaagatcattggaaaagcaaagagagacaaactactgatgacagaagaaaagataccgaaggattttatagaaaggcaacttcgacaaacccaatatattgcccgaaaagcaagggaaattctggagcaggtttgccatacggtatggagtaccagtggcagcataacagagtatctgcgccgaacatggggttgggacgatgcactgatgaacctacaacttcccaaatacagggaactaggtcttaccgagtggaaagaatgggaaacaaatgacggacaaattcataaaaaagaaatcattaaagactggtcaaaacgggatgatcatcggcatcacgcaatagatgccctggtgattgcctgtacccagcaagcctttatacaacgcattaacaatctcagcgcaaaaggaaatcgagaagaaatgtatcgggaaattccggatgcgaaaagtcgaaatatctccctgctagaatgctatatcgtatcaaaaagaccgtttacgacaaaagaagtggcggaaaaagcatcagaaattctaatatccttcaaatccggtaaaaaggtggccacattcggagtccggaaaatcaagcaagacggcaaaaccaggattgttcaaaaaaatattatagttccaagaggcccgttaagtgaagaaagcgtttacggaaaaattagagccatggcgcgggatactaagacgggccaaatgatcaaatatcccgtaaaattcctgttcgagcatccggaaaaaatcgtcaaaagccggattcggaagctggtggaaacacgattagcaaaatttgagaatgatcagaaaaaagcactcgcttcattaaaaaaagagccactctatctggatagcaaccatacaacagttttagaatatgccacctgctattctgaggagtatgtgataaagtaccctttgggaagcatcaaggcaaatgatgttccgtacatagtcgacggaaaaatacaattgttaataaaggaccgtcttgagaaacataataataaagaaaaggaagctttcaaggagccattgttttatgatgctgaaaaaaagattcccatcagatcggtacgaatgtttacgggcttatcaaatgtggaacctgtaaaaaaagatacaaatggcaggaatattggctttgtcaagccgggaaataatcatcacattgctttctacatcgatgaatccggaaaggttgtagagcatagttgtactttttggcatgccgtggaaaggaaaaagtatgggattccggtaattataaaagaacccgggaagatatgggacaaattattaaacggcaactatccggaggaattcctgaataaactaccgaaggatcaatggatctaccaggaaagcctccaacaaaacgagatgttcattcttggattcggtactgaaacattagaacagcaaataaacaatactaataaaatcactttaagtcaaaacctatatagagttcaaaagatgtccattaaagggaatggccaactcgacattacttttagacatcatcttgagacacaactcaatgactcatcgactgccaaagaatcaaaaaggttttacaatatccagagcataggcgcttttgaaaagctgaatcctcaaaaaatacggattacaggtctgggtgatatccagctataaaaaccaaacgattttgccaagcattttatcataacgcaaaaatgatccgtgatcaaacgaacattatattttggtaacccggcctacctcaaaacacaaaatgaacaattggtatacgaggctgtcgacagcggtgaaataaaacagataccggttgaagatataggcatcttgattcttgataatcaacagattaccattacccaggcattgctggcgaaattgataggaaataatgttgcggtaatctcctgcgactttgcgcaccatcccgcggggctgttcctgaatctggacggccatagcctgcaaagtcaaaaattccaggctcagatagaggcgtcccaacctcttaaaaagcagctttggcagcagacgattgccagcaagatcaccaatcaggcagctctattggaatcccatcggctacctgcgacctcgcttaggaactgggcattgaaagtaaaaagcggtgatccgacgaatcttgaagcaactgcagcagtttattactggaaatacctgttcacgcatactgcggttggtccggatttccgacgagagcgtgaaggagcgccacctaatcacttattaaattatggatacgcagttttaagagcagttgttgcacgaaacctggtggcaagcggactgctgccaactttaggaattttccaccgaaaccagtataacgcctactgtcttgctgacgatatcatggagccatatcgtccatttgtagacaaaatggtctgtgatattgtacgaggcaacgggctttttctggatataggcccagccatcaagaaagcattgctgactataccatcgatggatgtcagaattaaaggtgaaaaaagtccgctgatggttgcggttcagaaaaccaccgcaagtctggccaaatgttttgagggaaaagctaggaaaatagactatccggagttcgccggttttgcatgagccggcattacaatacccgattaaacgcttatcgcattatgtgggtactggttttatttgatctcccgaccgacactaaaaaggacagaaaagcctatacaattttccgaaaaaaattgatgacagacggcttccagatgttccaattcagtatttatatgcgtcactgccccagcagggaaaatgcggacgtgcatataaaaagagtgaaaagcttccttccgtctaaggggcatgtgggtatttttcagtttactgacaaacaatttgctatggtggagctatttatcggaaaagagccccggcaaacccataatcccgttcaacaactggaaatgttctagaaatcgggacaaaataacaataggatgaaaaaaaagcagccggaaccgcattttttcatcctattttttagctcaaatacagcgccagcaaggctttcagctgaatcagttgtataagagctaagttacatgacaatttgaaagcaaatcacaactaaagaagcggccaccgctttattaaagggttgtataagagctaagttacatgacaatttgaaagcaaatcacaacgaatactgctatctaagacagtatcgagtagttgtataagagctaagttacatgacaatttgaaagcaaatcacaacaattgccctctgtaaaattgaaatggcggtgttgtataagagctaagttacatgacaatttgaaagcaaatcacaacagcgccggcagaatgaagaacggatcgcgagttgtataagagctaagttacatgacaatttgaaagcaaatcacaacaccgcgatacccggctcgttcgctgacctgttgtataagagctaagttacatgacaatttgaaagcaaatcacaacccgaactgccttaaagcttcataaggattgttgtataagagctaagttacatgacaatttgaaagcaaatcacaaccctttgaagactttcatgtaggtaaacaggttgtataagagctaagttacatgacaatttgaaagcaaatcacaacctgtacaacgagaatcaggatgcctacggtgttgtataagagctaagttacatgacaatttgaaagcaaatcacaactgcaaatgttggcgcagttaggtcacgatggttgtataagagctaagttacatgacaatttgaaagcaaatcacaacgttcgattcttcgggccgctacccattttggttgtataagagctaagttacatgacaatttgaaagcaaatcacaacggaattccttcaacatagatcagtgttcccgttgtataagagctaagttacatgacaatttgaaagcaaatcacaacggccacgccgtattgcctcgttaactgcgtgttgtataagagctaagttacatgacaatttgaaagcaaatcacaacaaaagcgactgcattgtatcgcgctgattgttgtataagagctaagttacatgacaatttgaaagcaaatcacaacttaggaggcacgactgtcggacaaaactttgttgtataagagctaagttacatgacaatttgaaagcaaatcacaaccccgcgctgttggtcgaatatcaaggaatggttgtataagagctaagttacatgacaatttgaaagcaaatcacaacacgaatccatccgcaatcaccttcccgcgtgttgtataagagctaagttacatgacaatttgaaagcaaatcacaactgaagaaggttaacgaactggaagacgcgcgttgtataagagctaagttacatgacaatttgaaagcaaatcacaacataactggcgcccgtgtattcgcgtggaaggttgtataagagctaagttacatgacaatttgaaagcaaatcacaacggcaacaggcgaacgcctttgacgccgaaggttgtataagagctaagttacatgacaatttgaaagcaaatcacaacgtcagttcgtgggtcgtggtcagaagggtggttgtataagagctaagttacatgacaatttgaaagcaaatcacaactgtgatgaggctgataaatgtttgcgttatgttgtataagagctaagttacatgacaatttgaaagcaaatcacaacacaaaaacacagatgctttccgtattactggttgtataagagctaagttacatgacaatttgaaagcaaatcacaacggaggagagcttctcaagatcctcgatactgttgtataagagctaagttacatgacaatttgaaagcaaatcacagcgcatcctcataaaaacgaaagtattggcccccaaaataaaaaccgcagtcgaatcccccacttaaggttataggcaaggtcaaagaccaccttttgacgggacagactgcggtgtacctgcataagcggtacattccaaaattacaaaaaacaacaatgatcgggctgtcggtatcagggaatacctttctatcaggttttcaagggaactgcaagcctacgcgctcaccggcagagcaccactcagatcgatccgccttctatcagcttcgattccacaaacacttcttccacctggtcgttgccctgcagacaggaatgcatttgggcaaaggcaagtttgcccagtttgtagccgttggtttctatatgcgtgatcttgggatcgtacagcgtaggcagcaaaccgttgctgatgctcacgatcgcgatatcctcgggtacgcgtaaccggcgttcgtgaatggcatacatcacaccgatcagtatcatatcgcccatgcagaagatcacatctggacggtcggcgccgtcaagcgcggcaagcgtatccagtcttgactgtgcagattgctcgggaaaagaataggcaacctgcgtatccggcgacaggcgcgccacggtttccctgaaagaagccagtctttttttggtgatgttcaggtggggatgaccgaacagcgcgagcaccttttttttctttttggcaatgatggtctcagctgcaagccgggctgcatccgcatctgccaggcataccttgttgcaggcatccgtatcgggcaccctgtcgaaaaagatcaccggcgtcttcagctcattcagtttcaggaacggtgcgggatcatctgtttctatcgaaatggaaacgaataggcctgccaccatattcttacggaacagattgagactgctgttctctatctgcagcttatccatcgactgcatgatgagcaccgaatagccatgcagcctggcttcatcttccaccgcggaaataaaggaatcgtaaaagaaattattgatcgtaggcagtaaaatacccagtacattgttattttttgtgcgaagctgcaccgcatagctgttgggctcgtactccatggcctgcgccagctcttttaccttgatctttgtcttctccgaaatatccgggtggtctttcaaagcgcgcgaaacagtggaaatactgagccccaggacctcggataattgtttcagcgtgctctgttgtatcatataacagtcgataggataccgtaagatacaataatataccagtgaaaaatcaggcatcgttcggcaataacaagcctcccccgtacccggaggaggctttcccgtaaactgccatttacgaaaccatcaatcaaaaaaaatctgcagaccagcccgtcgaaaacggtctgccatctcgtctataacttgagcgtgatgccgatattcaccgcgtaatctgcgaaggcggcatcgccctgtgtgtattttcctgtcagatccgtggtgatcttgtcggccatgctttgtgtacggttgcgctctatggccacgggcacataagcgtacagactgaatgtatgaaatgaatacgttatcccgggttccaccgataccacataacccggtctgcggtaaccgatgcttccgccgatcagatcgtgtacaggcacgcattccttgcgtacaccggctgaaaaaagaaatctgttcaggctgtagtttacacccgcgcgaagcatgtactggtcgggaacggccatcacatcgcttccattggcaacagcggttgcagagggtgtgccaccgcgtgcagaagaagtgccattgacctcctgcggattaatgaggtaatagaagttgccgtatacacccagccggcgcgcaatattgtaatacgcattgatttcggttgttacgccggtgccgccgtcgccaagctgtatcgactggtcaacaggccctgttaccgttgtgccggtggcggtataaaaacggccggtataccggtagttaccggtggcaagtttcaatcccagtcccagttgaatatttgccttgcggtgtttggcggggtccagcagccagtaattggcccacacacggatatcgccgatgccgaaggaagaagtggtatgtctttcctttccgccgtgttcatacaaagaggaacgggtattggaaataatcggcaggtctgcgcttacagaccagcgggggctgagcagcctggttacagcaagatcaagtgtataggaatggttgatcacctgcgtaccggcttccacgcggtgtttctgctcttcggttccgacaaaatgtttgtaggaattgaaataacggctgttggcgttgaacagccatttggatgccgtgcccgagcccgattcactggccatctcggcatgatccatcacgcacataccccccgtgctcctgatggctacacaaccctgggcatttgcctgagccatgccaccgaagatacatgcggtaaaaaaaagtattgatttcatggtataagcagttagtgtaattaggaatagtgattgattttatttctttttcataacgagtttgctgaccacctgttcaccaacctgtctgcccatttccgtgctcacgatacaggagttgtgaaaatggataccgccatagaaccgcgcccagttgttttccagcgctgccgccctgaacgaggtgaatgaacggctggggatcccgaattctgtttccgtggtatcggtataggcgaaattgtctccgaaaacactggtaagcgcttcggctgccgccgaagaaatggtggaatgcccgcaggtatattcaggaaaagcaggcgtttgcaggtaaggcatccagttgggatcgatgtatttgttgatcaccgtttcgggcctcaccgtgttatacgtatactttgcctggaaggtgtgaataaatccgtcgaacaaagcgatcgatgtttttgcataagcatataccgtttccgcaaaatccagcttcgctttcctggcggcgatacccaccacgctcatccagtgacccggcggcgagaatttcttactgccaaacatcatatgacctgtcacattcatcttaaagggattatcgtcccagaacatggctatgtgtttttgttcgtccgtaagactgtcaccggcgtttttgatggccatgacctctttgtaatagacgctgttcttatccgtgatattgaaatcaggcggtgccggcggcgtaaacatctgggcgctgtcgagcaccatcggccgtatctccttccagtgcggctctgcagccgatgcatacatcggcggtgtgggaacccagcgtcccggaatatctttcaccgtatatttttcggcaccgcgtgtctgcaggtaatgatcgtccttgctccagcgtatgatggaagccgcaacactgtctgccagcagccgcgaagctttctccacggttgcgctcaggcctttgtttctggcaatcaccagtatgctgtcctggtaagcctgcatacttccttcgggaaaagtaactgcctctcccaccttggtatacgcaaacaaagccgcgagttcgatatcggcattcggatctgttaccggtttgcttacggaagccagtccttttaactgtcccgacagcgactggtaccgttccggataccctgcaacgatcacttcgtaggcggcaatggccgcataactgtagttacgtgaggctaccatgggcgaaaaattatttcccatgacaacggtgttcaattcatgtacggtataactgaataattccgggttgtgcaggtaggctttgtagtccgtgctgtttttgcacgacgcgatacatgccaccacacaaagccctgtaaggagctttttcatctggtttcaaaaaatttaggaaagaaaatagaatgactgataacccgatcaggcctgaggcggtctgtcgggtctttgcagcagaaccgatttcagtccggcaaaaacctgtctgccaaaatccacagaagattcttcggttttaaactgccataaaaaaccgtgatcatccgtaaaatcctggatcgagaattttgcagtaaaggaaggatgtcctgctttaccggaggcggtattgttaccggccaggtcgttgaccatacggccgtagttttcttttgctttcttcaggccggttttctccatattgggaatacacaataattcaagcgaatcattgtacacgcggcgttttacgtaggtataggtggttcccttgatattgatctcaccctctaccctttcgtattctgcggagttatggtaatagggaaggctggtagccactttgatgctgataagatccgattcgctgtactggttgcggtcaatactggcgctgagccgcgcgtctgccctgttctccaggaagccggtgaacaggcggtaacctccccaactgaacaggagcatacccagcagcagtatggcagcaatacgtttcaagttcatgtgaaaataacacattatcgctttaccgaaaacattttcttttcaggcccgatgcccgtgatcgtaaggcttttccagtgcccgggcagcacggattttacctgcgaaatgcctgcgggtgtgatctccagtccgccaaaacccatcagcacactctgcaatattccgcctgctcccgtggcgaaatatgggttggtgccgcccttggtttcggcgattacacggaacggcggattgaggttgggtttgtaggcatcttcaaaaaaacggtaggctttgtctgcatcgcccaggcgtgcgtggagtaaggtaaaaatggcctgtgtcatagcgggcgttccttcattgggtacccttgtctcgtaatattcgaggtcttttcttacctgggcggggtctgtaatttctttcagcgggtaagcgagcaggtttacatctgcctgcttgatgccctctcctttataggcggcatgttcgcctgttactccgttctccattttcaggatgggaatattctgtgccacctgcagccagtcggcgtcgggcgttatgttcagcagttttgccgcctctgttgcgtattgcagtacggctttggcggaggcatttgtccaggcattgttgtctacattctctgcccactcgtctgccgccaccacattttttatctcgtatttaccggggccgttacgctcaaccctgctggcccagaaatcggcggtctctttcagcacaggccagcctttttcgcgcagccaggctttgtcctgtgttacgcagtaataattccatgcggcaatacccacgcaggcggtgatatggtgttcgaaaggcccgctcagcgcccataccggtgtttcttccacaccgctggcggcactttcccagggaaacatagcgcctttgtagccatggttgaaggcattttttctggcagcgggtaatcgctggtaacggtattccaccaggcttctggccatttccggatgcagtaccagaatggccgggtacatccacagttcggtatcccagaacacatgcccgttgtaccccaggccgctcagccccatcggcgaaggactcatatccgttccttcgcgtacaaacgaatacaggtggtacatcatgctgtgtatatcctgctgtgcctgtgcatcgccctcgatcctgatatcgctttcccagagtgcatcccaggctttgttgtgaaagccaatgagtcggtcgcgcccctcgagtttggcaaaaatggtcatacgctcggcctcgttcagcgggtcgtcgtgatgcgccgaggtaatggatgtgcctgcgatggagaaccggtaggtttcgcccgccctgagtttgcggctgaatttcatcaggtgcatattgttgtcccacatctcgtgtatcaccctgggttcctgtccgtgcggttcgctgaagagaaaagtgttggatgcgcacataagcaatttgcctgtagggctttttgccgaagaagtaagcaggctgattaccacatgcggtctgtcgatctcgttgtaataattctgcacatccttcagcgcatcgggcgcctccattacgctggcgccgccgagtacgatgtctttttttgccgtgatgctgacatccatcaatacggtaaaaggcagctgccgcagggagtagtaggtgtaactgaccgtggctttgtctgtataatcgaaagaaacggtaaaactggcatgccgcatatccagttgctggcgcatatttttcgcatcatttgccgaaacccttcttccgtctatatccatctgcatattgagcagattgaagctgcggagaaaattactgacacgcccgcggccgtacaggtcgtacgcaccggctagcaccacatcttttaccttgaatggttcgggcgaagaaacaatgccgatcatgccgtttgccaccgttgcaccataataggcagacgggttgatcttatcggctgtgatcttccaggggtcgggagtttgcgcggcaagggctataccggtcagggaaaaaaggataccggacagtaattttttcatacaggcaatttatcagggaatgtaccggctaatttactgtttattccgaatgaagggagcagttaaatttcggcggggattgccacagatttcacagatgaacgcagatcagtgctgctatgccagccatgatcttatcaatcattcttcttattttgcgttatcagtctgctctctatgaaaaaaatactggttatctgcctcgccgtgttactggttgctgctgcc

SEQ ID NO: 1730 - DNA, 23738 bp, synthetic construct
  source 1..23738: mol_type = other DNA
  misc_feature 1..23738: note = Synthetic
gcttcggttcctagcacaaggtacaggttaggtatctcattctttagctggaacgataggtccttaagtgcatcagcatttccaatgctaaccttttcgcaaattatgttgacgccatttttctcaactactttagccttaagcgcagcttttaccgattttagcttttctgcctcaaggctttcgagtgtttcctttagctttttattatcatctacaagttttgaggcagctttcacaacattcgaaggattgcctagtatcgatttaatttcattaattgtatcgatttgagtgtaaacatagtcttcggctttttcaccagtaatggcctcaattcgacgtacactagcggcaattgcaccttcagaaattatcttaaagtaaccaatgttgccagtagcttttgtgtgagttcctccacaaagctcaaccgattcaccaaattttattactcttaccttttcgccatatttctcgccaaaaagagccatggcccccatttgttgggcattttcaattggcacttcacgatgttcctcaagctgtatgttctgtcttattatcttatttacccttttttctacctgtcgaatttcctcatcagtcattttttggaaatgcgaaaagtcgaatcggaggtaatcgggatgtaccaatgagcctttttgctctacatgggttccaagtactgctcgtaaggcattatgaagtaggtgtgttgcagagtggttgttcgcagtacgaatccttttttcatagtttacagtagcaaagaacggtacgttgggggtttgtggcagcttgtcaactagatgtataataaggttgttttctttaaaagtattaagcacctttagggtttctgaatcgctttcaagggtacccgaatcgccaacctggcctcccgattcagcataaaatggtgttttttcaagtactacatggtactgctccttgcctttagcttttacagtacgcatacgtaaaatgcgcgtatcagtttttaatgtatcatagccaacaaactcaactttatcggattcgtttactgtaatccaatcatcggcttcaacggcagcatcagcccttgagcgctctttctggttagccatttcggcatcaaattcctcgcggttaacgcttaggttattttcgcgtaatattagttctgtgaggtcgaggggaaatccataggtgtcgtaaagtataaatgcatctttccccgaaatttctttcttgttttccttctttgccttttcaatgtgctgctcaagaagtttaattccagtttctaaggtgcgtaaaaatgtggtttcctccttattgattacattgattataagatcctgttgagccttaagctctggaaaatgctcgcccatttgttcaactagtacgggaactaaactatcgataaagggttcgcggaagttaaggaaggtataaccatagcgaacggccctacgaagaatacgacgaattacataaccagccttaacgtttgaggggagttgtccgtcggctatggagaagctaatggcacgaagatggtcagcaattactctcatggccacatcggttttaggatttgagccgtaagggattccgctcatttgcgaaatgcggtcaattattggggtaaacacatcagtgtcgtagttgctctttttcccctgaacaaccatagctaagcgctcaaaacccattcccgtgtcaacatgacgtgagggtagtggttcaagagtcccattagccttgcgattgaattgaatgaacacaaggttccaaatttcaataaccagtggatgccccttgtttaccatttgctcaccaggaattgccttacgctcagcctcgtcgcgtaggtcgatatgaacctcggtacaaggaccgcatggtccggtatcgcccatttcccaaaagttatcctttttgcttcccagcaagattctttctgcaggtaaatgctttttccagcattctaacgcttcagtatctctttcaattccctcgctagggctgccctcaaaaatagttgcatataacctattcttgtcaatttttagaacatcaacaaggaattcccatgcccaatcaatggcttcgcgcttaaagtagtcaccaaacgaccagttcccaagcatttcgaacatggtgtggtggtaagtatcgtgcccaacctcttctaaatcgttatgcttgcccgacactcgcaaacacttttgagaatttgcaacgcgaggatattttgcaggtgcattaccaaggaaaatatccttaaactgattcatcccagcattagtaaacataagggttgggtcgtccttaacaaccatgggtgccgatggtacaatttggtgcgatttctcggcaaaaaagtccaaaaatctttggcgaatttcttttgaagtcataaaattctattattgaaatatttaaaactaactatttaaccatttaaaataaaaaaaatgctctttttgtttgttgaaaaaatatttttaccatagttttgttgcagtttgtcaaaagtgtattactttgcagcaatttagcgttaaaactatggcaaaaataaaatatcaatttaaccctcataccctaacattcgatgttgttcgaataccattctacaaacgatttgcaaagatactaattcatttggtattttatacaggcatttttcttggtttagggtattcattttctataatttacgatactccagtagagcgcgccttaaaacgctctaacgcggagtataacctaaagtatgaacttgctcaaaaacgtatctcgcagctaaatcaatctttagcagccatagaggaaaaggataacaatatttaccgagcaatttttgaagccgataccattcctttttctattagaatgggtggttatggtggccatcaaaagtattccaagttgtcaaattcatctaactctgcgatattactaaaaactttacgttcattagacgagcttacctggcgtgcttacattcaatcaaaatcgtttgacgaggtaatcgatttagcaaagaataaggaaaaaatgattctatgtatacctgctatacagcctattaatgtaaaagatttaggtagaatatccgatttttatggaatgcgtttacatcctttgacacgaagatggacaaaacataatggaatagattttgctggccctataggtaccccaatatatgccactggcgatggtgttgttgttgaagcgggatattctttccatggttatgggaatcaggtaattgtcgatcatggctttggttataaaacccgatatgcccacttacatgatattaatgttaaggtaggccaaaaggttaagcgtgccgaaatgattggtactctcggaaatactggtcgtagtactggccctcatctccattacgaggtaattgtaagaggacggcctgttaaccctattaactattttaatgacatgaccgaagaggactatcaaaaaatgcttgagggatattcaagccaattcctagattagtaagttatgccaaggacaaagtataaatttcatccagaacagcttgtctttgttaaagagagaagaaccttacgcgaaaaagtttggcttgtagccaaatacattattgccatttttgttattgggtttatatcttatatggttttcccaatttttatcgatacccctgaggttagaaagttgaagcgcgaaaatcaggaacttcttgttaactacgagataattagtaagcgtattgagcatcttagctctgtgattgccgatttggaaaagcgcgacgagggtatttatcggattatttttgaggctaaacctattcctagttctgtgcgtaatgctggcattggcggggctaatcgctactccgaacttgaaaagctatcaaatagtaagcttatcgttgaaactaccaaaaagctcgatgaactttccaaaaaggcttacattcagagccgttcctttgatgagatctcagagcttgctaaaaacaaggaaaagctactaaaatctatacccgcaataatgcctattcgcgataaagaccttacgagggtggcctcgtcctttggcatgcggattcatccgttttataaagtgcttaaaatgcatacagggatggattttactgctcctactggtactaaaatatttgccacgggcgatggggttgttgttaaaactcgatatgctcaaagaggttatggtaaccatattgtaatagaccatggctttggatactcaaccctttatgcgcatatgagtaagtttgcagtgagagtgggacaacgggttaaacgaggaacagttattggttatgttggaaacacaggtacatctgttgctccacacttacactacgaagtccgaaaagatgacaagccggttaaccctattcattactactttaacgatttaacccctgaacagtacgaaaaaatggttgaaattgcttcgcaacctacccagagcttcgactagtaaattcttgaaaaatgccatataaagaaaaaaaaatagaaaagtactactactccattggcgaagtagccgatatgcttggggttaacacatcgttgattcgtttttgggagaaaaacttcgatataattaaaccgcataaaaataaaaagggtaaccgctattttactaaaaaggatattgaaaaccttaagctgatttatcatcttgttaaagaacagggcatgactcttgatggggccagaaaaaagattgcggctcaaaaagaggaccttgccgaaaactttaagcttgttgaaagtttaactaagattcgggagatgctggttgaaatcagagatatgctcgactagtaccatatgaatgcccatgttaggtaaaaatcaacctaatggccttttaaactaacttgtagcacatgaaaataggtgacattgtttctattctggagggttttgcaccacttgcccttcaagaagattatgataattcaggactaattgttgggagtaaggattccgaagtagataaaattcttctttccattgatgtaacccccgaagtggttagggaggctataagcaagggggctaatctaattattgcacatcacccaatcgttttcaggggccttaaacgtttcaatggttctaactatgtggaacgggtagtacttgacgctataaaaaacgatattgctatttatgcctctcacactaatatcgatagcgtagagggaggtgtaagttataggattgcgcaacgccttggacttgaagatgttaaaatcctgagaccaataaatggtaacctggtaaaacttgtcacctttgtcccaaacgacttcgcacaaaaggttagggatgccattttctccgctggcgctggtgtaattggtaattacgactcttgctcatacaatgttaatggatttggttcgtttcgtgctaacgaaaccgcaaatccatttgtagggcaaaaaggcgaaatccactttgaacccgaagtaagagtagaaaccattgtccctcgtcatttacttaaaaactgcatttcagcaatgctcaacgctcatccctacgaagaggttgcttatgatgtttatcctattgaattaccttatcctaaagccggattaggtgctgtaggcgtacttcctaaacccgttgagtttgacaaatttctattgcaggtcaagcaaaagtttaacgcaaagtgtgtgaggttcacaaatccagtttctgattcagtttcaaaagtggcaatttgtggggggagtggaatcgagctgctaagggatgctattgcttcaggtgcccaagtttttatcactgccgatgtaaaataccatcaatttttcgacgctgaaaatcgcatttccatagtagatattggacattttgaaagtgagcagtttacagttgatattttttatgacttacttacaaaaaaattatctaattttgcaatcttaaaatcggaagtgaatactaatcctattaactacatatagattatggctaaagagaaaatcaaccccgctgaaaaaaatgctgaactcaccattgaagagaagttaagatttttgtttaaacttcagcaggtagattccaaaattgataaaatcaaactgctacgaggcgaactacctcttgaggtggaagacttagaagacgagatagaaggattaacaactcgtgttgaaaatcttaagaatgatatcaaggagcttgagagtcaaatcaaccagaaaaaaatcgagattaaggatgctgaagccctaattaaaaagtacgaggaacagcaaaaaaatgttcgtaataatagggagtacgactctttgacaaaagagattgaatatcaaactcttgaaattgaactctgtaataagcgtattaaagaatacacacagcagataaaggaaaaaaacctgcttattgagcaaacagaaaagcagcttgaagaaaggagtaaagatttagagcagaaaaagcaggagctggagagcataaccagcgaaactcaaaaagaggaaaatgagctcattcagctaagcgaagagtactccatgaacattgaaccacgtcttcttactgcttacaaacgtattagagcaaatgcaagaaatgggttagctgtggttactgttcagcgcgatgcttgtggcggttgttttaataagatccccccccaacgtcagctcgatattaaaatgcataaaaaggtaattgtttgtgagtattgcggtagaattctggttgacgactcactgcaagatgaagaatagtgttggttattaacaatattcaacgtcctcttttggggacgttttttttaattatcatttaaacatcccttgcttctccaatcaaatttccaatagtttatcatttccctatcatgattttgagaaacatatgaagcacaagatgcgtatgtatttgtgttccatttaaatattcatcaaactaaaagtagctaacctaacatttttgcgatgaaaaacttaaaggtacttgtaatagttggatttcttcttccactcttttcatcatgcgatagcttagtaaatgacgagacaacaaatgattcgctttacgtcaagtttattaacgattctgcttcgctatatacgataaccactatagaaatccgaaataggggagcagttgacgggagccaagaacccataggcacttggagcagtaatgtgctgcaagctgggcaaaaacttgttccgggtgaaagtacttactttactttaaaattacctaatggagaatgggctgaatatcgattaggtgttgatggtggcacaggcaatgaggtgatgctgtacgatcaacctaattataacggatttagagatttacctataacacattggggtagcgatgaacgaacggtatccgttgccattacctacgacgaaacaacaaacacaatttctgttactggttggagcgattggtcgggaattgaagactagctaaaaatagtttaaaatgataaaaccaatgggaaaccattggttttatctgctactagattatgaaaattgctatacttatagagcagttgtgcgttgtgcttactagtagcgaaaattaatattaccagctaccaccagcaccgcctccgccaaagctaccgcctccaccaccggagaagccgccaaaactacccgaacccgaggagaaatcgctaaaactgcttccgcgtccgccacccatagaacctagtaataaccaaaatggcagatttgatgcaaatgttccaccacggactcttgcacccctgcgaccagatagaaatataaacccgaaaaagagtattaagaaaatgatgccaggaattggcgaatcgcccttgtagtattcatcggcactatagagcccagaggcgaggtctattattacatctactgcagcatttattcctttgtaatacctattctgtttgaaatagggaatcatttcattgtcaacaatcctgcgtgccacggcatcgggaataacctcttccatgccatatcctgtggcaacaaaagcttgccccctttcattccctattttcggtttaataagtattacaataccattatttttgcctttttgtccaactccccatttttcaccaagttgaaatgcgtagtcggcaggatcgtacccgttaagtgtaggaacggttaccacataaatttgagtagatgtgctatcgtggtaggcccttagcttttgctctagcactagcgtctcttcacggttaagaacccctgcaaaatcatttactagccgagggggcgacattggatcgggtatatcttgtgccttcagaggccccagaattgttagtattgaaaggatggtatagaaaaatcgtttcatttgttattaaatttagagtttgttattatgttgccatatcgcttaagttaaccttgtatttggtttgctgcctagttaaaggctatccaaacgatatgtcatcgcttagctcgttaatgtcggttttggcattgtaagggaaatgcgtagaaagctgttcgccagccatcttaatgccctttactaagccttcggccaacctatcttccttaaactctgctagcattgcttcttttatgttatcccaaaaattttcgggcaccttactatttatacccgcgtcaccaagaatggcaaacttatgatcgtttagcgataggtaaaaaagcacaccatttctaagcttggttttatgcatttttagcatggcaaaaacttgagcagccctatcaagcgggttgtcaagcttgcactcccattctacgtgtaccctaatctcgcccgaagtgtttttctcagcctcttcaatagccgatactatcagttttttctgattttcagagaagaaatcttttggtttcattgcttttttgtttgatggcaagtatctagcgcattaatctagatatagaaaaaaatgatgatacccccatgtaactcctacttgtgttaaacttaaagaattacatggggtgcaaaaaatggagttagtttgtaccaaagtcaacctttggtgctttctcggcacctgcttcggcctcaaagtaagctttcttttcaaaaccaaacaggcttgcccagatatttttaggaaacttcctgatataggcgttataatccttaaccatttcgttaaacttgcggcgttcaactgcaatccgattttctgttccttcgagctgggcttgtaggtctaaaaagttttggtttgcctttagatcgggatagcgctcaacaactaccattaatcgcgataacgcgctactaagctctccctgtgccgattgaaactgtttcaggctttgtgcatcgagcttgtcgggattgatgtttacgctggttgcctttgcccttgcctcaatcacctgggttagggtttgctgctcaaagttggcatatccctttaccgtattaaccaggttgggaataagatcgagcctgcgctggtatacgttctccacattaccccactgggctttcacattctcatccttggttaccatgttgttataggtaccctttattgagctgtaaaggagtagcactactgccgctactatggctattactatccatttcttgctgatgttcatggctgtatgtttttaaggttaatagtttcaactctttcgcttcaaattccatgcacaagatagggtaaagtttgaaaataggcccatcgggcatacatttttaacacactttgggcgtaatcggacaggtttgaagctttggctgacaggttggcaggattttgataataatggataatatgacttttaatcctttttgattaattgaaaaaaaatcaattaattttaatattaaaataaggaaggcgagtttccccgccttaaatgttttcacaacggaataatccttattgtgaattgcttcagattgttatacaaatataatttgataatgataaaaatacaaatgttatgaaaagaattttaggacttgatttaggttctgcatcaattggctgggcgttgattagagaaaatgagattaatggtaatgttaaccgcgaaatactgggtttaggttgccgaattattccttacgaaggaaccgaaggaaaagactttgaaaaaggatcgggtgaaagtagaaacgctatccgaacacaaatgcgaacgatgcgaaagggttatgaccgctatcagctgcgaagaaaatatttagtgcaagagctgattaagcataatatgtacccatccgatgaactaaaaggacttccaaagatacagctatgggaacttagaaatagagcggcaaccgaaagagtatcacttacagagttaggaagaattttattgtggttgaatcaaaagcgagggtataagagcagtagaagcgactcaaatttggataaaaaggatactgagtatgtggcaacagtaaaaagtcgtcaccagttgattaaagagcaaaacctaaccattggacagtacttttacaaacaattacaaaacgaccagttttttagagttaaggagaaggttttcccacgagaagcatatatcgaggagtttgatactatttgcaatgagcaaaaaaaacactatcctaatattttaactcaagagttaatctcaaaaatacggaatgaaataatatattaccaaaggccattgaaatcccagaaaggtcttgtttcggtatgcgaatttgaaggattctggcgtaaaggacccgatggtaaagagtactttgttggcccaaaggtcgcccccagaagttcccctatttttcaatatgcaaagatatgggaaaacatcaataacattaaaattgaaaataaacagggcaataacatcgaaataacccttgagcagaaaagagcactttttgagcatctggataataacgaaaagttaaccaccaccgatattgttagaatactaggattaaagaaaaatgaatgttttttcaataagcaattggctaaaggaatagttggtaatgcaaccaagtgtgcaattttgaattgctttgatgaggctcacaaatacgctcatctagtaaagtttgaactcgatattattgaaacaagtaaaaaaacatacctatacgataacaccactggcgaagtaataaacgaaaaaacagtaaagtacattcatcctaaaattgaaaaggaaccattatttgtattgtggcataccatatactcaatctctgatcaggatgagtgcagcagagttttgcaggataaattcggaatagaaaaggagattgctgataagctggcaagtatcgattttacaaaacatggatttggcaataaatcgacaaaaactttaagaaaaatattgccatatttaatggagggcgataagtatagcgaggccatgtgctatgctggttataaccattcaaattcccttacaaaagatgaaaatctaaaaagagagttgcaggaaaaacttaagcctattccaaaaaactcgctcaggcaacccattgtggaaaaaatattaaaccaaatggtgaatgtggtcaatgctattattgataaatatgggaaacccgatgaaattaggattgagctagctagagagttaaagcaaagtaaagaggaacgaaatgaaacatatttgaatattacaaaaagagaaagagagaatgaacaaatcgctaaaaaactgcaagagtttggcctaagagcaacccgaaataatattcttaaatggcgactttatgaggaaatggacaatgaggataagaagttaaacgcaatctgtatatactgtggtcaaccaatttcgctggttgaagcaattaaaggcgctgatgttgatattgaacatataattccaaaatcgaaactatttgacgattcacaaagcaataaaacccttgcacatcgccattgtaacacagggaagggtgatttaaccgcttacgatttcatgaaatcaaaacccactgaactgtttaatgcctaccttgagagggtagcaaaactttatgccaataaagttataagtaaggcaaagcgtgacaaactacttatgaccgagagcaaaatccccaataactttattgaccgacagctaagggaaagtcagtatatcgcaaaaaaggcaagggaaatacttcaaacaatatcgcataacgtttggactacatcgggcagtgttaccgcagagctaaggaggctatggggctgggacgatgtgacgatgaatctacaattcaacaagtataaggagttagggttgacctcgtttgtggagtgggaaagcgagcatggcaagagtaagcatagtaaagaggttattacaggatggagtaaacgcgatgaccacaggcatcatgcagtagatgcacttgttattgcttgcactaaacagggttatattcagcgatttaacactcttaactcaagtagaaccaaacaagacctgatagccgatgttgagaaaaaatctttagaatttaaggaaaagctctcgctccttgaaaagtatatagtaagcgaacagccttttaccgttaaggaggttgaggaaaaggtcgcagaaattttggtgtcgtttaaagctggtaaaaaggttgccgtaactggaaaaaggaaagttggaaaaaagggtaataaaaaagtagtacaaacaggcattattataccaagaggagccttgcacgaagaaagtgtgtatgggaagattaagacagcagtacacaagccaataaaatatgcttttgaaaatccggacctaattgtgattccaaaaatcaaaaaactagttgaggaacgactttcaaaatatgaaaacgtcaaagatgccattgcgtcgctgaagaaagagcctttgtttattgataagaataaacaggttttacttaaatatgcttcatgttatagcagcgattatgtaataaaatatcctgtagatattaatttcaataaagttgataaggttgttgacgggcggattaaacaaatattgcaagcaagactcaataagtttaatggaaagcataaggaggcttttaaagacatgcagcgtggcgataaggtgattaaatggtatgaggatgaaggcctaccagtaccaatcaagacagttcgatgctatacgggtctctcggctgttgttcctgtaaaaaaggatgagaatggcaacaatattggtttcgtaaaaccaggaaacaatcatcacattgcaatatataccgattccgagggtaataagcatgaacatgtttgcacattctggcatgcggttgagcgaaaaaaatttggattgcctgtaataatcaaaaatacaaatgaagtttgggataaaattcaacaaaaacccctgggtacatacccagaggagttccttgagaaactccctttgcctaatctgactttggaggtaagcatgcagcagaatgagatgtttattctgggtatggcaccagaagaaatatctaattgtcttgataataaagactatagggcaataagtgaaaaattgtatagagtccagaaactttctatgaaaaattatgtttttaggcatcatgtagaaacacaacttatagacaatgaggcttctaagaaaagtaaacgatactatttaatacagagtttgggggctttatttaatttaaatccagtaaaagttaaaattgattgcattggcaatattatcgcttggaataacactgacggggtttaaaaccctgtcagtgttctggccaaaaaaaatttaatcgtcatgcctaattcccgggacataccattggagcacggctgttactaccacattttcaaccgtggcattaacggcacaccattgttttatgtacctgataactacttgcattttcttaggctatacgataaatatatctctccaatagcctatacctttgcctggtgcttgatggggaaccattttcatttgctggtacggataaaggaggagaacgaggtaattgttacgtcgctacccaacccagtcagggttttgaaccatgtttgggttagctccaataaaaccctcaaatcgcctcatctatacttttcgaatctttttaattcgtacgcacaagcaattaacaagcaacagcatagaacggggtcattgtttgaacgccctttccatcgtctaaaaatatcctcagaggaatacctacaaaaccttgtagtttatatacatcagaatcccactcatcatggctttaccaatgattttaggaattacccatggacatcgtatggtagtattatctccacaaaaccaacaaaggttgagagggaaaccgtgctggagtggtttaacggcaaggagaattttattgaagtacatcgtaaaatagttgaccttgatataattcatgaccactgacaaggttttaacccctgtcagtggcataatgatacagatatgataaaacgcaccctttatttcggaaaccctgcctacctaaaggctagggatgagcaaatggttattgaataccccggtggtgataccgaaagcaaatcaataccaatcgaagatattggagtagttattcttgattccccacaaattacaataacccacgtgttgctcaataaactactggaaaataatgctgcagttattaccactaatgaacggcatatgccatcgggtttgctgtatcctttggaatccaacacgcttcaaagcgaacgttttgccgttcagctcacggcaagcgttccgcttaaaaaacagttatggcagcaaaccgtacagactaaaattcagaatcaggcagcactccttaagtctgttggggttgatgttgagcctatgctttactgggcacgaagcgtaagaagtggtgaccccgataactacgagggccgtgctgctgcctattactggaaaaacctttacatgggttacatcaacgatattatttttacaaggggcagaaacgaggatgaacccaataatctgcttaactatggctatgccatacttcgtgcggtggtagcccgaagcctagtggctagcgggttgctccccacactcggaattcaccaccataaccgttacaatgcattttgccttgccgatgatatcatggaaccttacagaccctttgtggataaagttgttcttgagatagttaaagagggtcttgattatacacagctaactaaagaaataaaagcgaaactccttgttattccggctatggatgtgaagattgatgggaaaagtagcccattgatgattgctacacagcgaaccacagcatcgctttacaattgcttcaatggtgctagccgtaaaatgctatatccaacattttcgtaatttcaatacaaaccccgacagagttcagaaccctgtcggggttcaattccaaaacatctatgaccactcttaaccgcctaaaccaatatcgagttatgtgggtgttagtgttttttgatttgccaaccgaaaccaaaaaggagcgtaaacagtatgcgctgttccgcaagaatttacttaaagatggtttctcgatgttccagttttcaatatacactcggtgttgcccaagccgcgagaatgccgacgtgcatattaaacgcgtgaaaagttttcttccccccaatggctatgtgggaatattgtgtataacagacaagcagtttggttccatggaacttttcctttccaccaaacccattaaagcgagcacagaacctcagcagctggagctgttttaaaactgaagcatttaagtcagaaaagtcatatggcagaaataaaaaatccacagaaaaaggttcctgtggatattctattggtcacttttattattcgaaatactggtctaacaaacttaggtacagaaagatagatttacctatgctgtgaccaatatgtcaaagatacaatctgaaagcaattcacaacttattatactcaattatatatacttgtttagctgtgaccaatatgtcaaagatacaatctgaaagcaattcacaacttcacccatacatatttaaagaaaaccagagctgtgaccaatatgtcaaagatacaatctgaaagcaattcacaacatctctcctgtaatgatgatacgagacttagctgtgaccaatatgtcaaagatacaatctgaaagcaattcacaacgagagaagatgtaggtagcatcaacgattagctgtgaccaatatgtcaaagatacaatctgaaagcaattcacaacagactcattgcatcaatacgcgcctggtaggctgtgaccaatatgtcaaagatacaatctgaaagcaattcacaacttgcttgctatctcttctaatgtgttctcggctgtgaccaatatgtcaaagatacaatctgaaagcaattcacaacaggttaatcgcctaccagcagataacgctagctgtgaccaatatgtcaaagatacaatctgaaagcaattcacaacagagcagcatttagtgtctttatgggaaatgctgtgaccaatatgtcaaagatacaatctgaaagcaattcacaacatctcggctctgcgctatcggcaactattagctgtgaccaatatgtcaaagatacaatctgaaagcaattcacaacaaagatattcttacctgtttcctcagatacgctgtgaccaatatgtcaaagatacaatctgaaagcaattcacaacaattgctgtgaggtgcttcctatccgatgagctgtgaccaatatgtcaaagatacaatctgaaagcaattcacaactcagaggttggaactggaatactgaaagttgctgtgaccaatatgtcaaagatacaatctgaaagcaatttacaacaccaccaaaataaactaaatcaaaaataaagctgtaaattcaaagactaatttaaaaaaaaacgcaagcaattcacaacgctcttggatagcacataaccaggactcttgcgtcgcaccccccgcgggtgcgtggattgcaaggctttggttaatccgtataccttgagaaaattatttatttcacggaatgcgttacgcaaaatgcgatatgcatattgcgtaatgccttttttctgcttatattggcaaaaagtagtaaaatggctaaggtaaaggagataaacccctttttagtaaatagttatatctcaaaggagtacttttgcgatcggaataatgagctgaacattttgctcaggaatgtacagagcaacgtgaatacaaccttgatatcgccacgtaggttgggaaaaacggggttgatttttcgttttttcgaattgcttcgcgaagggagtgattacggaactgtttacgtggatatttattcctcacgtaacctcgctgattttattaagctgcttaccgctgcaattatcaataggttccctgagagaacccctgtggggaagcgtttcctaaaattgataaagggcttacgtcctacattctcgtttgatgccattaccggtacaccccaagtacagtttagctaccaatccgaaagcgataaggaatacacgctgctgcaattgcttacttttatcaatgaacaacctaagcctgttgtggtagcccttgatgagtttcagcaaattgctcattaccctgagaaaaacgttgaggctatactccgcacgtatactcagcaatttaacaatgtatgttttatttttagtggtagtcgaaggcatactctaatggatatttttgccaatgccaagagaccattttactccagtacccgtttcatgaaccttgaggctattgaaaggggtgcgtacagaaatttcattcgtgaaaaatttgaacaagggaaaaggactatagatgatgaaagcatcgattacgtgctggaatggacaaagggctatacattttacacgcagagtctttgcaataggctattttcttataggaaaattaacttggataccgtgaagaccgagtgtttagcgttgctaaaggagaatgagcccgtataccttcagtatagaaatttaatgaccagtaagcaatgggattttctacttgccttggcaaaggaggaatcggtattacaaatatatagtaaagagtttctgctgaaacatcaactggggactccgtcgtctatacgcaggttgctccattccttacttgagaaggaaatggtacttgaagctatcagctctaccggttcaaactatagcgtgtatgatgtatttttaatgcgctggatgcaaagaacgtattagcttgcctgcagctctttaagcggtgcaatagagtgtatggccaatatgaaaaagatacaatctgaaccgagcgttttttgcgtgttcgactaagccaaagcaattcacaacgcccttggatagcacataaccaggagccatgtgccgctccccgtgcgggtgagtgaaaactagggtgcgtctgaaaatctgagccctttccaccattgatatggcataaacgttgctatttccctccaactttttctagcttcttccgtatatttccgattcattcctctaacttcctttaacttcttctcattcttcaacaagagatgcttcggcaagcacagcatgacaaaggcatccgacacattccgattatttccaattcattccgactcttttctgcttcaaaacatctttggttaatgggtttaatttctaactttgtgctaaacattaaattgtataaaaaatgacactagaagagtttcgcaaggatattctgcagggcatacccgatgagcttcctgcaccaaaaccatgggatccttcggttaaccatgcgcctaaacgtaaaaagatacttacaaccgaggaaaagaagttggctgttaaaaatgctttaaggtattttcctccaaagcatcatgcagttttggccgaggagttttataaggagctggaggagtatggtaggatttacatgtatcgattccgtcccgattacaagatttatgcccgttcaatacacgatttcccgcataaatcggttcaggcagcctcaatcatgctaatgctcagcaataacctcgattatgctgttgcacagcatccccatgaactaatcacctatgggggtaacggtgcggtattccagaactgggcgcagtatcgcctaaccatgaagtatttggccgagatgaccgacgagcaaactcttgtgctctactctggccatcccatggggctattcccatcgcatcccgatgcaccacgcgttgtggtgacaaatggcatgatgattcccaactattcaagcaaggacgattgggagcgttacaacgctttgggtgtaacccagtacggacagatgacagccgggtcgtttatgtatattggtccgcaaggaattgtgcacggaaccactatcacagtaatgaatgccggacgtaagcagatgaaacctggcgaaaccgatttacgagggaagatcttcgtatcatctgggctaggggggatgtctggtgctcagcctaaagctgctgttgtggctggaatggtgggcgtaattgccgagattaaccctaaggctgttgaggtgcgccatggccaaaaatgggttgatgaggtttataccagcctcgatgagcttattccacgaattcgtcaggcttcggccagcaaggaggccgtttcattagcctatcaaggaaatatagtagatttatgggaacgcttagtcgaagaggatattcatgttgacctgggtagcgaccaaacatcgctacataatccttttgccggtggttactatcctgttgggcttagctttgaggagtcgaatcgtatgatggctgagcaacccgagctttttaaggaaaaggtttacgaaagcctacgtagacatgtcaaggcgattaatgcacttactgctaagggcatgtactttttcgactatggtaatgcattccttctggagagtagccgagctggtgctgatatccttaagcctaatggcgattttcgttacccatcgtatgttcaggatattatggggcccatgttctttgattatgggtttggaccatttcgctgggtttgtacctcatccgatcctaaggacctggaggttaccgattccattgcccttgaggtgctcgaggagattgctaaaacagctcctaccgaaattatggggcagttacaggataatattcattggattcgcgaggctggtagaaacaacctggtggttggttcacaggcccgtatcctttatgccgatgccgaagggcgcataaagattgctgctgcattcaacaaggctatacgcgaaggtcgcatttctgcaccggttgtgctgggacgtgaccaccatgacgtttctggaactgattcaccttaccgcgaaacatctaacatctacgatggttcgcgatttactgctgacatggcaatccaaaatgttattggcgatgccttccgcggtgcaacatgggtatctatccataatggtggtggtgtaggctggggtgaggtaattaatggtggttttggtatgacactcgatggctccgatgcggccgaccgtaggttacacatgatgctgcactgggatgtgaacaatggaattgcacgtcgcagctgggctcgtaacagtggcgccatgtttgccattaaacgcgaaatggagcgcactcctttactaaaggttacgctgcccaatattgctgatgatagcttgatagaccaagtggtgaagggttaattcccttcatcactctaaatatctgcaaatgaaaaaactggttaaaactattgcctttgcacttttgggcattacccttttgggctcgtcgtgcgataagtatgagcagggtgagggagttactggtgtatggttgtgcagggaatactatagtgggagtaaatacagaacctacaatgttagcatcgataggtatactcaactcgattcaaacacctatgttgtatacaacatgtataatctcgggttaaatgttgaaacgtatattcatctctccgatactgttttctcaattatagggactaatagcgacatgtattactttacgggcaaagggacatggcacaaggctgcacaggtcattgaatgggagtacagcgtttcgggacaggttagtgacccctatgttaatgctgtatttgaacgtccttagtcgaaaaggatggagtaggggcgagccactgcctgtttaaatgtagcaagattgatgttccgtgccatccttagcgattccttcccttcaaagaatattagaaccgttggaaaggtgaatactgaaaatttcccgcaaatttctggtgtttcatttgcgttaacaacgtaaatattcattttgggaaactcagttccaacaatctgctcaagttgaggcagcataacgtgacaaactccacatgcatcggagttaaaatagattgcagtagcaggttctgaaagggcactgcttaagtctgtttcggtttgaattacttttaccattcgtagtatattccgttacttaacattacaagtgtgcatccttcaacagtattaatgccattttggcgagcaagtttcactagttctggattttctgttccaggattgaaaataatacgtttaggccttaagcctaaaatataatcgtagtaagggggttggttttgaggaccaagatataaggttatggtgtgtatatcgtcaacccttattggctcagtctgaattttaacatcttcaaccattccactacgtgtaccaattgcgattacttcaataccatgctttctcaaccttcgaatggctaggtttgagtagcgttctggtttaaggcttgcaccaagcacaagcgttttaggaagaaactcgttacttgtcatcaacctaaatctttttgattaaaaccacagcatacgctgccaaacccttctctttcccaacaaatcccaatttttctgttgtagtcgctttaattgatacctgactctggtctatacccattacttctgctaatgattctctcattttagggattaattccttaaccttaggtttttgcaggcaaatggtagtgtcgatattgccaatcccataaccctcttttttgattaattcgacacactttttaagcagaagtttgctatcaatccctttaagtgttgggtcggtatcgggaaaatgtaatccaatatcacctaagttggcagcaccaagcaaggcgtcgcaaatggcatgtattagcgcatcgccatcggaatgacccaaagaacccttagtgtgctctatttttattccacccagccaaaaggggatgccctcttttagctggtgaacatcgtagccaaagccaacgcggaattccatcaattagtttttgtttcttttgtttgacgaggaaaactcaacagctattgagaatcgtaaggtattagccattgggctgttaaatccacccgtagcgataaggtacgaaaagtcgatgttaaaaatattgtaacgtaagcctgctcctagcgtaatgtatttgcggtttcctttattttgactttcgtgaaagtatccagccctaattgcaaactgcttggcataccagtactcaataccagtagcaatataaatttcatctagttcttcgctaagccctcctggtgcatcatagaacgattgaatcatgccttgaactaccgatacgtttgggtccatacccttaacaatatcaccattggtattataaattggtggggttgggaccagtagcttatttaaatccagtaggaatgagaagctattatattgatcgatgtcgagagaaattctaccgccaactctcatattaatgggtataaattctttttgtggatcttcgttgtatgaaagttttgttccaatatttgagatgttagcccctaaagccatttggccattcttaccagaaagcgatatgggatgttgataatatacagcgagatcggctgcaaaggaagtccctggtttaccagctcccgttccagttgttgtaaagtttcctgttaaatcggagcgaatatatcggaataccatggcacccgagatgtaatcggagaattttcttgaatacccaaaatcgatagcaaactcattaggattaaaagcttgtatgtaagtattattattatctctaaaagtgatttctcccattgagaaatataaaagcgaaccgctaatggtttgtaacttgtcaatttggtaaaaaccagttaaatgagtaagattaatatcatttacaagattacgaagccaaggtgtgtatgagaaaccaacgccccactttttcccctccacaaaagggaacttagctggattccaatgctgagagttaacatcgggtattgaagcaactccggcatcgcccattgctgcactcctagagtcgggtgctatggttaagaaaggaacagcaattcgaagcgcattaagtcctcctgttagcgatagcgtgctatcgaattgtgccttgattataggttgaaagccaagtagaaacagcagtgaaattccaaaaatcttctttaacatcgttataaatttaaatgagattgcaaaattagtatttatatggtaatttttagtaacgttaattaaataggtttattgtttaatatcaaaaaaatcgaaacattttgtgtagatataaacaattaaaaatcagttgcatggaatagcatgcgaatgtgcattaaaaaactacaaattttgtaacagca

SEQ ID NO: 1731 - DNA, 23732 bp, synthetic construct
  source 1..23732: mol_type = other DNA
  misc_feature 1..23732: note = Synthetic
tctcgccagcgtttgtttaagtcggaacgaccggaagcggataagcttgtcctttattttactgcaccgaccgatacgcttcctcatttgaacccattaggattccggtggaaatcggctcctttgattcagaaaagtgtaactacagatacactgacatattggataacagatactttagcagcgaaagcggataccctgcattttgttttacattatgcaaaatcagattcaatcgggaaactggagcctgccacagatacattgcaactccattggcacggctttggactggagaaaaaacaaaaatcgaaaaaagaaaagaacaaagcaccggtaattaaaatcgcaaccttcgataccaatattactcaggtaatggatatggacgagcctatccgcattgatttccagattcctgtcatgactgtcgatacggggaagattcatttatatcaaaagattgattcattgtggaagcccgtacgattcgcgtttcataaggatgacgatgtgggaatgcatttcagtattacctatgattaccaacctgacgaatcctataaattattgattgattcggcagctttaagggacttccacgggttgtggacgaccaaatatatgaaagcatataaaataagggcgcttgaagaatattcctctttgattattcatttaacacatccgttgcagcatgttgtgtatgaattgttggatggtaatgataaagtgctgcgaacactcaaagcttcacctgacaataatacgacattcaaatacgtaatgccaggtacctattacttgcgaatgtttattgattccaatgataacgggaaatgggatacaggtgattttgcaaggaagatagaacctgaacgggtctattatttccctggaaagattgtacttcgtgtgaattgggatattgaacaggactgggatcccacggcgctacctctgaataaacagaaaccaaaagagctcattaaagaggataaatcttcgacttcacctcaaagtggtggcatgtaatgaaaaacataaaatggcatacgacctttttggttgtatgccattgttgtttgctgtaaaatcatttggtgtcaaaatcataagttttcccccatatattcattgttgcgtgtttgattgcggaaagtagggtaggcttgaaacccgatatccataaggcttacgtgataaatttgtatgttgtgatttgctttcaaaattgtatctttggcctgatggataaggatgaaatattaaaaaggaaagcactttatgatcctgagttatcctccttgtagcgtgttatatcatcaaaaacgacaaacgcagtatcctatcttgcttgtctttgaaaatctatgcaaaaatcaatttagttatgaatcaagattcaaatattaatcattaaacctatgaaaaagtattttctgtttatttttctggtgatgctctcattaggcatttttcttccggtaaatgccgaagagataaatcagcaaagcgttagttttactgtttcccaatggcttacagcaggtcctgtggtggtacaaatgcctgctttttatcaaagaaacaacatgatggggaagtcattctccccggttgacctgttgaaatttcagcaaaaaccagttacagacgtcaaagcgggaactgacttcctggttacggacgggcaacaagtgatttggaaagatcagagctcaagtacaatctcttccattacagatgatctggcgttgaaatggcaggctttttatattcaagtcaatcgttatgtgcctgttaatattacggtgaatacgacacaggattttgaactttttgtcaatggcaacctaacgctttcaaaatatgacgcagatggtaaagcagcacaaaaaagtgattcgttgaaactggaaccgggtaaatatcttgttgtaatcaaaagcctttatcagaagaaatacaatgctccgtggcaggtcgacgctaaagtttcttacgataagaaatttaccggtcaagccatcagtctctccacctcggatgaacagcttcttgatctctcccatattttattgggtaaaatgcttacaaacacccagctatccgatgacggaacattggtgctgctgaacttttcggagacttatcctcctgacgggaaaacagttaattggtttgaagtaaagagcattgctgatcataaagttattttcagttcactgcacagcgatcgctatcaggctgaatgggttccgggttcgcataaaattacctatgtggccgacaatggtgtttctcaggcgttgatgtgctataatctggatactcatcatgaaaaggtattaatgaataaactcgaacgtttttccggttatgaatgggatcattttggtaaatatctgattttctcaatcgaagaaaaatatgagaaagatacttccggtgtatttatggtacacggaatggaggatcgtttaccttcgtatcgcatccgtacgcaactttttatgttaaagatcaacgatctttccataacacctcttacctatggctatttgaccaataatctggaggatatttctcctgatgaccatcggatactgattgctcagaactttcctgactatacggaacgtccctatacaaaacaggtgatgatggagatgaacctgaatacgatgaaagtggacacgctatggtttaccagctttggtggcgatgccgtctattctcctgacggtaaacagcttttggtaaccggaagcccttccatgttcaatggcatcgggaatatcctcaaaaaaggtacaatccccaatgattttgacttacaggcttacctgtttaatttgagtgatcacaaagtgacacccctgacgcgggatttcacccctgccttgttgcaatcctattggaatccttatgacaaacagatctatttcttggtctctgatcgttcttatcaggatatctggaagttaaatcccgaaacaaaacaatttcagaaactggatacccacgtagatgtaatcaaccaaatgagttttgctactaaaagtcctatgttgagctattcgggtaccagcatctcacatcctgctacaggatgggtctacaatctttctgacgggaaagataccgaagtgtctaatcctgagaagtcatttttcaaaaatatcgagtttggaaagattgaagactggaactttgtagacaagcagggattaacaattgaaggacgggtttattatcctcccaactatgatcccagcaagacatatccgctcattgtttattattatggtggtaccgatcctacaacacgtgattttggtggtaggtatccgctgaatctctttgctgctatgggttatatggtgtatacgctgcaacccagcggggctactggtttcggacagaaattttcagcacttcatgtcaacggatgggggaaagaaaatgcacaggatattattgaaggcactaagaaattcattgctgcacaccccaatgtcgaagccgacaatgtaggttgtatcggagcttcttatggcggatatatgacgctttggctacaaacccagaccaatattttcaaaacagctatcgatcatgcaggtatcagctttatcggctcttactggggccagggctactggggttattcctacagcgctgtagcttctgccaacagtttcccgtggaataacaagaagctctatgtcgatcaaagcccgctgtttaatgctgataaggtacacacaccaatcttgttgttgcagggaacggctgataccaatgtcccgaccggtgaaagcatccagttttatactgccatgaagatactggggagaacagccgattttgtcgaagttaaagggcagaaccatcacattctggattataaggacagaatcatgtggcaaaagactatttttgcctggtttgcaaaatacctgaaaaaccagcctgaatggtgggatgctttatatccgcataaagatttgtaaacttatgaatttgtaattcattctgctgtattgtaaaatactccacagccaacgttgccacaaggagcgttggctgtgctgttttcaggcaatctatcgctaaagcgggcaacatttttccatataaaattgctacatttgccaccaatgaaattatcctggtcgaaatattataatcttctgtttattaccttggtgatactgctggctattccatgcccggtcaaaaaggaaataaagcatagccttcgtatagaaaccaatcaacaaaacatttacggaaatataaaaatagcctgttctagcttctgtgaattaaaccaacctgtaaaacagaaaaaagatcagacgcaggatgttcatttttctattgcatccagacaagtatccccggttgtaatagctgaaaatattcagactgacggattctgtcgtcaaaaagaaaaaattccttcctacctgttattcgagcggcttctgatttgattgaagcattcactgcttaactatttgtcaaacaaggaaaatccgaaatagagtttccttgttgggcgttttgtacccgttcaaaattttatcacaattacaataaaacaattaataacgagacgaatatgacaagatactccttttgatacgaggagaatgttattggtcatggcgtctttacaaaattcacaaactcatgaaatcatatattatcatagttagcatttgcttatccatgtttggaaccaatatgtcccaggctcaaacaagagaaaatgttaacaaaacagaacaggcaattaagtcaaatggaaaatacgccctgatggtaatgaatgtccagcacttcaaggcaggcattctaacaggtaaagaactgaaggagaaaagctccggaatagactttcaaatagttacttgcggggaattagtgaaagagatctccctggataaggccttgcaaaatctggttgtagatgcggtaaaacattatggattgaaaattcttgcctgtggtttatctatcaagcagcttggcgtggacaaatcactacttcccgcggaaatgcctgtcatcgcaaacggattaatctatatgcttgggctggaagaagaaggttacaaaacaatagctttttaatcctttaaatggcacaacaatgaaaaataatcatatacaatccaccacttctgccggcttttttacactggcgctgcggttggttatcggctggacatacttttctgctttttggcgcagattgatattggcaaacaaactgaatcccgatattccgggttatataggagaaaagttcaatcattttttaccgaatgcattggggataaaacccatgatcgaatttttgctgttgcatccgcatctgttgttgatatcaatgatgctgttcactatcgttgaagccaccttggggttatttattatgtccggccttttcagtcgattgatgagcattggcgtgtttttgcttgccatgggaattcttttaggttctggatggcttggcaccacctgcttagacgaatggcaaatcggcatattaggtatggcgggtgggtttaccttgtttctgacaggcagtgatgcattttcattagaccattactttatccgaaagggatacggatttacctctaaatcctggtttaaatggctgggatcaggtgcgttgccaatgaaaaatccaaaatggtttgtcctgggtggagctgtctttattttcggaatgacgcttttcacaaatcaatattttcatggaggagtctggggtgctttgcacaataaatcagtaaagcctaaaattgaaatttccaatgtcaaatggcataattcggaactaacgtttgatatataccggacagaaggagtggatgtttatggctcttttttgataggaatcgaaattgacaatcaaaagaatgaagctgtcaaatcattgaatgagcatgatttagctaaattccccttagccaatatccgaaactattatgtagcaaaggtggttcccggaaagcatagcttagtagttcccttaggtgctaaagcagaaataaaaatagataccggcggactgtcaacagcccaaaactatacgttgaaactgattgatataagtggtattgaatggacggctcctgtcaatcagccgataacctccgacattacttcagaaaattgaatacctcaatagagagcttctttttgtatgtttgtgatattccccggtcagcatataatctgacactacatgagtaaccaggatgtgttggccgggtattcatccttataaattgaaagggaactaggagatgttcagatattcaaacccatttattgttgctcctatcattgaggtacaacaggcccgtcttgttttattctcaaatcatgttaaatcaggataatatttgcatgcaaaaacatcaccggcatgttttttttgtacgtttgccaagttaaagttactaataatgatttgtttatcgaatgaaaaaacttataataattatcatttcattattggcttatagcgctgccggtttcagtcaatcttttgacgacaacagtgttccaaagcaggttggtcaatctcctgatacgaagagtatatccactgattctttgcatatggttcagacccgggatatttcttttgtgtcttccataacacctgcctttcagttgaatgatacgattccgactgtagttcctgtttactccaataaactgttttcccgcatgcctttttttgtcaacgaacaattctcggttggtttaggcaagacgtacaacaacttcaaatacgaaaacatcacttcattcggaactacattactctttcatcctgtatcaaaattgaacatagctgttacgccagtcatttcacactatctttttggatcaccacaactgccatcgtttacagatttttccgctaccattaatgccagctacgacgtttcgaaccgaatggttataaagggttatggtcaggtgagcactgcctctaataaatttttgggatatcctccgtatgtgccacaaaatgcctgtggagtaggggttttgtataaagtcaataaaaacattggtattgaagttgacgtagaacaatccaaatccaatggtgtctggtacaatgagcataatgaattgccgactgattattgacccaattcctgcttagttgcgttaggggtcttgtttcaaacgattactcatcctaatccccattttcttcctgtttttattaggaatgtaaacaatcatatgtttttttgttattcaaaaaaaataattctatatttgtccctgaaatttattgttaaaatcaattttttttgattttactttcatacctggataacatatcattcagtaaaaaataattttgaattaatgattgtatatcaatcttttatatcgtaattttatgtatgaaacattatgtctgtatggccaatattggagttttgatatataaatattttgtgaatatcagtctaactttactttttgaattatgaaaaaaactttgatttctgttttgtttgcattactcatcattttgatgtttccctcatgtgctactatttttagcaaaagtatttatcctgtttctattaatacttctccggtaggatcgaatatttctatagtgaataaaaaagggattgaagtatttaagggtgtaagtcctgttactgtgaagatgaaatcatcatccggttattttagtcctgaactatatcagattaaaatatcatctccgggatttggagagaaagtcgttactgtctccagtagtttggatggatggtattttggaaatattctgttaggtggtcttatcggaatgttaatagttgatcctgcttccggcgcaatgtatacaattaaagacagaaatataaatgtgtctttagatcacgctacctctgcaaataatgctacattgaacattgttgattacaacgcgttgtcacctgatgcaaagaaggatttgattgctatacattaaacaatgtaatctaaacataccctactatctcaagttattggagcaatagtagggttttattttgagaaattgtatctttgaccgattgataacaacacaacggtatttcaagataatccatgtcctgttgtgatttgctttcagaattgtatctttgaccgattgataacaactgcttttttggcggttgatttcctcaacggttgtgatttgctttcagaattgtatctttgaccgattgataacaaccaaagtagctaccatgtatgggatacaacggttgtgatttgctttcagaattgtatctttgaccgattgataacaactcatatcacaacaactatcgcgatgacgttgttgtgatttgctttcagaattgtatctttgaccgattgataacaaccaaactatattcatcaatacggcggttaatgttgtgatttgctttcagaattgtatctttgaccgattgataacaacttttcgctcgtatttcacgaaaaacgatttgttgtgatttgctttcagaattgtatctttgaccgattgataacaacatacctgctattatcaatcattaaatcaaaactttacatgaaaaattagaattaaaaaatcaaccggtaatcattgatgttatctataaaaacctgcactttttacgttgcaggtttttttatttcccttcctgttttgtcttcggcttaaagcattttcctttacctttcctccctatttgaagtatgtttcatcccatgacacttctctatatcaatatataacttacagttatattacaaagatatcacaataaataaatagtgataatacaaacttattaatactgtgttatctccataatattttactatatgggtatcacctatttacgctatattgtatatttgcacttaagttaatagcaatgatgataacagtaaccaaacagtaacactatggcacggttaaaaggtactttacaaataacgggaggattaaccaatttgtctttttatacaataaaaggaagcgaccaggtgtatgtacgcaccaaaggaggtccttcggcaaggcagatgaagacaggaaaaagctttgcccttgttcgcaaacaccaggtggaatggggcgcttgtgtcatgttttcgagggcactgaaagaaacgatcagggaggtggccagactgggggatttcaatgtatcgccgttttggaacggattagggaaaaagattattgcattggatccgcaacatccattgggggagcggagcctgcaacttacccggtgtgccgattgtctaaccggttataacctgaacaaaagttttcctttcaactcgatatttcgcggggcgttacaatttgacccggataaggaactgatgcgtttacgggtaaccgtaccgcgtatcaatacagccaacgatttgtacaacgtacagaaactgccatatttccggcttgtgttttcctttgggtttctggccaatctcgaatgtagtctggatgacaaagacccgaaatattttcctgaaaacgatataacagcatggacaaccaccaagagcctgacgacagactggctacctgctaccggcattattgacggacaaacttatgaaataatgctggataccgccctgaaagaagaagacaaaaagcatgtaacctttgtgacggcggcaggaattcaatttggcaataccagtctgggtggctccatagaagtcgtgaaaaatgcgtgctgtggaaagattgtcatagcagaatcataaacaaaggcgagttgccccgccttacatgttttcacaacggaataatccttattgtgatttgcttcagaattatgatgtaaagatatacaaaaaaatcattcagaaaaaattgttgatcaaaatactgtttttaactttatagcctactagaaagcacttaaaatatagcatcatgaaaagaattttaggactggatttagggtcatcatctatcggttgggcgttcatagaagaagatcaacaaaagactactattataggcttgggcagcagaataatcccttatgaaggaactgagggaaaagattttgcaaaaggtacgggcgaaagcagaaattcacttcgcacgaaagccagaactgcccgaaaaggatatgaccgatatcaattacgaagaaagtatcttgttgatgctttagtaaaagcaaatatgtttcccgacgaatcattaaagaatctacctaaaatagaactttgggcattgcgagacaaagccgtccattcacaaataaccctcaaagaacttggtcgcctattattgtggctcaatcaaaagcgaggttataaaagcagccgcagcgatgcaaacttagggaagaaagatactgaatatgtggctactgtaaaaagcagacatgaaaaaataaaggaactaaatctgactatcggacaatacttttacaaagaattatccaaagattcttttttcaaagtcaaagaaaatatctttccccgcgaggcatatattgaagagtttgacactatttgtagtacacaaaaacaattttatcccgagatactaaatgacgaatttatttcaaaactccgaaacgaaattatttattaccaacgacctttaaaatcgcaaaaaggtttggtttcggtttgcgattttgaaggtttttggcggacagctaaagatggaaaagaatattttgttgggccaaaagttgctcctaaaagttcgcctatctatcaactgtccaaaatgtgggagaatatcaacaacatcaaagtcggttcaagattgggtggagacattgaaataacagcggaacagaaacaagcaatctttcagcacttagataacaatgaaaaactaacagttactgatttattgaaaatccttcaactcgacagaaagaattgtcatgtcaacaaacagatagaaaaaggattagttggaaatattacaaaacatgctattcgtcagtgtttgggcgatccgacacaatacaaccaccttttgaggttgaatttagatattattgaaagcgataaaaaaggttatcttgttgacaaaaaatcagttgaaatcctgaatgagaaatcaacgcaatacattgatgcaaacgttgaacatgaacccctttatcaactgtggcatactatctattctattcaggacaaacaggaatgtagcaatgctttgcaagccaagtttaaaattgatccaaccatagccgacaagttggcagatattgatttcagcaaacatgcttttggaaacaaatcggcaaaagctattcgtaaaattctaccctacttgatggaaggtgataaatacagcgaagccatgagttatgctggctacgaacattcagattctttgaccaaagatgagaatttgaaaaggaaattactggatcaactcaagccaatacagaaaaactctcttcgccaacccattgtcgaaaagatattaaaccaaatggtgaacgtggtgaatgcgattatcaaagagcatggcaagccggacgaaataagagtagaacttgcccgtgaattgaaacaaagcaaagaagaacgcaatgatacggataaagccatgagcaagcggcaacgtgaaaatgaaaatattaccaaacgattagccgaatatggattgaaagcaaccagaaataacattatcaaatggagattgtatgaagaaattgataatgaagaaaagaaactgaatgctgtttgtatttattgcggtcaacccatttcattgaccgaagcaattaaaggaaacgatgtagatattgaacacattattccaaaatcaaaactgtttgacgattcacagagcaataaaacactggctcaccgtcattgtaacaaaaacaagaatgacatgactgcctatgattttatgaaaacaaagccaacggaagtatttaacgaatatgtaaaccgtgtcaatgaattatatgcaaaccatgtgatcaacaaaaccaaacgagataaacttttgatgcccgaagataaaatacctgataattttatagatcgtcaacttcgggaaagtcaatatatttcgcgaaaagcgagagagatacttcaaaccatttgtcataacgtatgggctaccagtggtacagttactgctgaacttcgacatttatggggttgggacgaaattacaatgaatcttcagtttgaaaaatacaaacaactgggattaaccgaaatggtggaatgggaaagtgaacacggcaaaaacaagcatcagaaagaagttatttcgggatggactaaacgggatgatcatcgccaccatgccattgatgcattgacaatagcatgtaccaaacaaggctacattcaacgcttcaatacattgagtgctgtaaagaccagagaagatatgaaaaacactattgaagaacgttcagttgttttcaatgaaaaacgttcattactcgaaaaatatataatcagcgagcagcctatagaagttgccgatgttgaagaagctgtcgctaatattctaatctcatttaaatcagggaaaaaggtagctgtaattggtaaacgtaaaattggtaaacgaggaaataagaaggtagttcaaacaggaataattattccacgcggttcacttagcgaagatagtgtttatggaaagattaaaaccattgatgtaaggaagccaatcaaatatgttttcgagaatcctcaattaattgtaaagccttatattaaacaattggttgaagaaagaattgatagtcataatggggacatcaaaaaagcaattgcttcaatgaaaaacaaccccatttacctaaacaaagacaaagaaattattcttgagtacgcttcatgctataaaactgaatacgttattaaatacacagtagatatcaatttcaacaaaatagacaaagtaattgatggtaagataaaaaacatattacaacaacgccttgataaattcggcggaaaagccaaagaagcatttaaagatgttcaattaagtgacaaatctatcatcaaatggtatgaagatgaggggttgaaacgtccaattaaatcagttcgttgctttaccggattatctgctgttgttcctgtcaaaaaagatgaagcaggcaaagacattggatttgtaaaacccggtaataatcatcacattgctatttatactgataaggatggtaacagatttgagcatgtttgtacattctggcacgctgtagaacgaaaaaaatatggaattcccgtaatcattaaagatgcagccgaaatttgggataagattcaactccaaccagaaggtacttatccagagagtttccttgaaaagttgcctgatgttcaattaaaactggaattaagtatgcaacaaaatgagatgtttgtattgggaatggcaagtgaagatattcaattggcaattgaaacgaatgattacaaaactattagtgataaattgtatagaatgcagaagatgtcacttaaaccaagtagcggacaaattgatttagtctttagacatcatctagaaactcagattgttgatgatattagctctaaagaaagcaaaagattcattaatattcaaagcttaggaacattatttgggttaaatccatacaagctcaaaatcgaccgtcttggaaacatctctctttgatcaacgataaactttttcaaagttttagaacgttgggaaagttgaaagaaacaaccattaaaacctataaatggggaaattacagtttaattgcttgtatcatattttcaaccatgccaacgggtttaaaagtgtgtttcgagaggatgaaaactggtggtattttctggagtgatacaggctgtatacatttctcatagcctagaaatcaaccttttgtcggatgttgaacaattctatccagagatatgtttccacaaacaggaggcgtgcgaggcgttgattcgaaattagaaaaagagtaatgtggtagtggtagaaaagatcgtaaaggcatttggcggtatggcgctttttgaacatgcacataaaatctcgaaaaattcaaccagatagttcatcttgaaattcctgtagatcatgattaaacggacgctttatttcggaaatccggcttatttgtcaaagcggaatgaacagttggtaatcaaattaccagaggtggcgaagaacgatactctacccgaatcgtttaagcaaaagagcgaagttaccgttcctattgaagatattggggtagtggtgctcgatcatcaacagattacactaacccatggtctgatggatagtctgctttcaaacaatgccgcagtaattacatgcgacggaaaccgcatgcctgctggattgctgctccccttgtcaggcaatacgacacagcgggaacggtggcacgaccagattgaagcttccgaaccattgaaaaaacaactctggcaacagacgatcaaagccaagattcataatcaaaccgccttgttggaacgtcgtagagatgtcaataccaaaaacatgcattattggtcggatgtagtaaaaagcggggatgtggaaaatcatgaagccagggctgcggcttactattggagtaatcttttcccttcgttgcctgattttcgaaggggcagggaagaggagcctcccaataacctgctcaattacgggtatgccattctgagagctgtggtggcccgttcactggttagttcgggtctgctgcccacatttggcatccatcacagaaaccgctacaacgcctattgtttggcagatgacgtgatggaaccctaccgtccttatgtggacgatatggtatatgatattgtggataagggaaccgattaccgggaactgacaaaggatattaagcaaaggctgttacagatacccactatcgaagttgtaattgagggagagagaagtccgttaatggtaggagtgcagcggacaacagcatccctttacagatgttttagtggggaattacggaaaataagttatccgacgttttgaagaatgcatgaaattaagaaatggcaaaacaaaacaaagaggaattaggaaggagaatgtgattacgtgattcaaacgaagagttttgattttgttattcggattgtgaggttgaacaaatatttgataatttgactgaaagagtttgtgttgtcaaaaataatttctgggaagtgtaccttcccttgatgctgatgttgaagaggcggattccttattcctttattctgttcttatttatggatcgttttaatgaatacagaatcatgtgggtaatggtattttttgatttgcctacggagactaagaaagaacgcaaaatatatgctgattttcgtaaaaagatgctgaaagacggatttaccatgtttcagttctccatctatttgcgtcattgtcctagccgggagaatgcagaggttcacatcaaaagggtgaaggaggcattaccagaaaaagggaatattggcattttgacagttacagataaacagtttggaatgatggagctctttcagggacagaaagtaaaaaaaccggacaccccataccaacagctggagttgttttagccgagcaggggaggatacttgtgaactgaatcgcattctgacgaaataagcccttgccggatatccatttttggctacctttacaaacttttatttcaaattcaatcaagaactatatggcaaaatatttggaagacatttcaagaaccttcagtgagtatttactaattccggggttgactacccacgagtgttccccctcgaatatattgttgaaggccccccttgtgaagtttcgtaaaggagaacaggcgcctatctctctgaacgtgccttttgtttcagcaatcatgcaatcggtttctgatcataacatggctattgcattggcccgcaatggagggctttcttttatttttggctcgcaagctattgaatcacaggctgaaatggttagaaaggtgaaaacctataaagcagggtttgttgtgagcaacgctaacctaaccccggaccataccttacgtaatgtgattgagctgaaagaaagatcaggacatggaactattggaattactgaagacgggacttcacagggaaaactcctgggaattgtaaccggaagggattaccgtgtgaccagggatgatcctgataaaaaggtaaaagaatttatgaccccgttttcaaagcttatcaccggcgaatttggtatttccattaccgaagccaatgatattatatgggagcataaactcaattgccttcccataattgataaagagcagaatttaaaatattttgtattccgaaaagattacgaaaatcacaaggagaacccgaatgaactttctgacgataacatgaaattgcttgttggtgcaggaatcaatactcgcgactataaagagcgtgtcccccggttgcttgaagccggagtagatatcatgtgtatcgactcttccgatgggttttcagaatatcagaaagatacgcttcattatatcaaatctgcttttggtgaacatgtaaaagtcggagcaggcaacgttgtcgatcgtgatggctttatataccttgccgaagcaggcgccgattttgtgaaagtgggtgtaggcggagggtctatttgtataaccagggaacagaaagggattggccgtggacaggcgactgctcttattgaagtagcagccgcgcgtgacgaatactttgaaaaaaccgggatatatgtacctatttgttcggatggagggattgttcaggattatcacatggtgcttgctttagctatgggtgccgattttttgatgatgggacgatactttgcccgctttgacgaaagtccgacacggaaactgatggtgaacggaaattacatgaaagaatactggggagaaggctcgaaccgagcgcgtaactggcaacgttacgatatgggaggaagcgaaaacctgaaatttgaagaaggggttgacagtttcgttccatatgctggtaaattgaaagacaatctgaatattacattgggaaagattaaatcaacgatgagtagttgtggtgtaatggatttgaatgatttaaagcgaaatgcgaagattacccttgtttcatctacaagtattatcgaaggtggtgcacatgacgtggtcgtaaaagataatagaagcacaaacggataaccggattcaattacaggttgtttttatcctaattgggaatgaaaattgaacctattttttacataggaagtggaagtgcggttttaagctgtacctccacttctgtttaaaacaggttcaactgcccttcgtcttttttgtttcttttcgggatattcggctgaatttgtttggaatatccgggactgaattctgctaggaagggtgatggtttcatctctttttccgtgccgtacagcctcctttttttgcaatggactatttgcaactcctctttagcgcgtgtcattgccacgtaaaacaggcgacgttcttcttccagattgctatcctgtcgatcgagcggggtgattccttcttcagctcctgcaatgatgacgactggaaattcaagtcctttggcagcatggaaagttaacagtcgtacgccgccgctattcaacctacccatatcggtatagggtgataaaataagcttctgcaggaaaacagccgtattttcagcggtgtccgaggcggccttaaggagcatttcccttttgatgatcacatcctctgccagcacgccggcaatgtcattaagttagcgatataattatctgattatcaacaataaacgcttgtgtatatgagttattttttgtatatttgtttcagaatcaaatagttattatcatgaaaaaaaacgccggaaagtatattggaactgataaggaaaagagtattttcgcaggaaatagttttaaagttcagaatgttagagacagattttacaagaaacaggaagcaatcatttcacagcaccattgtctttatgataaattttctcactaaaagtctttcggttgagatagctaactttattagtttcataaagtacaatatgcctggtgcttcgataaatggtattacaaaaagtgcttttgtacagtatcgaaaaaaaataaaacctgaagtatttaaatcactttcagatagtttgattgaggagttttatacagacaatgatgcatcgataaagctctggaatggatttaggttgttggctattgatgggtcaagattggttttgcccgatactcaggagttggaaagcatttatggcaggactaaaaaccaatctgaaacaggagtggtacaggcaagaatatcggtattgtacgatgttttgaatcggtttgtcctggatggtgttttagctccactgtcaactggagagagtgttttggcgttgaatcatttggtttttgcaaaagctaacgacttgattatttacgatagaggttatccttctttcaatttgatttatgagcattttgaaaaaggagtagattttctcatccgggttaaagctgattttagtaacctcacccgggaattttaccagagtggactacagtcagctattgctcgaatgcaacctggaaagaacataaaactgtcggataaaccgtattcgaagaatgcattcaaagaagttcggttggttcgggttgaactacctgatggagaaatagaaatactgataacttctttgtttgattcaaaaaaatatccagtctctttatttaaagaactgtattttttaaggtggggagtagaaacgttttatgatgaattgaagaacaagataaaaatagaacatttttcaggctattcagagcattgtatattgcaggatttttatgcagccttatttgtgtcaaacgttcagagtttaatcgttggagacataaatgatgaattagccaaagaatcaaccaaatatcaatatcaatacaaagtcaatagcaatttatcatacggctttctcaaagacaggataattttactgtttttctcggaaaaggatatgaacgaaatagtatcagaactcaaagcgttgtttaaaaaacacacgataccaatacgaccaaatagaagatttgaaagagatactgacaaatacagaaaaagaggtaaaccgaagttgctgaaaaacaataaaaatactttctgatggccttaacttaatgacattgagcacgccggtaagcgggagaaagaaatccagcaacggctccagaaccgtgccgggattgcttgtttcgaaaccggatgataattgacggtagagcaatatccactctctccaacgctgatcatcggaaagatgctcaaagtcaatgcttctttccatcatgcttttcagtataaattgcttttgttcctttgtgatggataaaagatgatcaatcaatcgggacagcgcaaccatattatgttcattttgcaataactgcaaagcatttgctaccagatcaaaaggtgtctccgacagaaaagagcttccatcacttagtaacactggaatgccttttgcctttaattgatggataatctggctaccaatccgatgggttcgatataaaacggcaatatccgagaaagcataatcatagtcggataagagttgtccggtacttagggcatcaacgccaccgacatagtttaatatctgagttgcaatgtaattggcttcttctgtggcatttcccgctacgtattgcttgatttcaacgtctgatgttttcactgcttcggcatgcgtttcgcctgcaagagaattatgccggatcacttcatctgcagctttcagaatggaaggcggcgtgcggtagttcttctgcagcataatgcgggtagcctgcaaatcagtttccgctttgtaaaagagtcgtatgtcggagccccggaacccgtaaatagattggttaggatcgccaatagtgaaaacatgcttcccggaagcaagcaaccggacaaattcatattgcaccgggttactgtcctgaaactcatctaccgcaaggcatttatacttttgggtgaagcttttctgtgagtttttcaattcattattcgcctgccagatgattgccgacagatcgaccgcatggttatcgcggaggaactgatggtaggtctcaaaatgcgtcgagaattccttttgatcggggtcaataccttcgtgatacttttcgtaggcgtaggaaagttttttatgtccggcattgtccatttcaggaaaaagaatgttgaataggctgatgcgactggtttggtcgtaaatagttcctgtttcagggtacatttctttcagaaaaccgtatgcaatagcatgaaaggtgccgaccattatccggtttgctttgtctccgatttgtttttgcagccgcaccctaagttcatcagcagctttgttggtaaaggtgattgcaataattgtatccggcaggatacctttttcttcaatctggaaagcaatccattggatcagggtttttgtttttccagtgcccggtccggcaatgacaagcgtattcttttcttcctgtatagcctgctgttgctttgtgttaggtttttgttcttccccttttttttctggcaatgctgccggttgttggagggagtaactttgttccggttcaacaacattagcaacggatatctcttcgtcaaaaaggttttcctgacctgtaaaacgtgctatttcgccagcattaaagatggagatggtgccgtattcgccgtcgtaacctccttgcggatgaacttcctcagcgcgtaaacgccggatagcttctgcaagtaggacatttgatttagcttttatctcttcaaccggtacaacgtgtaacagatcaaattcattgccgaaagttgaaattacgcgcgtaaattcttgcatcacgccttttgaggcagtagatgaaccttcaatttgggcgaggatctcgggcaaaggaacaatatacttaaaaccgggagcattggtcggttgttcagccgaaggcctgtctgcgagcgtttcaatccggttgagtaccccaatcgtaagcggtttgccgcagactggacaaatatttttcagtttgaaactctcctgaggtgtcagggagatattacatttacgatgtccgtccagatgatatttcccttcttcaggaaagaactcatatgtgccgcagaaaccttgcctgcttttcaacgcttcgaacatggcataatacgataactccgtatcaaatacattggcttcccttcccatcttttgaggtgaatgtgcatctgaattggagaccagcgtgtaccggtcgagtgaagataacttccagttcatggctggatcggaagaaaggcctgtttccagggcaaagatgtggttggacaagtcgcggaagcactcttcaatgctgtcataaccccctttcgaacccagtgtggagaaccagggcgtccaaacatgcgctggaatcagatgggcatcttgtgagctttcgagtacgatttcaagcagatctcttgagggaagccccaaaatcggtcgtccgtccgaagcaaggttcccgatttggctcagacgtgcattgattctttttgcggtatcaaaatcgggcgccagcacaatgttatgattcttcctgactttgtctccgtatttgtaaatggatgcgatttctgtgctaaggcaaaaccgcacgtcgataccttggggtttgatgccggggactccttcttcatgaggaggatttttcaaacgaaaaagcccgttcccatccggttcgagtctgtcttccagttctttgagccatcccggatgagtaaaatcgccagtacccagcacatggatacctttgatttttgcccattgatacagggtatcaagattcagatctttgctggttgctcttgaatagtgggagtgaagatgaaagtcggcaaaaaatttcatgtgttaattgagcgtcgaactcatgtcaacatttaatcattggcttgtgcgccttgaattcagtcatgagcgttcatccattttcaatgctttcatgtttttccattgtttacagacagctaaattacagctttttttattttctggtgtgggtgtggatataattttttttttgttctgcctgtggggaagctttaaaactaaaaatgggattcaaaatgtaatgtaccctaaacgttagacaagaaatttttgagatacaattcattttgaacaccccacatctttgatccacctatccggacagagaagaaaacagaaattagtcaaaagtatttttttagaagtggttatctcatcatcgcttataatggacaaacaagtgtagcgtgatttttataatagaagaatacctgcctgttgacagtgtcaatcagtaattgatttaattttttattgaagatggaaccacatacttctacttcttttatgcgccaatcctgttaatcttgatcaaaaaataccaaaatgcagaaatatgcctatttttgcattctcttgatgtcatacttaaccttaaaacttgtactgttccctatggaaaaatacaacgaaaatcaggaaaagaaattaattttcaatttgaaaaacggttcgcatacagcatttgattccatttataaattgtatgcaaagcgtttatatgcttacagccttcaatatacaaaatctgtagaagatgctgaagacattgtgcaagaggtattcatcaacctatggaacaacagaatgactatccggcaagatgacactctaagcgctttgctctttattatggccaaacataaacttattaacgcataccgggccaggttgaaccatccccatagtgaagaatacaaggaatttatgcatgctcttactgttgatgatacccaacaacgtgttgaatatggggattttgtcaagcattttacgaaaattctatcaaaactacctccaactcaacaacgtgttattcaattatcgagatttaacagaatgacaaacaaagaaattgcagaaactttatcattaagcgaacaaacggttaaaaatcaactttcgataggattaaagtctttacgggagaaattaatgagaataatcgtcctatgcgtactgttcgttattccctggtaatttataaacggtactttttaatatgcagcgtgtctttaatataaactataaatcagaataaggtgaacgaactggaacaaaagtataaaacaaataacttgactgacgaagaactgaaaacactaagagattacgtcaattccatgtcggatgagcaattagcaacccgtctgtttgatgaatggctgaataatggaactgatttatcatttgtggattctaaacggctggataaattgaaggaagaaatcgatcgatccattgataactcacactacaattttttaaatatcaagaagataggacaaatagccgcagccatattattgcctgttttcattataacaactttgtttttttataaggaaaaccaccaattgacttcagaagagatggtggtaactaccggcaataatgaacgggcaaatgtcaatctgcccgatggaaccaatgttacattaaattccaattcacgattggcatatgcacctatg

SEQ ID NO: 1732 - DNA, 23732 bp, synthetic construct
  misc_feature 1..23732: note = Synthetic
  source 1..23732: mol_type = other DNA
ataacggtactcttttcctagatgaaattggtgatcttgaaccattgcttcaggttaaactcctgagagtcttgcaggaaaaggagtttagcagggtcggagatactcggattattactaccaatgttcgggttatagctgcaactaaccgagtattaaaagatttaattgcagataataaattccgtgaagacctctattacaggttgaatgttttcgagtttcatctgccgagtttaaaagagcgcccggaggatattatgttttactttgaaaagtttgtaaaagattttgcggttgccaacaaaaagaatatcaaaaaaattgaagaaagagttatcaaggttttaaaaacttaccattggccggggaatatacgagagctgaaaaacattgccgaacgggttacaatcctttgtgaaaccggaactataacgtacgatttacttccgttaaatctcagggaaagttctgctagggaagttgatattgagcctgatatttttggggataatttttcaagcaattacaataaatctaaagatgatttcataaggagattcgaccttgatttcattactaaacatttaagcaaacatagcggaaatgtggaggcgactgccaaagcgataaactttcatccggtcagcctcagacaaaagataaagaaacttgggattaaaccgagtgagtttaaaagtcaaaaataaatcaataatatcatggatacacttaaagaggaaaaatcaggaaccgcaagaagtgaattaaaggatttcttgccgttaaagagaattgaccacgttgaattctatgtgggtaacgcaaaacaatcagctttattctaccaatatgcattcggttttaaactgaaagcatacgccggattggaaaccggatcaaaggagaaagtatcttacgtccttgaacaggggaaaatcaggtttgtgctaacaggagcgttaacaaatgattcaccgatcgcagaacaccacaaattgcacggtgatggagtaaaagatattgcgattgaagttgacgatgcgaccagcgcatacaatgaaacaacaaaacgcggtgcgacaggtgttcttgaacctacgaaaatcgaagatgaaaacggatacgtggtaaagtctgctatcaaagtttacggtgataccatacattccttcattgaaaggaacaactatacaggagtatttctgccgggatacgtaaatgctgaacatcgcggagttaaagcaattactgatgttaacctgagatcaattgaccatatggttggaaatgttgaactcggatatatgaacgaatgggttgaattttacgcaaaagttatgggcttcaatcaactcatttctttcgacgataatgatatctcgactgactacacagcgcttatgagcaaagtaatgcagaacggaacaggaaaaattaaatttccgattaatgagcccgcaaagggtaaaaagaaatcacaaattgaggagtacattgatttttacaagagcggtggagttcaacacattgcattaactacacccgatatcgtttctacggtttcggagcttattgcgaggggaatagaattcctgaacgtaccagcatcatattacaaagaacttgagggaagagtcgggaagattgatgaaccggttgatgaactcgcaaaacttggcatacttgtggacagagatgaagatggatacctgttgcagatttttacgaaaccattagttgacagaccgactttattttttgagataattcaacgtaaaggcgcaagaagtttcggaaaagggaattttaaggctctctttgaggcaattgagagggaacaggaactccgtggcacgctttaagtttgggttaagttgtttgatgttaagagttatgaaattaaacaatataaagaaaaagctcacggaggaaacagcttgaagatacttattgctgaagataattatatcaaccaaaaattgctgcgacgaatgttaaatcatctcggttttgaagcagaggtctgtgaaaacggtcaggaagtgctggactttttgaatgaaaacaaagttgacgtaatatttatggacgttcaaatgccggtaaaagatggctttgaaactacacgcgagatagtggaaacaatgggggagaacagaccgaagataattgcattgactgcgagcgcactgcaatctgatatgcagaaatgtctggaggcagggatggatgactacattgcaaaaccgattatgatggatattctcgaagagaaactcaataagtggaagcctgaatcataatggataaatattccgatatattagaccttgaaataatagccgggttaaaggaacttggtagtggtgaagaagattttttcaaagaagttattgatctatacctcgaacaggctccgggtcttatcaaggaaattaaaactaatgctttttcagccgatgccgaaaaaatgggtaaatctgcacatacattaaaaggcgccagtttaaacgttggcgccaaagtttttgctgaagtctgtaaagcgatagagcttgatggcaaaaacaacaacctctccgatgttgcaaataatctcttgaaattagatgaattatttgccattactaaatccgcactgttagacctcgctggttaaaatatctggcacgctttttgtctgctattcattagacaattgaaattttgaacgagataactaaaatacaattcctgcaatcaaatgccgaaaaaaccattgattggttaaatgaaatcaggggacttgtaaaaatacccgattttgtaaacaattcaattcaggatttaaaacagttctccatggatacagattctttcattgagggtgtaccgaaagtgaaagaattggaagagaaagtatccaacctcaatacaagattgcaggaactaaagttactcaacgagcttctcgtcagggagtccagaaaatttgagaaacttcgacaagggttgattgaaatcgccaaatctcttaatccggacgataattcgcttgacgatcttcaggacgtatatgaaattcgggcctatatttcagatatacttaaaagaaaccttctcaacccggatgattcgggaagcgccgggattttatcaatactgaccaacatctctgatccttctttttcgattattgatgataaaatatccttcgtaaaccattcatttttagctacggcaggttactcctcaaaagagatgcagggattttctattctgaaatttacagatgacgacagcgaatccattgcttcaataatttcagggaacccgaagaattcaacatttaagattgtctgtaaatccaaagagattattgaacttgatattcaacaacatttcaaaattcagaatgaggttttctatttgttcagagggcaacaggtgcagggaaactctcctggtcaagtagttgaaaattccggtaaactgttaaacagcatcagggaaataatatttacaacagacgcgtccggggctattgagtatgtaaatgacatctgggaaaatatcacaggaatgaaaatcaacgatattaagggcaagaatcaatctgatattttaaaattaaacggggaatattttaattccgattacatttctaaactcacatcgaaaaaagtcggtggagattgtggtacctttatttttaacacactttacggtgagaaaaagtttgaatttaaccgggttttcaattacgatgtgatgggtcaattaaccggttcggttgtatcattacttgatattacagagaaagacagcatgtatcaggaattattgaaagcgaaagacgctgcagaggagattacaaaagtcaaatcggatttctttgctgtaatgagccatgaaatcaggacaccaatgaatgctgtaatcggaataacagggttattacttgagaccgaccttgaagccgaacaacgcgaatatgttgaaacaattcgaaatagcggcgatacgcttttaactctgttgaacgatatacttgattactcaaaaatagaatccggaaagcttgaacttgaagagtcaccgtttgagataaaatcctgcattgaagattcaattgacctgcttgctgttaaagctgtagaaaagaaactcgacattcttcacctcattgaccaaaatgtaccgccgtaccttattggggatgtaacaagactcaaacaggtgttggtaaacttaatcagcaatgcgattaaattcactgattcgggtgagattttcatttctgcaaaaaaattaaacgaagatgaaaatggcaatgttgaaatccagttctcggtaaaagacagcggtattggtattcctgaagataaatttgagaaaatatttgaatcattctcacaggtggattcgtccacaaccagaaaatacggcggtaccggattagggttgtcaatatcgtcaaaacttgtatctctgatgaatggtaaaatctgggttgaaagtaaacccggtaccggttctgtttttcacttcacaattaaggcaaaaatatcagatatcacaccatccaaattatacgtgaaatccacaatgtctcagcttgagaataagcgactactgatagtggatgacaataaaacgaacagacaaattctaacgcttcagactcagatgtggggaatgaaatcaaggtatgcatcaaacggaaaagaagctttagcccttataaaagacgatatcccgtttgatctggcaattgttgatatgcaaatgcccgggatggatggacttgagctgacaagacaaattagaaaatttaaatccaaaacggagttaccagtaattatgcttacttcaatcggccttaacgaaatagatcagaacgagttttctgaactgttcaactcgtacttaacaaaacccgttaaacaatcatatttgcttgatgtaatttcagatgtattgacctctgagcaggatcagattaatctccaaaaacaacaagcattggttcaaaagcgcacggttcctacctcattgaaaatcctcgtggcggaagacaacgttatcaatcaaaagcttgcagagaaaattttgcaacaaattggctattaccccgatatagttaataacggactcgaagttttagatgcggtatcaagaaaaacatacgatcttattttcatggatattcagatgccggagatggacggtttacaggcaacgaaagaattattgagaaagttcaggggtaagaaacgaccattaattattgcaatgacagccaatgcaatgcaaggcgataaggaaaattttattgcgaatggtctggatgattacgttagcaaaccaatcatacaggaggaattaaaaaacatgattctgaaatggtcgggcaaaatgtcaactgaccgggtaagcggaacagtgctcccgaaatcaagcgtgttgctcgatattaacatgatttccgacctaaaggcttcaaaaaaacttaacggcggatttaaagagttggttgatatttacctgaacgtttcacctgttattctcaacgatataaagattgcaagacggacaaaaaatatcccgaaatttatcagggcaactaacaacctcagacgcgcgagctacaatatcggcgcaaaaaggctagctgagatatgtttgaaacttgaaaaagttgattcttcagttaaccattatgagcttgagaaaattattgacaggttgaccgatatatacaatctgacaaagaaggaattgctcgaaatcagttaaccggtatcgcatttctctctgtaagattaaattacttttaagtattttaatctcttaccgaaattattatttgtattaatgaccttcaaaaaaaggactcacacttgtggggatcttaatatttccaatgttgatgaaacggtagtgcttaacggctgggtatcatcagttcgtgatctcggcggaatttattttattgatatccgcgacaggtacggtattactcaactccgtatcgtccctgagaacggtgaaccatacgatgttgcgtcgaggatcggacttgagtttgtaatctcgtcttccggaaaagtaattgcgagggagaacccgaacaggaacatcccgaccggtgaaattgaaattgatgtatctgagctgacagttttaaacaaatcggcagttacaccatttgtagttgaagaagatatcaaagcatctgaggaacttcgcttcaaattccgatacctcgatatgcgccgaaagaaaatttccgataatattgttttaaggagcagagtatttcagacggtttaccgctattttgattcagaaggatttcttgtgattgaaaccccgattttaatgaaatccacacctgaaggagcgagagattacctcgtcccctcgagaatccacaaagggaaattttatgcattaccacaatcgccacaaacatacaagcaggtgctgatggttgccgggatggataaatacattcagatttgcaagtgcttcagggatgaagatttgagggcagacaggcaacccgagtttacgcagattgaccttgagatgagctttgtttcggaatccgatgtctttaatgtttgcgaaaatatgataagggaaatctggaaggaaattaagggaattgagttagaaagtttccccgtaatgtcttatgatgaagctcttttaacctacggaagcgataaacctgaactaaggattaaaggcgatatgaagataaccgacgttaccggaactgttgaggattgtgggtttaaggtgttcgatgatgttgtgaattccggcggtatggttgcaggcttgaaactcgaaggcagggaagttacaagaaaggtgattgataatctgacggaatacgtgaaatcacttggcatgggcggacttgcgtacttcaggttcaactctgatggctcagttcaatctccggtatccaaatttataagtgaaacagttcaaaacaatatcagggaaaagttcgatgcgaaaaacggcgatacggtttttctgctatccggtgaaaagaaaagaactctgctagcacttgggaatctgcgcttgaaacttgcaactgatttcatgttgattgacgaatcggttgaccggttcatctggataaacgatttcccgttatttgcgtttgatgatgaagcaaatcagatcatcgcagaacatcacatgtttacaatgccgaagggtgaagaactctataaacttgattcagataagtgcgatattgaaacgataacctcaatccgcgccaattgttatgacctggtttgtaacggttccgagttcggtagcgggagcatacggattcacaggcgagacattcaggagaaagtattcaacatactcaagcttgataagcaggaggtcgaacagaagtttggatttcttttaaaagcgttcgaatacggcgctccaccacacggcggatttgcattcggttttgacagaattgtagctacactttgtggaacgaaggatatcagggagacgatagcctttccgaaaactacaagtgcattgagcctgatggacgggtcaccgggatcagttgagcaaaagcaacttgacgatctcggaatcgttattaaatattgactcaaatactgtttataacatttatatatttgtgcatagttgaaataaatttttagaaaaaataatcacaataaaatgacagatacattggagaagccggttaaatatataccgtataaagtaaaagatatatctttagcagaatggggcaggaaggaaattcgccttgcggaagccgagatgcccggactaatgtcaattcgggaagaataccgggataagaaaccgctacaaggcgcacggatagcgggttgtcttcacatgacaatacaaacagcagtattaattgaaactctcatcgaacttggcgccgaagttacgtggtcatcgtgcaatattttctcgacacaggatcacgcagccgcagcaatcgccgctgcaggtgttccggtgtacgcatggaaaggaatgacgaacgaagagttcgactggtgtattgagcaaacactttttttcggtgaagatcgtaaaccgcttaatatgattcttgatgatggcggagacctgacaaatatggtgctcgataattatcccgaacttgttgatggaattaaaggaatatctgaagaaaccacaaccggtgttatgagactgtatgagagaatgaagaaggggactttgccggtacctgcaattaacgtaaatgattcagtaacgaaatcaaaatttgataacaaatacggctgcaaggaatcgtgcgttgacgctatcagacgggcaacggatataatgttggcaggaaaagtggcagtggtagcaggttatggtgatgttggcaaaggctcagctgcttcactcaggggcgctggtgcaagggttattgttactgagattgatccgatttgcgcattgcaggcagcaatggacggttataaggttactactatggaaaatgcagtcaaagaagcaaatatagttgtaactgcaacgggtaacctcaatatcgttacggaaaaacatttccgggcaatgaaagataaaaccatcgtttgtaatatcggacacttcgacaacgaaattgatgttgcatggctgaacgataactacggagaaacgaaacaggaaattaaacctcaggttgatttatacaacattgatggtaaagaaattattctccttgcagaagggcgattggttaacctcggttgcgcaatgggacacccgtctttcgtaatgtcaaattcctttacgaatcaggtcctcgcgcaaattgagctctggaatagtggtgataaatatgataataaagtttatgttttgccgaaacacctcgatgaaaaagtggcaaggttgcacctcgagaaaataggcgttaaactggataaactttcagaggaacaggcaaagtatatcggagtggaaatagacggaccgtataagcctgaaatgtacagatactaaacaattaacaattggcaggtatcaattgtcacttaaaattatcattttgaaggacaatataatttaatctaaatcctttgattttgcattaagaaaaattaaacctggcaagtatttagttaaagacgcatagatcatatttcctcaaaaaagttatgtaagaaatggaacatcaattggtgcaattgtttagaactcgggtgaatcaagatcaaagaaagatttttttcgaaatcacagattgcacatcgttaggctcattaaactgattatcggataaaaacattaagaggttcagataatattaaaagttaataggttgattccattcctgaatgttgtgaagagttaaaggaaattttaggaaagataattccagcattaaaagaaaacgtttgaatattttcctttgaacattgtcaattgaattgctgacgtagctcagttggtagagcagttcactcgtaatgaacaggtcaccggttcaagtccggtcgtcagctcaaaccccggaagtaatccggggttttttttatagagtaaaacaggagttcatcaatacactttgaaaaagcatttaagtttgtgtcagggggaattttcaaatgataattttcacaggggagtagttaagttcgaaatatattgttttatcaaatatcattttgcacaaaaaagttgttattttgtaataccgaaatatttcggatgaaaaattgagggttgttatagcagatttaatgagaaaagaataaccgatgacggataaatattagtgttaaataagtggatttatacaaacaattatattttaggaaagattaaaaaattataaattaaaaaaaaagcgattccgcttttcggaaccgcagtaaatgttttcacaacggaataatccttattgtgatttgcatcaaaatgttatacaaatataataatcttaaattataaaacaaatgcaatgaaaaaaattcttggaattgatttgggagtagcctcgattggttgggctatgatttctgaaaacaaaaatacgaaaaaaatacttggtatgggttgcagaattattccattaagcacagatgataataaagaatttaccagagggaacaaaatatcaaagaatcagaaaaggacgcaaaaaagatcgcaaagaaaatgttacgacagatatcggctgaggagacaagctttagtaaatgaattggcgaaacgagaaatgttagataaaaatttaacaaatttgaatcagattaaattatgggaattaagatctaaagctgttacagaaaaagtatcattaaaagagttggggcgaatattatttcatcttaatcaaaaacgtggatataaaagcaaccgatcggactcaaaactggatatggaagatactgagtatttagcagaagtaaagagtcgttatgaaaaattgaaagaagaaggattaacaattggccagaaattctataatgaattgaaagacaatcattattaccgcgtaaagcaacaagtatttcctagagaagcttatatggaagagtttgataaaataatgaaccaacagcaaaaacattattcggatataatcacggatgaatttaaatctaaactgaagaatgaaataatctattatcaaagaagattaaaatcacaaaaaggattggttagtatttgtgaaatggagaagatcactagacagactgaaaatggtaaaactttctttgtcggacccagagtagctcataagagctcacctttatttcaggtttgtaaaatctgggaaactataaataatattacacttattaataaaaaaggtgagatttatgcaattccgattgataagaagagagagatatttgaatatctcgacaacaataataaattgactcaaacagaactttttaaaatccttgaattaaaaaaagaagatggctggttagggaataaaatgttaacgagaggaattcaaggcaacatcttaaagtctgaaattcttaaaactgtatcgggattggaatttgatcatgaacttctaaaattcgatttgataatcgaacaattccctgagacaattacattcttaaaagatcgtaagactggtgaagtattagatgagcaaataaaaaaagtgatatcacctgtaattgaaaaacagaatttacataagctatggcatgttatttattctataccggattatgaggactgtgtaaatactttagtaaataaatttaacattggtaaagaggcagcttcaaaactggccaaaattgacttttcgagatttacgttcgggaataagtcggttaaggcaataagaaaaatactcccgtatctaatggatggctatggttacagcgatgcgtgtgaatttgccggttacaatccaaccggatcactaacaatagaagaaaatgctgagcgaaaactgagtgataaaattgaaaacctacccaaaaattctctaaggcaaccagtagttgagaaaattttaaatcaattgatcaatttagtaaatgcaataattgatgaaaaaaatggctttgttacaaatgaagagagaaataacggttcatttgagataaatattgaattagcaagagaattgaaacaaaaccgccaggagagggatgaaacacttaaagctctaattaagactgaaaatgaaaatgaaaaaatccggaaacgtcttgaagaagaatacaaggttagagctacaagaaataatgtaattaaatggaaattgttccatgaaattgtagaaggtacaaataaagttaatgcaacatgtatatattgtggtaatttttttggattatcggatgcattaaatggtaatgaggtagatattgaacatatcatcccaagatcattattgtacgatgattctcaaagcaataaaactttaacacacaggaactgcaattcaagaaagggcaatagaactgcattcgatttcatgcaaagtaaaggtgaaaaagcgttgaatgattacatagagagaattgaattccttttcaaaaataaagttattgggataaataagagaaataaatttttaatgtctgaaaataaaataccacaggattttatccaaagacaattaagagaaactcaatatataacgaaaaagtcgaagaaattattaagtgaagtttcaaaaactgtaaccgcaacaacagggagtgtaacatcaaggctaagatatctctggggttgggatgatgtcttattaaatattcagttaccgaagtttaaaaaaaatagtttaactgaaatgatagagtgggaagcgggagatggctctaaaggaaaagtagaaaaaattatcggttggacaaaacgaatcgactacaggcatcatgcaattgatgcccttactatagcttgtaccaaaatgggatatgttcaaagaataaatacgcttagttcaaaactcactagggacgaaatgtttcgtgctttaaagaataattctatcataactaactctaaattaagcttgttggaaaattacctgctatctcaaaaaccatttgaaacaaaatatgtgcaggaggaagcttctaaaattttagtttcatttaaacccggtaaaaaggtagcaacgttaggtgtacggaaaatcaaaaaagatggtaaaaagattgtcgtgcaaagtaatatcattgtaccacgcggacctttgagcgaggaaagtgtttatggtaaaataaaagtgattgaaaagaataaagaccttaaatttatttttgcaaaaccacatttgatatttaaaacatatataagaaaaatggttgaagaaagaattagcaaatataatggtaactcgaaaaaagcacttgcatctttgaagaaaaatccgatttatctcaacgaaaataaaaatgtcgttttagaacatgcaacctgttacaaagaagaatatgtaatcaaatatccgcttgagtctattatgcctcaagatgtaaaatacattgttgacaataaagtaaagaaaattgttgaagacaggttatcgaaatttaaaaatgcaaaagaagcttttaaagaaccattgtactttaacgtggagaaaaagataccaattaaatcagtccgaatgttaacaggcttatcaagcgttgaacccgtaaagagagatgatagcaatagggagattggatttgttaaacctggtaataatcaccatgtcgctttttatataaatgagaatgaaaaagataagaaaatagaacatatctgtacgttttggcatgctgttgaaagaaaaaaattcgggttaccggttattatcaaaaatccgaaagaggtatggaggaaaatatcagacacaaaaaacgaaattgaatacgacgagaaatttctggcaaagttaccaaaagacggatgggttttcgttgaaagtatgcaacaaaatgaaatgtttataattggcttaaaagacgatataattaaacaagcaataaaagatagaaacaaaaaacttttaagcgaatatttgtacagagtccagaagatatcatcttttaactatgtatttagaaatcacattgaatccgatattaatgactatactgaaagttcaaagttaataaaacgattttattctgtaaggagtattggtgcatttgacaaattaaatcctcgaaaagtaaaagtaaacaatttaggggagattgaattttgattaaaagaacattatactttggtaatcctgcatatcttagttgcaggaataaccaacttatagttgaactaataaataatcagtatgagatagattttacaggtttaactgaatttgataaaaagtattcgaaacgggaaaagcttaattatattgtaccaattgaagatatcggaattgttttaattgatcaccacggagttgttatttctcattacctgataaattcattgcttgagaataacagcgccgttattttttgcaatatgcaacaccttccatccgggatgttactaaatcttgacggaaattcgcttcaatcggaaaaattcagagaacaaattaattcttcactaccactgaaaaagcaattgtggcagcaaacagtaagggctaaaattcttaatcaggcggagtttttaaaaaggaaagggaaaaatgtaaaaataatggaacggtgggctaaaaaagtaaggtctggcgacccggataattacgaagcagttgctgctcaattctattggaaaaacattttcccgaatcgacttgacttctatcgctcaaggattggtccgaacccaaataatctgcttaattatggttatgcagttttgagagcaataaccgcaagaagcctcgtaggatcaggattattgccgacattgggaatattccataaaaataaatataatgccttctgtcttgcagatgatattatggaaccataccggccatttgttgatgcaatagtttgcaatattacaaatgacggtgaagaacaggaagaacttacaacgatagttaaaaaaaggttattagaattaccggtagctgacgtttttatagacaaagaaaaaagcccattgatgatagcaatgcaaaaaacaacttcttcattgagtaaatgctttagcaataaaaactcgaaaataaattatccgattttcatcccaatttgtcatcagtcatgaaacgtttaaatgaatacagagtaatgtggatattagtgttatttgatttacctaccgaaacaaaacgcgacagaaagaattattcgcaattcaggaaagaaatattgaaagacggtttcaatatgtttcagttttcaatatatctaagacattgtcctagcagagaaaacagtgaagtacacataaaaagggtaaaatcactattgccacctcgaggacatatcggaattctgagaattacagataaacaattttcagaaatggaaattttttacggaaagaagaaagaggggaaaccaccactaccatcacaacaactagaattgttctaacgatttatattttctaaaaaaaaaccgcagcaaaacgattcactgcggtattttattgacgatttttttcccttggaaaaattacgtaacactattctattgaatacacttagacgattaagattgtaatcaaaaatcgtcaaataacattttgaaagcaaatcacaactgttctttgccaaatattagctccagttaaattgtaatcaaaaatcgtcaaataacattttgaaagcaaatcacaacatgaatgacttgggaactgtgcaatagcttattgtaatcaaaaatcgtcaaataacattttgaaagcaaatcacaacataaggacaataaaatatgacgagttaatattgtaatcaaaaatcgtcaaataacattttgaaagcaaatcacaacatactaagagcagttaagagaaaaggcataattgtaatcaaaaatcgtcaaataacattttgaaagcaaatcacaactatttattggacggcggagtctatgaatgaattgtaatcaaaaatcgtcaaataacattttgaaagcaaatcacaacatattgtcgaacgtaagcaacgctattccattgtaatcaaaaatcgtcaaataacattttgaaagcaaatcacaactcaatcttgaacattccccaaagtcgtacgattgtaatcaaaaatcgtcaaataacattttgaaagcaaatcacaactaacatacaacgaaataaaagaactcgcagattgtaatcaaaaatcgtcaaataacattttgaaagcaaatcacaacatcagggtatcagttacaagacatattagcattgtaatcaaaaatcgtcaaataacattttgaaagcaaatcacaacgctgcaaagtcgtacgatttaacaaagcaattgtaatcaaaaatcgtcaaataacattttgaaagcaaatcacaacattagttcaatgttcccttgactgatatgattgtaatcaaaaatcgtcaaataacattttgaaagcaaatcacaacgaaaaaatcgtaaagacctgcttgccgggtattgtaatcaaaaatcgtcaaataacattttgaaagcaaatcacaacgcgggtaatgccggtaagttttaaaaaatattgtaatcaaaaatcgtcaaataacattttgaaagcaaatcacaacacgttgacagatatactttcaattcggattattgtaatcaaaaatcgtcaaataacattttgaaagcaaatcacaacccgaagctgaatagaattactacagccaccattgtaatcaaaaatcgtcaaataacattttgaaagcaaatcacaacctgcccatatcttttctctaaatctacgttattgtaatcaaaaatcgtcaaataacattttgaaagcaaatcacaacctatagaggctcattttaaggatgaggtatattgtaatcaaaaatcgtcaaataacattttgaaagcaaatcacaacgctttggcattagggtttacaacgaggaaaattgtagtcaaaaatcgtcaaataacattttgaaagcaaatcacaactagttcggttttggctataaatatcttgtcttttggaaaacccacaacaccatccttagcaagataaccttcaggagtcattacctgtatttcagctatcttcccgcttggcgttcttatctcaataagtctctttggataaccaagttctgtaccttcaggaaaaaactctgaacggtctaatgtggttgaaaacctcctttttatttcactatacagaaaatcagcatccttattgttgtccacaatgatgttcacccttgcaccatcgcctaatttattcacttgcgattcgtaccatcttacagactttatagatgctcttttagaacgcttaatgcctgatggggaaacaaaagcatttttaacaataccaaccaaatccttcgctatggcttctatttcaacctttgcacgttcataacgccccttgtcagtagtgaaaaataattcgagaggtttggctaattccttttctaacctgctaatctctcttctttcctctaaagataaaatagcaccatcaatctgtttagtccatagttcagtaagccgttttcgctctggagaatctaacgtttctttgaacttttggtaggcttcatttctggctttagcctccctaatggcattatgaaggcttgacccactttgctgttgttgtaaccttgtgccatcaattcgttccaaaatttttccccttcgctcagcggtgaggtattctgacctgattgcgtttctttcttttgatttgatttgtccgccatattgtttaaatttgtttataaagttaactaatttctgtttaaattctacatctccccctttagaaaaatcaaataaatgcactgtttttcctgtaagggtatatccatcttgcacaaaccctgcttctgtaagagacttgaatgccagtgccggattatccacttccacttctactttatctgcgttgtggccatcgctccctgattctataaacatacccgctataattcgagaggtttggctaattccttttctaacctgctaatctctcttctttcctctaaagataaaatagcaccatcaatctgtttagtccatagttcagtaagccgttttcgctctggagaatctaacgtttctctgaacttttggtaggcttcgtttctggctttggcatccctaatggcattatgaaggcttgaccttccctgcccgtgctgtaaccttgtgccctcaattcgttccaagatttttccccttcgctcagagtcgatgtattctgacctgattgcccatgtttcttttgatttgatttgtccgccatattgtttaaatttgtttataaagttaacatatttctgtttaaattctgcatcttcccctttagaaaaatcaaataaatgtaccattccccctgtaagggtatatccatcttgcacaaaccctgcttctgtaagagccttgaatgccagtgccggattatccacttccacttctactttatctgcgttgtgaccatcgctccctgattctacaaacatacccgctatggtggaatcttgcacttctggtgttaatgcccccattactattgtaatcaaaaatcgtcaaataacattttgaaagcaaatcacaaccttaatacattttgattatgacaggtattgattgtaatcaaaaatcgtcaaataacattttgaaagcaaatcacaaccctatttcaggtatatccatttgggataatattgtaatcaaaaatcgtcaaataacattttgaaagcaaatcacaactattattagacgatgacacgaactctaattattgtaatcaaaaatcgtcaaataacattttgaaagcaaatcacaacgaacaacccataattaaaagcgttataaatattgtaatcaaaaatcgtcaaataacattttgaaagcaaatcacaactatccctataagagtgtccagaatccgctcattgtaatcaaaaatcgtcaaataacattttgaaagcaaatcacaacattcgcctgcgcgtttgcgccattcaacaaaccgttgttgccctgattctggtttcctcctcctccgggaggcggcaagggacccgtgaagagccatgcctgtccgctgttgtatgtgatggttcccggcggcacgctgttcccaagcgcggtcgtggaataattcgggagcacgaggcctttcgttttcacgatgaagggggaggtgaaattcagaagaagagaagcgccgctcgcggaggggtagaatacattatttccacctcttatataaccaccatcaaccgtagagagactcgcacctggtgctgttgtgagaaaccctgtggtggtaagtcgtgcacttttcgattgatcaatatctccgacatccaccggcggagtggtattgcctccggggaattgctgcgtcggaggagtccaagaattgctccgctgaccaaacgcttcgcctgcggtgaaaagaaccgccaaggagagtacgccgactgaaacgaacaaaaaggcctttttgtttttcatagctttacgattattatagcaaattcgcaatccccccgctggggggataaatcaaaaaaagcgaaaacccctcaaattgaggggtttatgtattcataaaatcttacttatttaactaacatcattttccgcgtttcagtgaaattatcagtatccaatctgtaaaagtacacaccgcttgcaaggtttttgccatcgaatccaacttcatgcattcctgcggtcatcttctctgcgaccaaggtttcaatttctcttccgagaatgtcgtacacggtaaggcgcacaaatcctgatttcggaattgagaaagaaatcttagtcttcggattgaacggattggggtagttctggtagagaacatatccctcggggatattattctgattaccggaaacaccagttaggagacttaatggatatctcttgacccatccgtaggttgctccgacttggaaaaaactttttccaagaacgaaaaggtttccggcagagtcaaaggtgagagcttggatgggattcaactttgcagtagaatcatggaccactttaaatgcttgtattgaatcgccatttaaccttcttgcgagcacatatcccgcagagttgggggtgttagaaagaaaatctctttctgatgagcccaccaggattactcggtcatgagcggtgctgacgcgcagcccattcacaaagttttcctgatttgcatcagtggatccattcggagccaaatccttggtccaggtggtgtccccgttcgaattcacccttaccattctaaatacccacatcccgtttatctgagcggtcatgccgatataggcattaccattcaaatcgatgtctcccattgctcgggaaacgaccggggtgaaaatcaccgtccaaagctgggctttggtgcggagatttaccttggaaatataacctttattgtttcctccggaaaaacacgttccgaagagccataaggtatctccaagtactctgggatccgcatagtataccgtcatacccgaagggatggcggtgaatgaggttttcatcaccccattctcgtcaaagataaatccctggcttccgtttcctatagaggtagctatgacgctatccccataacttcccagcataacccgggagggaagtgatacggtgcttagggtatctccgttttgagaccaaaaccggagatagtgggatgtgcccacattatatctttcaacaaacttgtccttcccatttaatgttgcaagggagaaaaagcttgtgatgcgggtcggtgctgcgtcttctttcaaccacaggatttgtcccgaaggacttatctttgtggatataaggtgactcaccgaagcattgccctcatacccggtgatgaaaagatttccgccattaccaattgcaatggagaagaaatcgtttacattataggatgggtgcatattaatctcggttgtccatacctggctttctacagctgaggtaacaaccatgatggcaaatattgccaaaataattgatttcattttgcatatcctttctgagttactgctttatttttatttaataaaaattattttaattctattctgtctatattattccaccctgaaagaaagttttatgagctggtatgtgaataggggtgataaatctacttagatttagggtccttccagccataccacatgaaccggaagtcaaatatgcttcgccccgatggtgaagtcttaaatttcctgtaaaaagattgccggtgtaaaaaatcggcataaaaaaacggtgctgcttttcttaaatttgtataaaccctttttgtaaatacaaattaaaagaaagaacaacaccgcatgggtaaattaaaaccatcaacacaaattagcaatgagttaattcaactcttgcttgagagtcgtaacaattctgagaatatcatctcggagttaatcagaaagaccttaaaaaaggaaattcaattaattcttgaagaggaagtaaaaagttatttaggaagggattattaccaacgaattgaaagccctgagaataaacaagggaatcgtcaagatcatgacgattacgattccaatgactcagctttgacttatgaaaaatccgctaaaccgatataccgtaacggatatgagaactatacaatcaaaactcaggtaggcaaaattccgatagacgttccccagttacgcaacaccgatgagccataccgaagtgtgtttatgcaaaacaacaaacgaatttgtcctgagtttgaaaagatgataacccagatgtatttgagaggatgttcgacacgagaccttgagaaagtattggttgaccaaaccggatcaccaatcttaagcaggagttcggtaagcatgatcaatcaaagtctccagagggaatatgaagaattttcaacacgagacctcagtgatctcgacgtggtttatttatttgtagatggagtttatgaaagtatgcgaaaacaaaagagcaggaaggaagctatactatgtgcctgggcaatactttctgacggaaccaaacaaatgcttcatctctcattaggtaataaagaaaacacacagacatggaaagagtttttcagacacatgcttgacagaggattaagagaaccactgcttattatcagtgacggttcgacaggattaaaaaaagcaatatcggaagtattaaccacaacgaaacatcaaagatgtatagcccataagctacgtaacatagccaacaagttacctgatgaacatagaagcagagtgcttgaaaagattagaaacgtttattaccagacaaataaggaagtagccgagacatttccaaaccgggttcaatacaaatgagtcagcaattaggcgacatatcattaaaaccatcttcacccatcgagagctcgatatatacgtcagtaaccgatgcgggagtttcctcgttgttcccccaaccgccggtctgggaattatcgcaattgtagtcgtaggacgggaaattgtaatcaaaaatcgtcaaataacattttgaaagcaaatcaagacattgatagttgccggacttgatgccttcaaaaaagtcctttgtattaaagaggagttcaagtgatatgtcgtcaagttttgccaatgtgttgaaatattacaataattgtattaagttatagaattattgaagtactgacatatattgttgtgattcctattatggtagctatagtcgctcttctatattcattgaatcgaatgacttatggtaaaaaacctattgactggtcagacaaaaccccgctcatcctttgaattgctccactacaacaaggattgatgccagcagttgcaagcaatcccgatatgtctggtagctatttactgggcgcgtatcgtcaggggtttttataccaacatcagcttgataccgcaacaataaatttgacgatgtctttttatatcagcagatcgccatgcccggcaaagcatataccgtccggctcacaccatcattgcatggtaaatcgatcagggttttgaagcgtggcacgacaactaagataaaactccttattaggtttaaatgtattagcaattaaagatggccgacacgatcaggtttatacttaacggaaaattacgggaggtcgcggatttgtctccgaccacaaccgttctgcagtatttgcggaccgtcgaacatttaaccggcaccaaggaaggctgcgcggaaggggattgcggcgcctgcacagtcattgtcggtacgctggcaaatggcgcaatcagatatcatacggtgaatagctgtattatgtttttgcccgtgctggacggcaagcaccttattactgtcgaatatttaaaggtactggctggtggcagtcttcatccggtgcaacaagccatggtggattgtcacggctcgcaatgtggtttttgtacaccgggctttgtcatgtcgctggtcggattgctcgagaacacacccgttccctcgaaggaagatattcaggattcacttgctggaaatttatgccgttgcaccggttatcgcccgatcctcgatgccgcaagcattgctgcccgcaaggggaaagttcacttgccgtcagatgcgcagcttcttcgttcgctgcaacgagatgcgctgttgacctatgaggtgcaagggcagaaatattttgcgccccggacggcggatgaacttgccggccttgttaccgaaaatcctgaggcgatacttcttgccggcggtacggatgtcgggctgtgggtaacgaagcagcataagctccttatgaccctgatttacacgggcgccattgcagaactgcatgaaataaatgaaaccgacggcaatctggagattggcgcagcggtaagttatacgcaggcatttgaaaaactggcggcttatgatgaaagcatggaggtgctgctgcagcgctttgcctcgacccagataaggaattctggtactgttggcggcaatattgccaacggttcgcccatcggtgatggcatgccgccattgatcgctctgggcgcgaagctggttttgcgctctgctgcgggcgtgaggatgattgctttggaagattattttatct

SEQ ID NO: 1733 - DNA, 23726 bp, synthetic construct
  misc_feature 1..23726: note = Synthetic
  source 1..23726: mol_type = other DNA
aatcgcttcttccattcctgtagatatccaaataatggtaaagctgattcctataataatggttattacagctgctaatgcatgaaagcgtttccagaaaagtgctagtaaaataattactgaaaaggttcctccaatgccagcccaaacatagccaactaaagtgtaaattaaattcgtaggtgccaaaaaagctgctagtaaagctaatgctgcaataattacgagaaccaacctagagataaacattgagtaagaatgtttttttagaaagtatggctttataagcgattctgaaagttctgtagctgataatatcaataatgaatcggctgtgctcataattgctgcaataacacctgtaattaaaatagctgcaacagtgggtggaaacaaataaagtaataattgtggcattactttttcggcatcggccaagccactgcctacaggaccaaaaaaggctatgccaagccaaccaatggttaatgcgcccatatatgcaataatcgtccaaaaaatgcctacatttcgagcaatttttgcatttttatgatctttaatagccataaaacgcatgctaagttgaggttgtcctcctaaatatccaaagaaccacgaaatgccacccaaaaatgttcccaaagccatgccattgccggtgtcgccaaaccatgataaataagaaggacccgccttttgaagtgcttcggtaattgaaacagcataagaattcggattgtgggtcaattgaatcaatcctgctataggtgcaaaaattaaaattgaaatcataatgagcgactgaacgacatcggcataaactacacttttaaatccaccgtaaacagcgtaaggaacaattattagggctattaataccattcccagtgaagcatcaatgctaaataaggtgttgaatgttttgcctccgcctaaaaattgagctcctacataaaaaaagaagaaaaatacaatgaccatactggcaactaagcgtagtaattttgcatggtgtccaaagcgtttggcaagataatcggtgtaggtttcggcctgatatttttcggcttcgttgcgtaaacgccatgcaagtaaccaccatgaggttacgatacctaaaacacagccaacggctgtccatatgctcgaaagtcctaccgcataagcataaccaggtaatcccagtaatgcccacgaggattcacctgccgagcgctccgatagagcagcaacccaacccggcaaagaacgaccagcaatagaaaaatcgctctggtttttgacttttcgaccttgatataaaccaaacaataaaatagcaacaaaataaactaccagtacaatgatgtattgaacttctgaggtcatatttattttttgtgtgaagatatgaaattttcaaatacaaaaaaaggctgtccttttaatgcagcctcttttattacttttatcttttgcagacaatttaatttactccttgaagaaattcgtttaattcgtcgattgacgattcaaacttaaatccttcgttaactttaaaataattgtttttatcgtaggtatatttatatgcatatttagcaaactcgaggcgagagctttcaaacccaaaaacatccatgatttcttttacctgtgagcttaacatgcagttggagcttactatttgtttggctgtagtaagttttgagtcttcgaacgatttagaagctattgattttttcgctgattgaaaatcgacatcgctcataggattagcacaaccaccgattggttgagcttgaacttgtggtttgggtttaatggttgtttgttcttgttgaactggttgacttacagtagtggttgttgtggtagttgtagttacagccgaagtttgggtattcgtttgaatgcctggcatatgtatattcatgttaacgccatcttgagtttcggtaacatttacacccacacccatattaacgttggtattagtggtagggttggtaatggtggtggtttgttggactgtttgcgtgttggtaggttgtgtttgtacggtggtttcagttggctgagtggcgggttgggtaggcgaatttgcaatattagacgaagaaagaacttcccaagtagcatctctgttgcgaatttcgtatttacctttattatttttgcgtatcatatacttaacgtaacaactattgccattgacatctacaacttgaaatttatggtcaatagtacctagttttgggtcttcgaaaataattttggctttaccccatttcatttcaacggggaatttttcgacattatattgaggttctttatttatttttttaccgtcaattacaacccaaaatttatcgccatcttggctgtaaaacgataaataaccgctttgagcgttagcaaagctatataatactactaaagcaaataatacaatggttctcatattcaattatttttttatttctaattcttgaactttaactttttgtggagcaaaatttatttgacgcccgtatattaattttacatctaaaactttttgtttaaattctggaatagcatcggcaaaatcgaggattttatatgccaattcatcagggcggtctttataagttagattaagtttggtataattatcaaagcttacgatttctatttgtcctccgaaacgcgaatcggagagcattttgtttctaagctctctgaaatcgcggaaagtgcctatagaataaaaacgcaattcgaatggagtgccgttgtttacccagccgccaatatatgaattaaacaaatataataatttggtaatgcctttatttacgccttctttaatattttcgtacattgtcgatttagcatccattccgcttttccagtcgctttctaaggctatagttcctaagccctcggcagtacaattgtcataagctttagcttcaataataactttagtagcagtacgcgtatcgaatgcttcgcttcttgaagaggtagatatattgctgataagaataataaattgtgcatcggctttcataccaatgtgttgaacataagattcctgattggtttcactgttttgataaataccttcggcttcttttaacaattgtgaggcacgttctttttcgatataacgatatttgcgttcggcaagaaattcattgatacgttctacagcatagtcgtaatatggtttttcttcgggttttactttgcgggcatcgtacataaccaaaaagcgaactccgccaattgctttcgataagagttgcatatcggcttttaaaggatttaagcttacttttgcttgaatgataatttcatatcgatcggggaagggtgtttctttaataacgttgtatgaagctacgtaaccctcggttttggcagaaacagcatcgcgaacaaccataaaattttccatgcttgtttcggagcttatggctacgcctgcagcttggcttactgcatttcggagagcatcttgtaatgcatcgtcgcgttttaaacctacgcctttggcttcaacttcttttaagctgttatcatttgctagcgatgcattcatggtaactgaacttggttgagttgattgaacaggttgagtagcgttaggttgagttgtttcggtactggttgattttgattttttggatttctttttttgagcttctacagggttaaaagctatgattgacacaataaatgtcagaaatattaaacgtttcataatagcaaaatatttttagattaacatcattaagaacttaccaattttaccggcgacttgaccaattttttgccagtttacttttttcaagcttttgttatcgataaccaatttgcccgattcggctttgatgacgtttaacacttctactccttttttgaatccgatttctttcataagttgttcggtagtattgagtaattgaggaaacttgcctgtttttgggtcgtaaagtttagtcatatctaacacaaggttattgttttcgtcaactataacggggaacatactggggtcgaattttttaccattcatattgaaagctaagccttgcaatacttgatcttttatttcgggtggtacttgattaacaacgtcgctgatgttagcggtcttttttagagttggaatatcgctatagatagctggagcaattccgttttgttcgtatagttttacacgcattcttacttcaatcgtgccatctttttcaatgggttcgcctacgagttgagcacctttgataacaccgtcgatacgggtgtaaatgtagtcgcgggtggttatcatatcgtttacagtagtttcgcttgtaacattaacgcctttaataatttcaagcaaattgcgttgagcatcaactatagcgcctctttttgccataagcttggcttgcgcagcatttttaaaacgttcattatcgataacggaggcacctttggcttcaatgtattgttctgtccagttaattgaaccattgggtttttcttggataatgggtttcgattgtgcaattaattgttctatatttataggtttggcatcaatgggagcggctgtttgaggtttttctggttctatcggttttgaaacggcactttcgggttgggcttctgctggtttcgattcaacgggtttggcttcggttggttgggtatttatgggttgagtttgcagcgatggacttgcttctttttgagtttgcgagtttacttgttcggttttttctttcttattttttttcttgttttttttgttttgagcttcagaaatttctggtaaaacaagcaataagctaactagtaacaaaataaaagttttcataaaaattatttttagtttaacaaacggtgctttttcaaaatttatgccatgaaaataagaattttgacaaaggtaatataatttatcgaatttcaaaaaattaaaagagttgatttgcttcgtcttttaaaaaatcaatagcagttctaatgggtgtagggtttaataatagccaatgagccataattttttggcttaattccatgtgaggagcattagcatctacttcttcggcagcaagattaataattttaataacattttcttttgcattcacaattacatcccatgctggttttgacatgtataattgttgagctaaattatgttcaaattctgctctaataagacttagcatatccatttgcagttgacgagcgttcatttggggtgtttgtaggcgaactattaacgaattgggcgacatgcgttctagaaataaaatcatacgctcgtatgcttgaaggcgaaggggtatggtaactttcatgtgttcggctttaaattcccatgtgcgtttattgcgttcgttgtcaaaaaatagttttaataaatagtaagcagtagcaaacagtattgctccaaccattaccattaaaattaccgtagcccattcattcatagttgataagttgttaaaaaatttcgcaagtttacacaaaatttcgcaaataatttcatacctttgccgtatctaaatcattttagtatatttatttaatggatacagaaataagttttaaaatcaatccaatggatttaatagccgaccgtgtaaaagccctttctgaatcgcaaactttagccatgactcaaaaaagtcgtgagttaaaagcaaagggagtagatgttatcaatcttagtattggtgaacctgattttacagttccacagcacataaaagaagctgctaaaaaagctattgatgataattattcgtattatccacctgttgctgggtacgacgatttacgaaaagcaattgtcgataaatttaaacgcgataataatcttgagtttaagcctgaacagattgttgtttcgaatggtgctaagcattctattatgaatgttatacttagcttggtaaatgctggcgatgaggttattattcctgctccttattgggtgagctatatcgaaatggttcgtttggcaagaggtaaggcagtcgttattgagtcgtttatcgaaaatgattttaaagttacaccggagcaaatcgaaaatgctattaccgataaaacaaaaatatttttatatagttcgccatcgaatccaacaggttcgttatataccaaagatgaacttaaggcatttgcacaagtatttgcacgtcataaacatgtgatgattgtttcggatgagatttacgaacatatcaattttgttggtaaacacgaaagtattgctcaattcgaagaagtacgcgatcaggttgtggttattaatggtgtgtcgaagggctatgctatgcccggatatcgtattggttatatggtagctcccacttggttggccaaagctgttatcaaaattcagggacaaatgacgtcttcgccatcatcaattgctcagatggctgcactaggagctttgacgcacgataatagtactatttatgctatgcgtgatgtttttaaacaccgtcgcgatttaatattgtctttattgaaagaggttcccgatatgaaaaccaatgtgcccgaaggtgcattttatgtttttgccgatgttaataattatatgggacgtacgaatggcgaagttacaatcaatgacgataacgatttatgtatgtatcttctcaacgatgcgaatgtcgcattggttggaggatcggcatttggaacacccggatatatccgattttcgtatgctacttctgacgaaaaaattattgaagctgtaaaacgtattaaagcttcgcttgcaaaactattttaataaaacaagctcaaccattattttatggaggcactagtcaaggtgcctcttttttatttctttttagaaaaaatcaatagcaataaaaaagtgatacaaccatttaccaatataagctcaaaaccaaatttataatttccaaaaagcgaggttgaataacgatttaataaataacatataatcggcgataaaatagcaatataaggcactagacgatcgattacgatacgacgtgtaagcaagccaaatgcatataatcctaataaaggaccatacgtataacctgcaaccgtgaacaattcgctaattacagcttcgttgttgataaagctaaaaactactactataatgtataacaaggctgcaaaagcaatatgaacttttattcttgttttttttatgtttgcttcgggaagattttttcgggttaaaccgagtatatcgatgctaaaaatagtggttagcgaagtgagtgctccatcggcactcggaaaggctgccgacacaacaccaattaaaaagatgatagctgttataccacctatatgttgtagggctatgataggaaataaatcgtcggttttatttggaattgcaataccttggttttcggcatagatatatagcaaagcacctaaaaagagaaacattaaatttacaatggctataactaaactataactgatcatgtttttttgagcatcgccaaccgatttgcaactcaggtttttttgcatcatttcttggtctaaaccggtcatggtcaacgttataaacatacctgctagaaattgtttcagaaaatgacgcttatcagaccagtcgccccagaaaaaccaatcagacatgtgcgattgtttaacctgagaaattaaatccgcaatagggctgtttaatgcttgtgcaatgtaatatatggtaaaactaacagctattaacatgcctaatgtttgtaacgtatcggtataaaccaaggtttttactccacctttataagtgtagagtagcatcaaaaataaaaacataagggctgttatactaaaagggatgttccatgcatcgaatacaaaaatttgtaatacgtttataacgatatacattctaaatgcagccccaaggcttcgcgataaaataaaaaaagctgctcctgttttgtacgaagcaacgccaaaacgctgatttaggtaagaatatatagaaggtaagttgagtttatagtataagggcaataatataaaagcaataagaaaatatcctgcaatataacccataaccatagccatatacgaaaattgagtagtgccaacccatcctggtaccgacataaaggtaattcccgacaacgaagtgcccaccattccaaaagcaacccaataccattgactgcgtcgattggcattaaaaaaagtatgcgaagttgccccacgcgaagttaaccacgctatgagcattattacagaaaaatacaataagaaaatgataaataactcccaagcattcatgagcagttttttttgcaaagatgacgaaaaaagctggtaatacgatgtaaaaaattaaaaaataaaaacaaaaatggctgaagtatttgctttttttcaaaatttttataattttgattacggaatatagctagattgagatgtaaaaaaactcaggtttaataaaatgagttagttatatgagcttaattaagttataaaaaataaattatgataaaaagaactttatattttggtaatccaagcattcttagtcttaaaaatgaacagcttttattaagatttcctgaaattgagaaaaatagtgagattaagaaaatagtcgaaaataaaggcgaaattacttttccgatagaagatctaggcatgattattttagatcatccacaaattacaatttcacatgctcttatttcaaaacttataagttgtaatgttgctattgttagttgcaatgaaactcatcatcctcatggtttgttattagccttacattcaaatacgttacaaagtgagcgttataaagaacaattggaagcatcagaaccattaaaaaagcaactatgggcacaaattattcagcaaaaaatttggaatcaatcgcaagtactcaaaaaaataaacgaaaaaaatgatatagattatttattaaagttaagtaaaagtgtaaaaagtggagatagtgacaatcgcgaggcagttgcagcttcggtttattggtcgaaaatattttcttttatcgataattttactagaaatagagacggtcttccgcctaataatatgctaaattatggttatgctattttaagagcaaccttagcacgatgtatagttgaggctggacttttgcccacattaggtattcatcatcataatcgttataatgcttattgtttagccgacgatcttatggagccttatcgaccatgggtagattatttagtttataaaacaattgttaaatttggtgtagttaatgaactccataaagatgttaaaaaagagctcatgtcaattaattatgtcgattgtaaaatgaatggtgaaattagtccattgcatattgcagctcttaaaacagctcgatcgcttcaaaaatgctttgaaggtaagcaacgaaaattatctttacctgaatttacataatattataaaaattaatttatatgttaaaccgtttaaatgcttatagaattatgtggcttatggtaatgtttgatttacctactgaaacccaacagcaacgaaagcggtatgctcaatttcgtaaaaccattatgagttttggctttaatatgtttcagttttctgtttatttaagacattgtcctagtagtgaaacagccgatgtacaaaaacgaagacttagaagtattgtgcctgatgaaggtgtggtgggtgttttagaaattacagacaaacaatttgaaaaaatggaaatttattacgggaaaaaagccaaacgacctcctgaaacacctttacaactcgaactattttaataataaaaaataaaaaattagttaaaagttgttgttttttttcataacttagcaaaaaaataaggcatataatgataagtaaaacaaaaaaggcgattcttttttctaagaaccaccttaaatgttttcacaacggaataatccttattgtgatttgcttacatttaatgcaaagatataaagaaaaatattaaaatacaaaaaatatggcaaaaaaaattttaggactcgatttaggtgcaaattctattggatgggcattaatagaagaaactgaaaataacagtaaaatcattgctatggggtcgcgaattatacccttgaacccagatgataaagatgagtttatgcaaggaaatgctatatcaaaaaatcaaaaaagaactgaaaaacgtacacagcgtaaaggttacgatcgataccaactaagaagaaaagcattaacggaagtgcttcttaagaataatatgttcgatccgaatcttttcaatttaaaacaacttgaattgtgggggcttagggcaaaagcggttaatgaaaaaataagtcttaccgaattaggtcgcatattgtatcatttgaatcaaaaaagaggctataaaagtcctacaaaagctagttcgctcgaaaaaaaagaaaccgaatatgttcaagaagtaaaaaatagatatcaactcattaaagagcaaaacctaaccattgggcaaaaattttacgaagagttaaaacaaaatccatattatagaactaaagaacaagtttttcctagggaggcatatatcgaagaattcgataagattattgaatgtcaaaaaaaatattatccacatgttttaaccgaagagcttgtcaataaaattaaaaacgaaattatttattatcaacgaccgttaaaatcgcaaaaaggtttagtttgtgtatgcgaattcgaaggaagaaggattattatcaacggtaaagaaatttttgtgggtccaaaagtggcacccaaaagttcgcccatttttcaaattaccaaaatttgggaaactatcaataaccttaaacttaaaaataaaaatggagaacaaattaatatccctattgataaaaaaagagctatttttgaatatttagataaaaacgaaaaattaacaactaacgaactatttaagattcttgaaataaaaaaagaagatggatggtatggcaataaacaaatcaataacggtattcaaggcaatattacaaaagtaaaaatacttaaagctctggaagggcaagaatttgatgcccatattttacaatttaatattgaaataaatgagttccatgaggaagttagtttagttgacactaaaacaggcgaatatattactactaacaaaaaagtagttttacataatattgaacaagagccattttaccaactttggcacaccatttattctattgatggcacacaagaatgtaaacaggcacttattaaaaaatttaatctttctgaacagctagccgaaaaattagccaatatcgattttaaaacttcgggttatggcaacaaatcggtaaaagcgatgcgtaaaatattgccatatcttatggatggctacaattacagcaatgcttgttctttggctggatataatcattcatttagtctgacgaaagaagaattgttacaaaatcaattaaaagacaaactcgaacttttgcccaaaaacagtttgaggcaacctattgttgaaaaaatattaaatcaacttatcaatttggtaaacgaaattatcgacgaaaataggggttgggttacacgacaagaccgtattagcaacaattttgagatacgagttgaacttgctcgagaactcacatcgagcaaagaagaacgtaacgaagcatttaagttgcaacgcgaacgtgaaaaacaaaataaaataattgcagaacgactcgaaaaagaatacggattaaaacctacacgtaacaatattattaaatggcgtttatttcatgaaataacaaatgaacaggaggcgcgtattaatgctatttgtatttattgcggacaaccatttggatttagcgatgcattaactggaaataacattgatatagaacatattattcctaaatcgctattattcgacgattcacaaaacaataaaacattgtcgcatcggcattgcaatgcagcaaaagggcaaaatacagcctatgattatatgaaaagcttaggcgatgataaatttaacgaatacatcgaacgagttgataaactttttaaagataaactcattaccaaatctaaacgcgataagcttttaatgcctgctagtaaaatacccaaagattttatcagtcgtcagctaagagaatcgcaatatattgctcgtaaagctaaacaaatacttggtgctatttgttacaatgtttgtagtacaagcgggagtattacagaacatttgcggagaatttggggatgggacgatgttttaatggaattgcaactgcctaaatatagagcagtgggtcttactgaaattatagaaatagaaatagatggacaaattcaccaaaaagaagttattaaaggttggacaaaacgcgacgatcagcgacaccatgccatcgatgctctggttattgcttgtacacagcaaggatttgttcaacgtataaacactttagcatcgcaaacgaccaaaaccgaaatgttagcagaacttgaaaaccaaaccgaaacatataaaaagaaattaagtttactcgataaatatcttatttcaaaaagaccatttactacacaacaggttaaagaaaaggtagctaatattcttgtttcttataaagcaggtaaaaaagttgctacttatagtgtacgcaaaataaaccagaatggaaaaaaagttatagttcaacaaaaaattattacaccacgcggacctttaagcgaagaaagcatttacggaaaaattaaaattattgaaaaagataaagatgtaaaatatttattcgaaaattacgaacttattataaatcagcatgtaaaacaacttgttttggaacgtttacaattttatcaattcaattctaaaaaagccttagcatcgcttaaaaatgcacccatatacctcgatcccgataaaaaagttaaactcgagaaagctcattgctacaaagaagaatacgttattaaatatcctctacaaacaattaaacccaaagatgccaattctattgttgataaaaaaattagagagcttgttacacaacgattagaacaatataaagataaagaaaaagaagcatttaaagatcctttatatttagatgataaaaaaacaatccccataaaaaccgttcgatgttttactgggcttacaaaagttgagcctattaaaaaagacgaaaatggtaacgacattggctttgtaaaacccggcaataaccatcacattgcaatttacaccgatcaaaatggtaataaatacgaacacgtttgcactttttggcatgcagttgaacgaaaaaaatacggaatacctattattatttatgatacacaagaggtgtggaataaaatattaaatcaaaaccattcttttccacaaagttttattgaaaaactacccaacgaccaatggacactattgtttagtatgcagctaaacgaaatgtttttattgggtttaaaaaacgaagatattaaacaatgcatcgacacacagaactactctaagcttagcgaacatttatatagagtgcaaaaaatagctcaaaaaaattatatgtttcgacatcatctagagacacaaataaacgacagtgccgaagctaaacttagcaaacgtttttatttaatacaaagtattaacgcattatatgatttaaacccgattaaagttaaaattgatttattaggtcaaatttattttttagacaatatttaaagcataaaccaataattaatctaacatgtttaaatataacaatataagtaatgtaaagcgatgaaatagtggcatattataaaaaataaattgaatatttattttcaaatgtaatgcgtcctttaaaatattaccacatatacaaccatgccaatgggtttgaaaacatctttatagaagaacgaaattttcgcttctttttagaaaaatatcaattttatattttgcctattgccaaaacgtttgcacattgtttaatgcccaatcattttcattttttaataaaaattaaagattaagaagagttgaggaaggtgattgaaaattctcaaggtttaactggtacaaagcctggcaaaaccttgagagtttatcaggagagagggatagggtaattttcgatagttatatttcgcaatgatttagcaacctttttaactcttatacaaaatcattcaataaagtctataaccgtcgtggaaatttatttgtttctaattataaacgtaaagaaattacttcggaagaatatcttaatcaggtatttatatccaaaacaatcctgtaaagcatggatttgtaaaaaagcccgatgaatggaatttttcgtcatataacgcttatgttcttgaagaagaaagctttatatccaaaaaactcatatttaactacttcgatactatcgaaacattgaaaatagctcatttagatagcctttaccatacagaagattatattttagaacactaaccagttatataaaacaaatagtttaaatccaaattaatcaataggagtttcgtctcgttattaaataacgagacaagacgaactacctgatttagtttgcgaaatctcgatttagtgattgtttcaattccaatttatggaattgattacaagaactttatcgtttacgcatttctaatgtgtaatctgggttaaaaacagaaataaaaaaatcccgcaatcgcgggattttttggttctttttcagttttttttctttctgttttttacatattttcagccactggtgctaattttagctgtatttgctgaaaagaacctatcaaagatacaaaaatgtaagcaaatcacaaccaaaaggcagtacagcagaaagtggtgtatgctgaaaagaacctatcaaagatacaaaaatgtaagcaaatcacaacttagacggtattatttgcagcggtttgaaagctgaaaagaacctatcaaagatacaaaaatgtaagcaaatcacaactttgaagcagaaacatttttaaataatttagctgaaaagaacctatcaaagatacaaaaatgtaagcaaatcacaacaggtatgaagttaattgaatgataaataaagctgaaaagaacctatcaaagatacaaaaatgtaagcaaatcacaacattggattatgtctgtgttcaggatacaaagctgaaaagaacctatcaaagatacaaaaatgtaagcaaatcacaactaataaatttttaaaataaaaatataaatagctgaaaagaacctatcaaagatacaaaaatgtaagcaaatcacaactatcgttcttgcttttgttaatgttaatgtgctgaaaagaacctatcaaagatacaaaaatgtaagcaaatcacaaccattgcaatcgatgaaaagggcgacgtaatgctgaaaagaacctatcaaagatacaaaaatgtaagcaaatcacaacataataagttttattaaatcattattttcagctgaaaagaacctatcaaagatacaaaaatgtaagcaaatcacaacgataccgaaatcgaacttgtgccaatctcagctgaaaagaacctatcaaagatacaaaaatgtaagcaaatcacaactcatcacttgggggatcttccagtatgttagctgaaaagaacctatcaaagatacaaaaatgtaagcaaatcacaactcatcacttgggggatcttccagtatgttagctgaaaagaacctatcaaagatacaaaaatgtaagcaaatcacaacatggttaagtagttatgttcacgcaccaaagctgaaaagaacctatcaaagatacaaaaatgtaagcaaatcacaacatttgttcgttaggcaacacaacacgtttaagctgaaaagaacctatcaaagatacaaaaatgtaagcaaatcacaacatacagcagcagatgccaaccgcaacgcaggctgaaaagaacctatcaaagatacaaaaatgtaagcaaatcacaaccatcttataggtatcgaaagggttcttgtcgctgaaaagaacctatcaaagatacaaaaatgtaagcaaatcacaactatcttcaaacatttccacgcaaacaaaacgctgaaaagaacctatcaaagatacaaaaatgtaagcaaatcacaacgaatttcttatgctttcaacgtagtcaattgctgaaaagaacctatcaaagatacaaaaatgtaagcaaatcacaacagctatctatatctattgcttctccttctagctgaaaagaacctatcaaagatacaaaaatgtaagcaaatcacaactatgggagacgtacgtgcacaaatgaccgtgctgaaaagaaccgatcaaagatacaaaaatgatcttagcgaagcaatcgcacgagcggagtgagtaaagcaaatcaccataaccatgggttgtacttgaatttaaatagctttattagtacgtaaaatttaaaatataaacgtgcatttataaatacaattcgtcaattctttttttagcttctgctgatatcgattgtaaaccaatatttttattggctaagtaactatagtgtgctatgttttcgagtacttcgagacgttcaagagcttcgaccaatgttttgcccgtggttaatataccatgatttttaagtataagcgtatcggcatttttaactttacaggcgacttcgtttgccaactcgcttgttcccatagtctggtaattgcaaaaagccaatcgcttaatggcataatatgcttcgtcgcttatatcattcactaattgcaagttggatagggcaagcagcgaggcccaaaatgaatgtgcatgcacaatggctttaatatctggtcgtgtatggtaaaccgataaatgcatactagtttccatactcgatttatgaatggctttaagtacatgacggtgtaaatccattatgatgatatcattggcactgagtctatctttatcaacttgcgagggtgtgatataaacaaaattttctacgcgtaaacttatattacctcctaagcttgtggtaagcttttgccggtataatcgttgcataaaataagcaacttcgctgcaataagcttgatgattcataaccatgattttatgttttcaaatatgcctttttcggttatataggcattgaccaacgatgcgggtgtgatatcgaaagcatggttgaccgaagagaacgaattggggaataaagcaatttcaatacgttgctgttgatacataccgctaataaattgtagttcgttaccgtgtcgttgttcaatgggaatttgcaatccattgtcgattgataaatcgaatgtggtatggggtgcagcaacccaaaatggcacatggtgttcgcgagctgccagagctttttggtaggtaccaattttattggcaaaatcgccattttttacaattctgtcggctcccaccattacggcatctactttattaagcatcataaggagtgctccggagttatcgctgataatatcgaatggaatttgttcgttggcgagttcccaagctgtgagtcgtgctccttggttaagcgggcgagtttcgtcaacccatacgtgtacgggcaagccattgctatgtgcttcaaatattggagcgagggcggtaccataatcgccacatgctaaccagccagcattgcagtgggtgagtatatttaaggttttttgtttttctttatataattgttgaagtagcttatatccatgctgtccaataagtttacaagcttctatttcgctatcggcaaattgttgagcggcttgccacaattgttttgcttgttgtgtttggtttaaaaatgtatgatatacggcgtcggcccctcgttttatatttactgcggttggtcggcattgaattaatttctgataggctgttttgtcgatggtgccattattaataaactcgagccacatagcccatgcagctgttataccaatagctggtgcacctcgtactttgagtgttttaatggcttcgataacttcgtctaaagttgttagccgtagcaattcaaactcaaacggtaatttttgttgattgataataattaccgcatttttttcggcccaaacggaacgatagtgtttgttattaactttcatttattctatggttatttcgtatattttcccaatattcctgttttttaggaaagggatataatcttgttcgtaaaccggaacaggccaccattcggctaaatgaaattcctgattgataatcatgaccatttggttgttgggtatgcttgtttgtttttcgctcatataagccacttcgtacattttatcttttgacggacctatccgccaaatgatttcgtcgggtcgccattcaatctgaaaataatagaattctttcccaaacaattcattatctaaggcaggagttctaatggttagtgcttggtatttttcgttccaacgcatggcttcatattctttatcgccatggtttaggtattgaataggataatcgaacttgggcgggtcttggctggctaaatcccagttagtagctgctacaataatggtatcgttgtatttgccattgtaaagtttcgatttttcttttaaagtgctgtttttatagtattgataaggccaatatgggctagccttaataatttcaaaatcaatttcagaataagctgtggtatggattctttcgccatcggggttccctttaggtgtataacccgtatggctgtatcttcggttgttccattcgcttaagtcttgtgtaataagccaaatagcattggtaaccccattccaaacatgatgtttgttgagcaaatgaggtaatttaacttttgcagtaatttttccataggtaaaaccaaccctagtcataactccaacatttaatttggcggcattctcgagatttttgttttcggggttgaagatttcgatatattctttacggtcatatacttctttgcatgggcattcaacatttcgaatccatgagtgcacgcgatgaagggtgtcgtggagatatttgtttttattggtgatataagtttcgggagtatattcatctttttcccaatcggctaaaacaggaatggtattaattttaaaatttttgttttcatggctaaaaaactgttcaaataaagctttattaaaaaattcaatcgatgatccacaaagggtgtcgtctttaaaatttaagtttttgtatggaagtttggttttatcgacaaatataccattgccaggtttaatgcatgcagaaagactaaaaatgcaagaatctaagtaaaccgaaatatcatttctatttgtattgtcgtgtaaaaaatagcgataaggattgacatattcgcctttttcgttttttttatgaataaattgaatatattcgggaatgttttttaaagcttcctcagtacaaacaactattaatgcactgtcactgtatttccccatacgtgggtttcgtttccatgggtgatttacatttcctttgtttctattatcttttaaaacccaaagtgcgtccatggtagcttgttcttcgaatgtataatgattttgctttgccttttttaatacatcggctttccaatcgggcgagttttggatggcttgtattaccgattgaattttgttttcatcaataaaaaaatcgtcgaatggagcaccgaagtatttcttttcaaaacgaggatttccaactattttaaacgaatcaataaccgttgtctcttttatttctttgaaaccaatagtagtatcgttccatgaaccatagaaattttcgctactccattcgtgtgtttcgtcccatttatacgactcgttttgataataaattttgtaataatatttttttctattatttacagtgaaactaaatttaatagtgttttcgattgttttagtttcattgttttttaaattataagggaatactatgccttgagtaattacgtcttcggtgtttattgtaaaaactctatttttagccggtaaattataaccaatttttatgtttttgataaaaatatcagaaatgttgggttgacattttaccattaataaagtaaaaagaatcatgataaaaaacaagagccatctcataaaggaacattttttgacaaaaatacgtataagaaacaactttttaatgatatgaaaaccattttttttgcattatttatactttcatttatacatgttcgccctcaaaatttaagtccaaccgaagataaagctttattaaatttaaaagttaccaattttagtcaaaagccattagccggagaaatggttatttttataagtaagaaagataaaaaacaatatcaaacacaaacagccaaagatggaacggcaaggattttattacccgaagggcatacctacgatattcaatatcgcgattttatggagcaacaagaatattcttcgatagaaattcccaatcagcccggtgcatatacttacgatttagcaataaaatttgagccggcaaaaacttacacattaaaaaatgttcatttcgaaacagggagtgctactttaaccaacgactcgtatgccgctttgaataatttgtacgaagccctcaaggctaagcccaatttagttattgaaatagctggtcataccgataatataggaacattcgaacataatttaaaactttcgcaagaacgggctaatagcgtaaaaaaatacttagtaagcaaaggcattagcgatgtacgtatagtagctaagggttatgccgatactcaacctattgcttcgaataataccgaagaggggagggctaaaaaccgtcgtactgaagtgcgaattattaaagaataaacaaaaaatgcctgtttttcaaaataaatttgcatttatacaaataagttatttattttgtgttggttatttatcaatatatattttttatagactaacattgtttttatgatgataagatttataatatttatcattttttttgtgcttgtaaataatttaacagcacagcggcatagcgaagcatttgagcaaaagtttttaagaggtgagcaattaattgaaaagggcgattttccttcggctttagtagtttacaaagagctacttgccgaagaacccgataacgctaacttaaattttaaaaccggcttttgttatttaagtactgtgctcgagaagtcaaaagcaatagaatacctcgaaaaagcagttcaagatataaatcccaatgccgatattgacgatcccgacgaattggcagctcctcccgaagcattattttttcttgcaaaagcatatcatcatgattatcagtttaatagagccttgaagataatagattcgttaaaaataattttgccaaattataaaaaagactttaccgaaaatgttgatgaacttgaacaatattgtaaaaatggacaagttttaatgaaataccccattaaaatgcaaattacaaatttaggaggtgtcataaacacggaattcgatgaacatagtccagtttttaccgccgacgaacaagtgcttatttttacttccaaacgcaaatcggaaatacacccagctttaaccgaagatgggcaatactacgaagatatatacatcagcaaaaagttatctgatggtcaatgggaaattcctgttccaattagctccaatataaatagtgctacacacgaggcttctattggtctttcgcccgatggacaagaattatatatatacaaagatgagtcaaccatgctcaatcctcgcgatggaaacatttatgtaagtaatttagtcggcgatgtgtggacaactccattaaaattaaatgtgaataccaaatacaacgaaaatcatgcaagtatatctgccgatggtcaagaattattttttaccagcgacagaccgggtggttatggtggattggatatttatatagccaaacgattgcccaatggtgagtggtcgataccccaaaatgctggtccaaaagttaatacagcaaaagacgaaataagtccttatatccatcctgatggagttacattattctttagtagcaaaggacataattcgatgggtggcttcgatatcttttttgctattcgcgacgatagtttagaatggaatacgcctaccaatttgggttatcccattaatacccctaacgacgatgctttttatgtaccaacccccgatggtgccagagcttattatgcttcgcaacaaacaggaggaatagggcgtaacgatatttatttaattactttgccacaaagcgaagaaaagctcttaactgttatgagtggttatattactatgggtaatggcaaattaccagaaaatgttagtataaccgttaccgacgagcaaaccaaaaaattgattggcacttatacacctaattcaaaaacgggaaaatatttatttatattaaaatcgggaagacgttatttaatatcggtcgaaagtgatgtgtttttgccttatacagaagtaatagacgttagtgatagtacttcttatcaaaaaattgaacgtcctataatgcttgaacccattaacattaacaatgtacagcgaaaatttgaatatcatttcaaatcgaatcaaaccgaactatcatccgaagaagggatgtcgtttataaaaatagctaaaatactaaattatttgcccgaatttagtgctcgaattgtattacctaaagaaaaccaacaacccgaattaaacgaaattcgagccgatattctcaccgaaaatttaacagataaaggcattccgctaacacgaattcatgtcgaaaatactccatcgtcgaaccctaatgttataaatttatttatatttgctaacgatagcgccccctctttaaataaattaaccgcccagaccaatattcaaatgaagaatgagcctattaaagaaccggaaataaaagataaatcgacaaaacttgttattttccctatttattttactttcgacaaatttatatgccaagccaacgaagaaaatcttcataagctagccatttggttaaaaaataataaaaaagcaaagcttcaaataatagggcatactgacaatatgggaagcgacgattataacatgaaacttagtaaacgtcgtgccgaatttgttaaaaaacaacttattgagcttggaatagaagctaaacgacttactaccattcctatgggtaagaaaaatcctgttgcatcgaatgaaactgccgaaggacgccaacttaaccgacgagtagagtttaaaatatcgaatataaaaaatgcagatatcgaatttttaaacaaacctgaaatattttcatcgcctaaataaaattatgtaataacaatgaaaataaatataaacatactctatatgaaaacacaaatcattttatttatatcgcttcttttttgttttaatatagtatggggtcaaaaaccatcgttaaaacaatatattatcgatgcttcaaagcatattcaacttaaagaatatcagcaagctattgataaattaacatggtgtttttcaaaagatagcaccaatggaaatatcaattatttattaggtaaagcttactttttaagtgatgtaagcttaaaaaaagccataccatatttagagaaagccaaacctattagcaaaacatatcaagatgcagaccccaaagaacgtaatgctcccaccgaagcccttt

SEQ ID NO: 1734 - DNA, 23714 bp, synthetic construct
  misc_feature 1..23714: note = Synthetic
  source 1..23714: mol_type = other DNA
ctttcctattattcctatgtgcctttcgaaaaacctgtttataacctttctcctgaggaaactgatgagattgtcacttcaatacccctttatatcatttctgcagaaaaaaaggatggaaccttgcgtacacttaaagtgtgggagaaatttacagaaaatcagtccggtgtaagggtttccgataccgacagggtttacggaatgattgaagggaccggcagacttgtattaatcaggttttttgacattgatccgatcctgagaaatgcgggatatttcttgaaagattaatttgatggtaattcttttttttgtaatattgattttttggttaaggaaatgaagttaactgaaattcaaatgattattaacttaaacattgcaaaatccattatttgtctaacaaaaatatactgataatatgaaatttgttgtatcaagcagcgaacttttatcgcatctgcaggcaatcagcagggtaataagcgctaaaaacaccctgcccattcttgataattttctgttcaatctgagcaaaaacgaacttgaaatcacagcttccgacctggaatcgacacttattaccaggatgagcatagagaatgccgaagggagcgggcttattgccatccctgccaggatacttctcgacatgctgaaggaattcagcgctcagccgcttactttcgacattaatacggataccatggcgatagtgattatttcggaaaacggaaagttcaatgccatgggtcagaacggtgtcgattttccggtgctgcctgtacttaagaaggaaaggaaaaactcgttcaccgtaaattctgaagttttactttcgggcataaacaggacagtttttgccactgctgatgatgagctgcgcccggtgatgggaggtattctggtggaagcttctcccgaaaagcttactttcgttgcctcagatgcacataagcttgtgagatatcagcgtacggatgccaaagcagatgcagcctgctcttttatactgccgaagaaacccgcaaaccttcttaaaaatattctgccgaaagaggagggaccggttattgttgaatttgatgataaaaatgcatcctttaccctggcagggtacaaagcagtgtgccgccttgttgaaggaaattatcccaactataattccgtcattccgaaaaataatccacggaagctcaccattgacaggtctgaattttataataccctgagacgggtctcggtcttttccaatcaggccagcaacctggttaggctgcacctgaccggtaaccagatgacagtatctgcccaggatatcgatttttcaatctcggcatacgaaagaatcaagtgccagtatgaaggagacgagatggaaataggattcaaatctgtcttcctcctcgaaatacttgctaacctgaattcacaggatgtggtgattgaactggcagatcccacaagggcaggactcttccttccggctgaatcagaaaccgaagcagaagaccttctcatgcttctgatgccaatgatgataaatgcctgagatgaatctgtcactgaagaggcctcttgccttctttgacctcgaaacaacgggaatcagtatcagtacagaccggataattgaaatttctgttcttaagatacatcctggtggtaagaaggaatggttctgttcgagggttaatccgggtattcccgtgcctccccatgcaacagaagtacacggaataacagatgaagacctgaaggatgccccctcttttaaggagattgcagctaatcttgcatcgtttcttgaaggaacagatctggccggatacaacgcaggaagatttgatattccactgctggcggaagaattcctcagggcaggtgtggattttgatttcagaaggagaaatttcattgatgtacaggtaatattccagaaaaaggaacccaggacactcagcgcagcttaccggttttactgtggcagggaacttgaagatgcacactcatcacaggcagatacagaggcaacttacgaaattctgcaggcccagcttgaaagatataccgaccttgaaagatctgtgaacaagttatcggagtacagttcttttaccaataacgccgattttgcaggaaggattgtatacgatgaggaggggagagaagtatttaatttcggcaaatacaaggggcgtctcgttgaagaagttctcaggaccgatccgtcatactattcgtggatgatgaacggcgatttcccgctatataccaagaaagtacttactgagatcaggataagacattttggaaaataacatcattgaatgaagataatctgtacagggcttaattaccgtcagcatgcaagggagcttaactggcccattcctgaggagcctgttcttttcatgaagcccgattcggcactgcttaaaaacaataaaccattcttccttcccgatttttcatcagatattcattacgaggttgagctggtggttaagataagcaggcttggcaagggcattgcgatgaagtatgcccacaggtattacgatgaggtaaccctgggaatagatattactgcccgcgatctgcaggcaaaagtgagaaaggggagtctgccctgggaaataacaaagggttttgacggtgccgcaccggtaggtaagttcctgcctgtttccaggttcggagatattaataatctttctttcaggcttcttaagaatggtgagacggtacaggagggtagtacatccgacatgatattcagcatcgacaggattattgaatatgcatcaatattttttaccctgaaaactggtgatcttatttttaccggcacacctcccggtgtgggtcagcttcacaggaacgaccgcctgacggcctggcttgaggatataccagtgcttgattttctgataaaataagggaaagttcaaggttccaggttccaggttccaggttcaaggttccaggttcaaggttttgtctggtgcccgatggccggtcaccggtcgccgcaagccggaagagggcgaagggcaactggcatggagcatggggcatgggggaaggcaaacggcaaagggcatggagcgagggggcgacttgacgacggggtgactttgcgacgggtgacagggcgaccgttaacccggagttaccgcagaccggatgccggtagccgcaaaccggtaaccgggataactgcgaagcagtgacatatttgttgaaaataaggtgtcatccataccatggaactgtcagattaaatcgtggctaattcatataagttaattcgcatcgttgccaggtcacatcagcttgctgagccttttatgttaaaaaaataaatgaatgttttggtttttaaaaatatttattaattttgatatgctgcatttcttgaaattagtgcgatgcgtactttatggttgcattatgtgggcagatttttcttaagcatctgttgtattgcctggttaatggctgtaagcctatattattcaaatggacgttcctttagcctaatgcttatttctaaacttgtaatttcaaatacggattacctcttaaaaattgaaccttttttaatatattttatctcgtctgaaaaaaaattatttccattaaatagggaatatccttttaaaatccagtggtggtagctccctgccgggagctttttattaatttaaatcctgagtttagttgtttataaatccaaagtttcacttttttttatgaacatatatgaaatcaaaactattaaaatcagtactcattctttttttgggcagcctaatttttgttaatatatgtattattagtaatgggaaaattgctatgttttcttttattaaagaagccctggctaaagaagatcctacaaaacccaatacagaatatcttccattccattatttaaaagaaagatggtgtgtaattgctgatgtggagtttgaattatatgtctttggcacatctgtgcttcctaatatcagcggcactatcgattttaacggatcaaaaaaggtttgcaaatctattacgcaggatatatactgctatcttcctggtcaaacagaatgttcatcggcctctgattaagaaaaaataaggggcggttgtatgacatacatccgcctcttattttaaaaaacaaataaaattatcattatatttataaaactgtattagatggtaaagcaatttaatatgttgtcttccaggttaactgaaaaacaatcagattacaattttaagaatttgagatcaggggaaagttttatctgcattttctgtctgattttactcgctttacttttttgctcttgccagaaaaagagaagccggattgaaataattgattcaaataatgaggcttttttaaaaatctcaattaatcctgacaagactgataaacttaaactctcttcaatagccgtcgaaattaattacataattcctgataacagcccggaatcaattttcggctctcccgataaagttgttttttatgactccctgatctttatttcggacactgataattcaatggcaattttttgctttaccagaagcggcaggttcatgtttaaaattgacaaacaaggcaatggtcctgaagagtatactaggctttcagacttcgccgttgacaggtggcaaagaaaaatagtgatttacgatgacgaaatgagaaatttactcttttttgaccttaagggcaattttataaaaaaaatcaaaacaggtatcagtgccgaccggattgagattgccggtgaagaccgtattatgtattattccgattaccttataaattctggatatttcagggataccaactaccaggtttttatctgtgattacaataataggctgcatgaaaaatttctcccttttccggccgataataatctgtttttaaatgtaatggggatacttaataatacttcagcctcgggaaaaggatgttatgtttatcccacgtttaataatagaatttattcactgaaaaaagataagctaaccgtttttgccgaatttgattttctggataaaaacccgcctgataattttctgacatcattcagcagcaaggaacataaaaagaatattgcggaagggaaatatattaccggacctataaatttccaggtgactgaagactggctggtggctattattccgtacaaaaagaaactattttattatctgtatgatattaaaacgggatttacggctttttcagcaaagattgataacgatattgataaatctccttttatttttattcctccgctgtttacagatggaacagatttgttttgcttcatagagccttatctcatagaaaagacaaaaaacctgccgggcggggataaggttttaccagaagaatttcaaaactataatgtaaacaataacccgattctacaggtaattaagcttaaataaaatatcaatgggacgttatttattaatatcggtacttttccttatcgcaggatgcctaagccagccacggcaaaacaaccagactggttttacaaatgattcccctgataatgaaatgatttattatcggggggggcaattcgtttcagaaaactattacgatacttctgaggtttttgtaaaaccttttcttctcgacaaacatgaagttacaattagtcagtttgcaaagtttattcatgccaccggttatattacagatgctgaaaaaaagggagccgcgacattaatagttattaagaaagaaataaaagaaaccggaggggtaaactggcgccatgacgaatatgggaagctcaggagtgaatcagattacaatttccctgtcgttcacgtaagctacaatgatgccgttgcattcgctgcatgggcgggtaaaagactgccgacattatatgaatgggaatatgcagccaatgatgcaataaaatacttagataaaaacgacggcataaaaaccggagaatggcatagcgggaattcaggtttaaaaatacataaggtttgttcaggtaaatacaataatgatgggatatgcgatatattgggaaatgtttcggaaatggttgaaatccctgatcagtttaggccggctcttgataaatctgttataaaaattgaaaacaaacggattacaaaaggaggaaattttttcttcgacatcgaattattgaatacggccattgtttccctgggttctgtaacagggaaatcgtgttatacgggtttcagatgtgccaaagacaccattttttaaaagtattaaaaatatgatccggaaaatacttttcttatatatggtgattattgttctcgttttacttgatctgatattaatgggatattttgtgtctattccggactaattgacccctcattccgggttattgacccccctgggaaaggttcattcatataactgagtattccgcaaagggcaaagggagtgaggggtgaggggtgaggggtgaggagtgaggagtgaggagtgaggagtgaggagtgaggaatgaggaatgaggagtgcttgcccaccgtagcttatttcagccactgtgaatattatagtaaagaatgcaacgtgcatggtaattaaggtaacagcaaaggtcatggcgaaggtgggagggggtattcggtaaccggtaaccggtattcggtaagtcaatgcctaaatagcttgtaatcactttattaaatatacaatacaattgaattactattgaattaccatcaaatgacccgccttcagcaagcttacagctgacaagacagcgcagcgtcaagacagcccgaagggcgaagttaaccggtcgccgcccgccgcataccggtagccgggataactgcgaagcagtgacattattatggaaaacgggtgatcattcatcccctggcgccggaacgaaatgattttttattaccctgaagcagtatcccggcgcaattagtgtaaatttaaggaaaaacgtttgttcagcaagacgtaaaatgtttcggatccaataccccacaggggttaaagtattgtagaagaaatatttaatagattccgtatattccctgtaggggatacggtataattgttctgttgcaaagaagagtccggtaaaacggaatcttgaagcatctggtaagttactccattttgaaaccttaccatatttttataattttatattttctttcatactaaaataccttacttatggcagaaaatcaagaaaatatcctaaaaccttttgagtttccttcggatgtgaaacaactttcaaaagaggagtgcgccaagattcttagaaaagcactaacgttatcgagaaaatataaaactcaagccgatatatctaaaataaccaatattaacgagaaaagtatcggggattattttactgccagaaataaaccatcccaagaaaggtggtctcttttaaggaaggctcttttcatggaaggacaaagagaatccttaacaacaaaacgagtatatgaaacaattcattcaatagaaagatttaaagcagtattgtttttacttaaagatgaacttgagtattttaaagactcaacgtctgataatagaaaattactaaaagaacagataccaggtaaagaagttggctacatagttagcttattatctgcactatacgatgagaatcaacttgagatatttaaaaacttttctaataagagcaaataaatggaaaagaaaaagctgagattaggcgatgagggtgcagcaatcctgacaatacaatcaacacaatctgatcctcaaaaggcaatagctgaattagttgaaaactgtatagatgcgaaggctaaaactattaatatcgttcgacaaaggcatagtggaaatattgagattgtgattgaagatgatggtgaaggagttaagcctggtcaagacggaacccctgatatggatcgcatacctactgaaatatgtaaatcttttaaaaaacagcttgacgaacaccttagagacggcatacaaggtgaatttgcgattggacttttaggttttgccgcagtcggagagaatcttgaaatgatttcaagaacttcagactgtcccagagctaagtttctgagactcaaggcaaattcattaaactacgaatcaggttattcaaatgaaaagttagaaacaagtggaacaaaagtacgaatatggccaatacacgataacattcagcaaagactgacagctgaaaaattaaacaaatatctgggtgaagaactaagagaaagaatcaggcaatctcaagtaagaatttttattgatgataaagttggtcgaaaggttgaacttgaggtcaaaccccaagaatataagggtgaaaagataagtcaaatttcaaaagtaggcactccggcaggtaatatccatctgagactttttatcactcagcaaggagacaaggggaaagtctcaatttatagacatggcacaaaagtcattgatgatattacagaaatacaggaactaaaccatgaaccttggaatactgcacatttagaaggaatgattgacagtaggtttattaacgttcctcccgcaacgagaaagggaattgtccctgacaaacactttgctgaaatggttgaagcaatttgttcgcttgaagaccaacttaaagatataattgagaaagcactcgaaaaacgtgagcaggaaatgagcagggacttaattaaatctcttagagatgcttttcaaaacatcatggaagatttacctaacgaatataattggttcgataccaaaggaattggcattaacaaaccaggttctcaaacaaaagataaagaaccaaagccccaacctaagattcgaattgcatctggaccacttgaatatctgacaatcactccaaaagtcagccaaatggagccgaacgaaagaaaaagattctatgtaagagcctggactcctgatgacgaattaattcccattggagtaacatttaaatggaatatgaaaccttcaaatctaggttctcttgaagcaaataatgatgaatgctacttgactgcaggtacaaatgaaggagaaataaaactcggtgttattgcggccctggataatataacaaaacacgaaattgtcgatgtcttaattttggcaaaatcaaataagaaagcaccagcaggcttccctatacctcaacctgttcataggccgtcagaaaagtggagatcacgatgggatgaatctctaaatacattacagtataataccgggcatgaagattatattagagcggaccaaaaaggtaaaaagcatattcttaggtacatgggtttcttgtatgcaaaacaattggtctttcataatttcaggtcttcaggtgaagattcagtcatggaaaggatgatagaggttataagtcgatttgaagaccgaatctaaatcattaaaaatatcacaccaggaaacacgggcggtgcgggttacgcaatgcccgccttcccctgttctatctttatattccgtcattccgaatgagtcacggtgaaaaccgggacgaatgaggaatcccattattccggtaatgtaatataatgggtcaaacattttttatttcctccctgtcataagaagtgtaatccattttcagatcaaattattatccggacaatagtgataacttataaccttgttattacagaaatattttccggttaataggagtccaaaccaagtccaaaccaaaactacaaccctgtctggatattaaatttataatcgtttcaggaaaattttaaacgataaactgaattgaaaaatattttataacttgtgaggcactcaataagttaagatgttttggggagcgaaaaaaagcccccgtattttcggacgagggcggcctggatgttttcacaacggaataatccttattgtgaattgcttcagtaatacaaatatattaaaattatttgaattatgaaaaaaattctcggacttgatttaggtgtttcttcaataggttgggcacttatcgaagaaaatgattcttcaaaaagaattctgggaatggggacaagaataattcctctttcaacagatgataaagatgagtttacatccggaaataccatttcaaaaaaccagaaacgaacattgaaaaggacccaacgcaaaggctatgacaggtatcagatgcgcagggaaaatttacgaaaagccctcagagcgaaaaatatgttgcctgaatctgatttaatgaatgctgataaatttcttatatggaaaataagaaacgatgctgtgtcggaaaggcttggacttaaggaacttggcagagtacttcttcaccttaaccagaaaagaggttataaaagcagcagaaacgaagccaatcttgataaaaaagatactgattacgttgcagaggttaaaagcagatatgaaaaactaagagaatcaaatgaaacaataggacaacatttttacagagaaatttctgctgaccgctactacagggttaaagatcaggttttcccgcgagaggcctatatagaggaatttgacaggataattgttaaacaacaggaattttatcctgatgttctgacgccggaatttgttaataagttaaggaataagatcattttttaccagaggccgttaaaatcgcagaagaaacttgtgtctctgtgtgaattcgagaagagactagtcgtaacaaatgacggaaagggaggtaaaacaaaaagttataaaggccccagggtaacccatagaagttccccattatttcaggtttgtaaaatatgggagagcataaataacataaaacttaaaaataaatatggagaagaatataaaataccgctcgaaaagaaaagacagatattcgactatatggacaataatgaaaagctctcttttaaagaactcttaaaaatacttgaacttaaaaagaatgaagaatggaccggcaattcatggcttgataaagggctaaaaggtaataccacaaaaatcagaattgctaaatgcttcgatactcctgcttatgctgaagggttaactgtatttaaacttgatttgattcaatctggtaaaataactgaacgcattgactgtgaaacaggtgaaattcaaagtattccggaaaaaataatagcacccttatttgagaaacaaccgctttacaggttatggcataccatctattcaataaatgacgaaacagaatgcaggaatgctctaattaaaaatcttggaatacccgaagtaacggcagaaaaacttgcctcgatagattttacaaaggaaggatttggaaataaatcgtcaagagcaataaggaaaatattaccgtatcttatggatggaatggtttacagcgaagcatgcctgtttgcaggatataatcattccggatcagttaccaaagaagaaaaccagggaagagaagttcttaactttattcctttactagaaaaaaatagcctgaggcagccgatagttgagaaaatacttaaccagatgataaatgtggtaaattctgtaatcaatgaatatggtaaacctgatgaaataaaagttgaacttgcccgtgagcttaaacaaagcagggaagaaaggcagaatacatttaaaaacattaaccagcgggaacgcgagaatgaaaacatagccaaaagacttgttgaagaatataaccagagggcgacgcgtaataatattcttaaatggagactgtttcattatgttaagggtgacgactccaaagtaaacaatatatgcatctattgtggcaaatcatttggcattacagatgcactggcaggcgctgaggttgatattgaacatattataccgcggactctgttatttgatgattcagagaataataaagtacttgctcaccggaagtgcaaccaggctaaaggtaacatgacagcctatgattatatgaaatcaaaaggagagcatgattttaaggattacctggaaagagtgaatcaactctctgcacaaaaaatcataaacaggatcaaacgcgacaagcttatgacaccggctgaaaaaattccaaaagacttcattcagcgccagctccgggaaactcaatatatatcaaagaaagcaattgaaatactttccacggtttccagggatgtccatcctacaagcggaagtgtgactgagttcctgcgacgaatctggggttgggatgacgtattgttgaatctgcaactgccaatatacagaaaggccggtcttactgaatggattgaggtggagactaatgggcagattcataaaaaggaggtaataaaagactggaagaaaaggctcgatcatcgtcatcatgccattgatgcacttgctattgcctgcacaaagcagggatacatacaaaggattaataccctgagctctgatattaccagggaagaaatgtataaggaagtcagcgagactgactcaagaagagctagttggaaaacgcttctggaaaaatacattgctggaaaacaacctttcacaacatcagaagttgagaagcaggctgaaaaaatacttgtttcgttcaagcaggggaaaaaagtggcttcaaaaggcgtcaggaaaattaatattcacggaaagaaaaaaatagtacaaaaagacataatagttccccgcggtcctttaagtgaagagagtgtttacggcaaaataagggttattgaaaaaaacaaacctgtaaaataccttttcgaaaatcctcatcttattttcaaacccaggattaaaaaactggttgaagaacggcttgccagatttgaaggcaatgcccggcaggcctatctttcattgagaaaggaaccaatatttcttgataatgaaaaaacaatccgacttgaatatgggtcatgttataaggaagaatacgtaataaagtatcctttaagttcgtttaagccaaaagatattgattccgttatagatgaaaacgtcaggcaaattctgagaaacaggctcagcgaattcaaaggaaatgaaaaagaggcgttcaggaatcttgaaaataaccctgtatggtataactttgataaaaagatacctttaaaaacagtcagacgctttaccgggctaagctctgtcgaacctgtcaaatacaatgataaaaaagaaccgattggttttgtaaagccggggaataaccaccatgtggccatttacgtggatgaagaaggtgttaaacacgaacatgtctgcaccttctggcatgctgttgaacgcaggaagtacggatttccggctataatcactgatcctcgaaaagtgtgggataaaataataaatcaaaataataacctgcctgacagttttctgaataaacttccttccgatggatggaattttcttttaagccttcagcagaatgagatgtttgttcttggtttgcctgaggaagaggtgaatcgtgcaataagggaaaatgatactgctgttctttcaaaatacttgtatagagtgcagaaaatagcggcatcagattattatttcaggcatcatatagaaacagagatagaaaatgatgaaatatcaaaaaaaatgttcaagtattatcgcgttaatagtttaaatgcacttttttatctgaatcctgtaaaggtaagggtcagctgtttggggcagatttcaaaatcttgttgaaatgataaaacgcacactatatttcggaaatccctgcctgctcaggaagaaaaacaatcagctttttactgaattccctgctgattcaggcaatcctgatatatcagtgccgatagaggatatagggctgataattctcgataatcctcagataaccatatccaatgcacttctgatggcactgaatgacaacgttactgcagtaataagctgcaattcttcacatctgccatatggtttaatgctgccaatgttcagtcataatatatttccggaaaaactcagagatcagcttaatgcctctgtgcctcttatgaaaaatctctggatgcagacggtagtggcaaaaatttcaaatcaggctgcacttcttaaacgaaacggagcagatattggaaaaatggaatattacattcgtcaggtaagaagcggtgaccctcagaatattgaaggcagggcagcagcctattactgggataacttattcccggaaaatttctttataaggtaccgtttcggtgaacccccgaataatcttttaaactacgggtatgcaattctaagggcagttattgcacgttcacttgtaatgtcaggtctcttcccttcgttagggattcatcacaggaataagtataatccatattgccttgctgatgatataatggagccatttcgtccttatgttgattcgctggtaatggatattatttctgaaacacccgaaatggaggagcttactcctgcaatcaagcgtcgtcttctggaaataccggcaattgatataattattgatggtaaaagcagtccgcttatggtaggagcccagcgtaccacagcatcattggcggcatgttttgaaggaactgcaaggaaaatcttattccctgagtttgcaacatgatttattaactattggaattaaatgggcaagtcagaaagattaaaccagtacaggattatgtgggttttcgttttctttgacctccctaccgaaacaaaaaaagacaggaagaactatacgcttttcagaaaatcgcttcagaaggacggtttctcaatgttgcaatattcaatttatgtccggcactgtaacagtcgcgaaaattcagaggtacacattaaaagggttaaatcttttcttgctcctaaaggtgaaataataatttttacacttactgacaagcagttcgggatgatggagtttttccgcagccgtgaacctgttcaacggcctggaacacctcagcaattggaaatgttttgatccgggaaacaaaaaagccccttttatttttaaaggggcttttaccggccacattttttatttttctgtttcagacactaacataaagataatcaatttaataaactctgctatgttgtgtccggtatgtcaaagatacgaactgaaagcaattcacaaccgtcaatgcttattccccagacgtgtggaagttgtgtccggtatgtcaaagatacgaactgaaagcaattcacaactacaaccggttaagggtgtgtcgtcggtcagttgtgtccggtatgtcaaagatacgaactgaaagcaattcacaaccgggggcgctgccatgatcccggaggatgcgttgtgtccggtatgtcaaagatacgaactgaaagcaattcacaacacagatagagatattatatcagacgttagagttgtgtccggtatgtcaaagatacgaactgaaagcaattcacaactgtcctttgtcaaataatatcctgcattcagttgtgtccggtatgtcaaagatacgaactgaaagcaattcacaactaaggaggattaacaaaatttcgttcacccgttgtgtccggtatgtcaaagatacgaactgaaagcaattcacaacccgcacttcgggcataactgatatggcgctgttgtgtccggtatgtcaaagatacgaactgaaagcaattcacaacttaaataagcagggtgagttacatattagcgttgtgtccggtatgtcaaagatacgaactgaaagcaattcacaacttcacgtcctcaagcatctcctcggagagggttgtgtccggtatgtcaaagatacgaactgaaagcaattcacaacgctcgtcgcgcaatcctatgcccctggtatgttgtgtccggtatgtcaaagatacgaactgaaagcaattcacaacccgcgcgggtgcgtggattgaaacactgttgttgtgtccggtatgtcaaagatacgaactgaaagcaattcacaacaaacggacgatatgataataacacgggtctgtagtgtccggtatgtcaaagatacgaactgaaagcaattcacaacgataacaaatctatagatttgcttatcactgttgtgtccggtatgtcaaagatacgaactgaaagcaattcacaactaaggagctggttgaaacaacgaaccggatgttgtgtccggtatgtcaaagatacgaactgaaagcaattcacaacacagcgccggcgcctttctcatcaggggcgttgtgtccggtatgtcaaagatacgaactgaaagcaattcacaacacagcgccggcgcctttctcatcaggggcgttgtgtccggtatgtcaaagatacgaactgaaagcaattcacaacagctcccaggttattgactggtcaagcttggttgtgtccggtatgtcaaagatacgaactgaaagcaattcacaacaccctgcaacacggggtaaaccactaaattgttgtgtccggtatgtcaaagatacgaactgaaagcaattcacaacggaaatgtaaaagttaaaaataacaagcatgttgtgtccggtatgtcaaagatacgaactgaaagcaattcacaacaaacggacgatatgataataacacgggtctgtagtgtccggtatttcaagatgaatattccggagcaaactgagccacccaaaaaggcacagaacacagagcgcagggcacagggggtgaggggtgaggggtaaggggtaaggggtaaggggtgaggggtgagggtgaggagtgaggaatgaggaatgaggagtgcttgcccaccgtagcttatttcagccactgtgaatattatagtaaagaatgcaacgtgcatggtaattaaggtaacagtaaaggtcatggcgaaggtgggagggggtattcggtaaccggtaaccggtattcggtaagtcaatgcctaaatagcttgtaatcactttattaaatatacaatacaattgatttactattgaattaccatcaaatgacccgccttcagcaagcttatagctgacaagacagcgcagcgtcaaaacagcgcagcgtcaagactgcgaagcgaagggcaaatgacctttcttcattttgaaggatttctgaaaaaaccggcattattttaccaggtattcctcccttgcctggaaatagcgcttaaatcaaaaaaaagttgattaaatttgaatcatgaaatcaaatactgaaatagagaggaaattaaaagaattaaaacctgttttgctcaagaaatatttcgtggataagatcgggtactttggttcttattcaagaaatgagcagtcggaagactctgatattgatattctggtttcattcagtaaaccactcgggtgggaattttttgatctccaggaattccttgagagtgaattgaaattaaaggtagatctattatctgaaaaagcaataaaagagcagttgcgaaagtccattttagacagtgtaaaatacgtatgagtcagggtgaacgggaatatattctgtatcttgaggatatgcttcagtccatgcaaaggatagaagaatatattaataatcttgattttcaggagtttaagatgaaatccatggttgtggatgctgtaataaggaactttgaagttattggtgaagcatcaaaaaaagttcccggagcaatacaaaagaaatatcctgagataccatggagaaaaatgtacggactcaggaatttaatacccatgaatatttcggaattgactacgaaatgatatgggaaatagcaaaaaacaatctgcctcagaaccggaatgatttatatgaaattattttaaaagagcaggcacggagaggtaacaaagtctgattattcgtggccaaactgaaccccctttgtttaatggagcatggatcagtggaagaaaagcccggagcaaacttgtccgccatagtaatctctctcctccggtatgtgtcctgcggaatgaaatgaaggagtacccgatggggtgagggggtattcggtaaccagtaaccggtaaccggtaaatcaatgcctaaatagcttgtgatcaccttattgaatatacaatacaattgaattacaattgaattacaattgaattaccatcaaatgacccgccttcagcaagcttccggcgggcaaggcaataatctgttcaggttaaacaaaatattctgtaactgatgaaaagataatttattttgttatcatcaattatgtcagaatattatattatatttgtattgtgtataaatcataattgaaacatgactgattacattaacagacctttgtatattgaaaagattaaaccttttatcggcaaatcgcttataaaggtgttgacaggtcaaagaagagtgggaaagagttatcttctgatgcagctgaaggaactaattgaaactcaggaaccgggtacacaaataatttacatcaacaaagagcaaaatgaattttcatttatcaggaattcggacgacctgcttaagtacattatgaagaatgtaaaaggaaaggagaaggtagccctgtttattgatgaaattcaggatattgaatcttttgaagttacgcttagagatctggttaccaggaaaaattacgatatctactgtacggggagtaatgcaaacctgttatcgggagaacttgcaactttcctgggcggcaggtatatcgaaataaaagtctttggtttaagttacgctgaatttttggtttttaatgaaatccccgattcggttgaatcatttaaagattatatgaagtttgggggccttccttacctgattaacctgagcaatgagattcaggttgcatatgagtacctgacaagcatttacaacaccattcttctaaaggatgtggttgcccggtttaatatcaggaatgtaaaatttctggaaaacctggttgaattcctggctgataatattagcagtattgtttcctcaaaaaaaataagtgaatacctgaaatctcagaaaataaacatttcaacacaggtagttattgattatctgggataccttgagtcttcattcttaatctttaaagtgaagcgtacaggtattgaagggaaaaagatatttgaaataggtgagaagtacttttttgaagatgtcggaatccggaatgccattgttggctataaagctgcagatattcacaaaatacttgaaaacatcgtatatctgcatctgagaatggccgggtattctgtaaccgtaggcgtggaagggagaaaagaggttgattttatcgcacagaaggccggtgataaaatctatgtgcaggtagcatatatgctgacaaatgaggaaacagttaatcgtgaatttggaaacctgcttgaaatacctgataattttccgaagtatgtggtttcaatggatgaaatatcggagacatcaacatacaagggtattatacggatgcatattaaagatttttgttttcgattggtaacaaatcctgaccttaatttacagaagcagagtattaactggtgagggtttcataaaccaggtaccggcttccggtggataatgagaagtggtaaggttttttccggggaacggcacaaaattcaaagttccaggttccaggttccaggttttgtctgatgcccgatggccggtggccggtagccgcaagccggaagatggcgaagggcaaagagcgaagagcaaagagcgcagggcacaggggtgagggagtgaggggtgaggggtgaggggtgaggggtgaggggtgagggggtattcggtaaccggtaaccggtattcggtaagtcaatgcctaaataacttgtaatcactttattaaatatacaatacaattgaattacaattgaattaccattgaattactattgaatttctattgaattaccatcaaatgacccgccttcggcaagcttacagctgacaagacagtgcagcgtcaagacagtgcagcgtcaagacagcaaagcgtcaagacagcgaagcgttaagatgagagctcattctgcaactcactgaaaaacatgtgtataagggtatcttttacccggagatccgtgagatatgatcccgcttccgttaccggcagctctttacggacaagccctgagataatctccgccacaccacaataaccctcaggtttaccctgtccaaaattgtaaacctccgattcccttatgtaattctcacagaagtccctgatgatttcatatcgctgcgaatggcggttataaatttcgggataacctccaaacacctctgtaaatctctcaaacctcgcagcaacatttccgagtatcctcgacccaagctccctgaacggaatgcctctttcggcataaatctccagatacctgtatatcccggtaaatcccaatgcatcaaggtcgtcggcaatgccaagaattgatttcagcggtgaagggttgcttatttgcgggtaattcttattatcatgattctcaatcgccccaagaacatcggcatagtcagccggagaaaggttattattttggaggaattccctgcagagttccatgctcctggcgccatgcttttcgccacgttcgtatgccataccggagtcgtgcaggtaacaggctatcagcagtttcgtggcagatagttcatcgggcagcacgtttccgtaaaaggcgagttcgcgtgcataaagccaaaccctccggtgatgttccggtccatgggaaggaagaaaacaatcaccaaatattccggagataaaactttcgagtttctgcctgtacctgttttcggcagcagcaagatactgctcagtttccatcggaagaaagataactccggcggccggctattcaatcatcttttttgccagatcgagaatagtagtatcctcaataacaacaatacccccgtttggtcccttttcgtaatgaactccttctgtttcaccctttccgaaataatttctcactgattcttcacttagatcaagcttcctcgctatctgccttatccctccttcgggaaggctgtccttaatcctcctgagttcgttaaaagtaattgttctgctcataatctgctggctatatggtttttatgaaaaaccgtttatttccaaatatattcaatctgcctgtaaaaaacaagaaaatttttatttcagatctctctttttatatatacatcataatcaccaagataaacgaatccgaattttttataaaggtttactgccctgtaatttgaacggtgtacttcaagttttgcctgtaaccctttttccattactgttcccatggtcgcttccataagataatttgcaagtcccatgccctggaatgacggcaggatgccgaaatgatgcaggtatgttcttcttccgtcgcatgtaagccatgatgtgccgcatattgttcctgtggttttctcctcaattaccagaagagcgcctccggatttaattgttctgattatcacatcattattgtcgcctctttcacggtttcccatgcctgtcgcttcccacagccgggcaacggcttcataatcatcctgtctgtaatctcttattatgaaatcctctcttttacgatcagctttattctccattcagatacttttgataagttcaagaaatattttcatactttccctttttccggtatcgaatatatagtcgatattgttcatgaggtacgaatagagttcttcacggctcattactcctgatcctccgtaatgacggcttacctcctccctgttatccactccgtgtttaagtgctgcattgaattcatccttaaagagggacggtatcttcctgttcgaaatccagcatgcaaagacgaaacatagtccggtaaaatctttccattcctcggccaggtcgagactgtatctgaaggaggactcaagttcgaagcactgatcacctataagaacaactgcctcaccgttcttaatcctggtgaaatcaaatccttcaccggcagaaatccatatataatctctcttccatttatgctttgcaagtacgcgtgcaagagctactgaggatcttgacctgtagtcgagatatatggtattaatatcatcaaaggccgaattgctgagcagaagcacggttttgactttcctgcatgccccaatgcaatagtcgctgattatcctgtaacccggtacttcgggaagtgcggccaccgggataaggcctatgtcggcggatcctgttttaagtttttccgcgcatactaccgggtgatctgttacaatatctgcccgttccgaaagcctgcttctgctcaggccccatacgaaaggataggaattggcatatttaacaacagatattcttatcttttccatgtactttgaatattgtacaaatagatatcttatactttttttcaaacatctaaaatactacttttgttcctcagggttaataaaaaaaccgataaaaaagcggaaatggaattaaacaatcttactgcgatttcgcctgtggacggcaggtatggtaaaaagacttctgatcttgccggatatttttcggaatatgcgcttatgaaataccggctgtttgtggaaatagaatatttcattgcactttgcgggtttcttccgcaaaacaagatatcatgcggagatgtaaatgccgatgaattgcgtgttatctggcgcgatttttcaatggatgatgcaatgaagataaaggagtatgagaaaaccaccaatcacgatataaaagctcttgaatatttcctgaaggagaagtttgacagggccggtctgggcaggctgaaggagcttgttcatttcggacttacatctcaggacatcaacaataccgctctcccgttgtccgtccgtgatgctatgagtaatatttacactccgatgttatatgatatcagagaaaaccttgcatcactggcttctgagtggaaagaaatccctatgctcgcccatacacacggtcagccggcctcacctacaagagcaggaaaggaaatagaggttttcattgcccgtctcgatgaacaggtgaagtatttcgcacagatacctttttcggcaaaattcggcggagccaccggaaatatgaatgcacactatgcagctttccctgataaggactggcatgcgtttgccgattactttgtgaatgatattctgggattgaaaagatcctatccgactacacagatagatcactatgacaacctggcggcacttttcgataacataaagagaatcaatgtaattcttattgacttgtgcagggatatctggacatatatttctatggattacctgaggcagaaagcgaaaaaaggcgaagtagggtcatcggccatgcctcataagataaatccgatagattttgaaaatgctgaaggaaatctgggaattgccaatgccctccttacgtttatgtcggaaaaacttccggtttcgagacttcagcgcgaccttaccgattcgaccgtgacaagaaacaccggagtagcgtttgcacatacaattattgcattcggatcaattctgaaaggactgagcaagctggttataaatgaagctaagctgagacgtgatcttgaagataactggcttgtagtggctgaaggcattcagactattctcaggcgtgaaggctatgaaaagccctatgaagagctacttgagctgacaaggaaagaggaaaaagta

SEQ ID NO: 1735 - DNA, 23708 bp, synthetic construct
  misc_feature 1..23708: note = Synthetic
  source 1..23708: mol_type = other DNA
aatcatcccatgcattaatgccgcagcaataaccgattttgccttaatggcaatgtagctgaatgggaacgaaagcagtatgcaccatacagtcatcattagcacgccaacttgtgggttgttggggtagttatgccccatcagtatcatgggggcgtgccatattccccagataaccccaattattaggctagctttggcaaaatgcaaatctttatactcttttatcagaaatcccctccaacccaactcctcaccaaaggcggcaacagcatttaccgtaaggccaccaataataccttggattagggttaaaagaattgggtgtatgggcgatgctgcaagtgcaagttgcattcgctccatctcctcaggagtaattagcccttcgaaacgtgtgaaaagtccctccatttccatggagaacgagaccccgggaagcaataggcttatgcctatagatagcccagtataaacgagtggtatggcaatggctaccaaaaaccacctattgaatttaaacgatataaaaagcgatttggcagccttttgcttgtgaacaattttttcgacaaaaagggctgctaacattgggacaaacatgtacaaaacgccaagaattactccttcggtatccttgtattcgtaacccaagcttagaaaaattcctaccatcgagaagttgatggtaaaggttatgataaggaataaccatagcttgctaatctttttcatctgttgatgtttttttatagcgccctgcttttttcagcgcctgatcaataatccattcaatctgaccattaatgctacggaactcatcggccgaccacttctccaaagcctccagcttgtcaggatcaacccgtagcacaaatgatttctttttcgccataacttatctattggtgtaacgtaccggcattaactatgggagttgccgactcctcggagcaaagcactaccattaggttactaatcatggcggctttcttctcgtcgtcaaactcaatggttttctcctcggccaatttatccagcgccagcttaaccattcccacagcgccctcaacaatcttttcccgagccgatataatggcatcggcctgttggcggcgtagcattacggcggcaatctcgggggcataggctaggtagtttatgcgtgcttctaccacctcaattcccgcaatggctaggcgctcgttgatttgctcctctagtattttgttgatatcgtcgccgtgtgagcgtagggttagctctttagcgctttcggcctcgttcatatcgtaggcaaacatacctgctacgtatcgaagggcagcgtcgcactgaatcttaacgaagttctggtacgccatcatcttctcgttaaggcgtgcggtggatgttgccccagcagtattggctgccatcgaggcgttatcgacatgaaacgaagccttgtacgtgtcgaacagtcgccaaaccaacaccatgccaatcatgatggggtttccgctcttgtcgtttaccttaatggggtcggcatcgaggttgcgggcgcgcagagtaagcttttgcttggcatagaatgggtttacccagaaaaaaccgttctcctttaccgttccctcgtacttgccaaagaaaaccattactcgtgtctcgttgggttcaatttgcataaatcctccccagaatatacagtttaggacaaacagtactcccagtccaatacccgacagggtggccattagcgggctaatgcctgatgtgctaacaagcttaatgaataggaatacgatgccaaaaagtagcagaaagttgaatattagcattagtatgccgttcaactttaatcctttgaatggttcttcttgtgttttcatatttttttagattagtgatattaaaatgatattacaaatatatcacattgaatttgaataatccaaaaaaaagccagaaaattttttctggctttttaaaatgttaatgcaacttgttgttaggtagtgcgatttattatcctttggataacttcgtccgatacctcaggcgctttctcgtcaatatctttaaggagattttggaatttttccagaggttcaaacagattgtgtaggttgtaaatttcgtcaatctgataatcctgaaaactcttgaggttccataggattggagtaaaagttttattcataggcattttactgttggtatgcattgcaattttgttatcaacagtagaacggctacaatagcctgatattgtaatttcggctcaaaatttattgatatggtttttattcacccttaagccctacaaaaaattatgtctttatgctacttagtggaactcttgctaattttgttgtacgcatattttaggtaacccaaatgttgaggttgaggaagtcgcaaaggctgccgcacgagtcccctagtgtggttttcctattttttattgccacacgagaggactcgtgcggcagcaatggctattatgaaccacaaatatcttaaataaaagcttgcccctacttcgataggcaaatattcctctcctccataatcttccgcatattaataagtgcataccgcattctaccaagggctgtgtttatgcttacattggtttgctcggctatttccttaaagctaagccctgcatagtgcctaagcagaacaacctctttctgctcgtcggggaggcagtcaacaagtaccctcacctccgaaagtatttggtcgtaaacaatatgctcctccacattcttatcggagaaacgggacgagttaaaaatatccaccggggtactctcgttcgataccgtattaagctgtttctcgcgcctaaaatggtcaattatcaggttgtgggcaatgcgcatcacccacgatacgaaacgtccgttatcggtgtattttcttttctgtagcgattgaattaccttaacaaaggtgtcctgaaaaatatcctcggctaaagtatggttcttcaccaagagcagaatgtaaccaaatactcttttgcgatgcctgcggataagggtgtcaattgcctgctgattgcccgaaatgaactgctctacaagctcattgtcagataggtgctttatgctcaaatccatctccttacttattgattagttgggtagatgtgattctataggcaatcgattttaatggttagtgtttgtatttgctagcatttactgtgccaaataagcgaaaaaaaacaaatctaccaaaaaaatgtaatacaaaagcttgctatgagttgattattagggaaatgatgattctgttgctgtgagcctgtgtgtttaccaatggtataaaagcaaatctttgcctacatttgtgggttaatttctacagtaatgcaaaatcagaatgtaatttccattaaaggcgctagggttcataatcttaagaatgttagcgttgatatacctcgaaataaactaattgtaatatcgggtctttcgggctccggtaaatcgtcgttagcgttcgataccctttatgccgaggggcaaaggcgctatgttgagagcctgtcggcttatgctcgccagtttttaggaaggataagcaagcctgaggtggatttaatctctggaattccccctgccattgccattgagcaaaaggtgaacacccagaaccctcggtcgaccgttggaacatcaaccgaaatatacgactacattaaattgctttatgcccgaattgggcgcacctattcgccgatttcgggcattgaggtgactaagcacagcgttaccgatgtggtgaatttcatcgcctcctttcccgagggaaccaagcaaatgcttctgactccaatcaatattagggagaacgaaacggttgagcagaggttaaccattctggccaacgagggttttacccggatagaggtgggcgatcagattcagcgtatcgatagcaaggaaactcgtcatttgctctccatttcgaaagcaaagcttagcttggtggtggataggttctcggtttcgcacgatgatgacttcctgagccgttgtgccgattcggtgcaaacagcttttgccgaaggcagcggaatctgtgtgttggcaactttcaacgacaacaatcgaagcaacgaggttttctccaacaggtttgaagccgatggaattacctttgaagagccatccgagcacttgttcagcttcaataatccgcttggcgcttgcccccgatgcgagggctatggaaaaattattggaatagatgaggcgctggtggtgcccgataagggtttatcgatatacgaagatgccattgcctgctggaaaggcgataccatgagcgaatacaaaaagcaatttatcgcggtggccgataggtttaagtttcctattcataagccattttatcagcttacacaggaacaaaaggatttgttatggcgaggtggagacggttttgttgggcttgatgatttttttgctcatctcgaaagcaaaaagtacaagatacagtatcgggtaatgctgtcgcgttacactggtaaaaccatatgtcccgagtgtaaagggcagcggctgcgtaaggaggcaacctacgttaaggtatgcggtgttaatctcccgcagctggtcgatttgcccattaccaagctacacgatttttttcagaatatgtgcataaccgagcacgagcaaaaggttgccaagcgaatactaaccgaggtaaggaataggctagcctacctgctaaacgtggggctgggttacctaacgctcaaccgcttgtcgtcaaccttgtcggggggcgaatcacaacgtatcaatttggctacctcgctgggttcgagcctggtgggctcgctgtacatcctcgatgagccaagcattgggctgcatccacgcgatacgcatctgcttatcgatgtgcttaataatttgcgcgatttggggaacacggtggtggtggtggaacacgacgaggagataatccgtgctgccgattacataatcgatattggcccgctagccggccgccatggcggcgaggtggtgtttgagggaacacccaaagcactgctaaaatcatcagaaacccttactgcaaagtaccttaatggtatcgaaattattgcgccagtaaccgcaccgcgtaaatgggccaattttatacaagtgaagggggcacgcgagaataatcttaagaatatcgatgtgaaattccccctcaacagtatggtggtggtaacgggcgttagcggctcgggcaaatcatcattggtaaagggtattctatacccttcgttggccaagaagatatccggggtgggcgataaacccggagagtgcgatggcgtggatggcgatatacatctgctgaaaggggttgagatggtggaccaaaaccctattggtcgttcgtctcgctcaaatccggtaacatacattaaggcttacgacgagattcgcaagctcttctcggagcagccctacgccactaggagtgggtataaaccttcggctttctcgtttaacgtggagggaggacgatgtgaggagtgccaaggcgagggtgtgattaaggttgaaatgcaattcatggccgatgtaacccttacctgcgaatcatgcggaggcaagcgatttaaggaggatgtgctggaggttcgctaccgcgataagaatatttttgatgtgctggatatgaccgtaaatcaggccatcgagttttttggcgaggataaggacaaaacggctatcaaggtggtaacccgattgaaacccttacaggatgtagggcttgggtatattaagctgggacaatcgtcgagcaccttaagtggaggcgagagccagcgcgttaagctagcgttctttctgcagaaggagcaggccactcagcatcagctgttcatcttcgatgaacccaccacagggctacacttccatgatatcaaaaagttgctcgagtcgttcgatgcgctggttaaaaaggggcacagcctaattgtggtagagcacaaccttgaggttattaagaatgcggactggattatcgacctgggccccgggggcggcgagggtggaggtaaccttgtgtttgcaggtacaccgcatgaaattgttaagtgcagcgagagcctgacggggcagttcttggctggaaaggtatagccaaaggtatattatcctaatatgaatttgaaagacagccttgtaaaatagcacctttgaacttaatctaaacgttttggccagccaaagagccattttcttttatcgacactaacctgtgtaattttacccacggggcgattatatgcttagcaatgagtcgctccgtgaacttttcaaaagctaaacacttatttttttcagtaacttttttttagtaattaaagccagattatatggactaatccgcttgtaggttgggtgtaaaattatttagaatgtccaataaaaagcaatataaagttaaacaaaagtatcaaccctctgtttctgtgttgtctttgataacgaacattaaccaaaactataacaactatgaaaacaatgagaactagattcttaagcatcctagccttggcattggttgctacttttaccctcacatcatgcgaaaaggatgatgttaatgaaatcccagctccaacaaatgatgttgtagagctcgctcaagctaccaccgagttgagtacgcttgtaactgcggtagtaacagccaatttagttaccaccttaaaaggatcggggccatttactgtttttgctccaaccaacgacgcatttgccaaactcgaggatggtgtacttgaggtgcttttggccaaccctaccgttcttgctgatctgttgaagtaccacgtggtaagcggtaaggttctttcaacggacttgactactacttcagttcaaacccttctttcgggtaaaagtatttccgtatcggttgcaaatggggtaaccctaaacggaacagcttcagttgttgaggctgatattgaggccactaacggagtggtgcacgtgattgacgaggtgctaattccagagggattcgagctaccaaaggataatattgtatcaattgcagcacaaaccccttcgcttagtattctggtagaagcactatcattgttccccaatcttgtagatgccctaagttccgatggttctttcacagtatttgcacctaccaacgacgcatttattgcgcttcttggtgtaattgggcaggagagcttatcggatatacccgagagcgtaatcgagagactattgaagtaccacgtaatttctggtgcagcccttatgtctaccgatcttagcgatggtcaaatggcatcaacccttcttagcgatgacgataagattaaagtgcaaatttcggggcaatccgttaagattaatggtgcaaatgtaaccgcagcaaatattgaggcctcaaacggagttgtacacgtagttgatgcagttcttgtacctgcgctagagcttagcattgttaatactattgttcagcctgcgtactttagcaagagtttttcagttcttactcaagcggttgttacagcagggttactcgaaaccttagtaaacccagatgccagcttcactttatttgctcccagcaacgatgcttttgaggccgcaggaattacaagccttactgaacttacagctaacgacttaaccccaatcctaacctatcacgttttgggtagtaaggtttatgccaatggattacccagcacgggttcggctgtaactacacttaatggagacttttacttgagtattaacgataatggagtgtttattaatggtgtatcgcaggttacagtagcctcccaggcaggtagcaatttggattttggcaatggtgtggtacacgttatcaatagaacgcttttaccaaccaacaaaactattgttgatattgcagttgaagcttcacaagcatcaagcggtgctgaatttggccaattggtagctgcgcttaccgcagttgagaacgatggaacaaccgataacctaatcaccatactaagcggcgatggtccattcacagtatttgcacccaccgatgctgctttccaagcgctatacacacttgccgaagtaagtgatttcaatgcacttgtcgatgctgttggtataggaaccatcgaggcggttctaaagtatcacgtgcttggtgccagggttttctcaaccgatttgccaaaccttgagagtaataccgtggcaaccctaggtggtaatattaccatcgacttaagtgcattaaaaattattgatactgacgcggctcttgagttgggcacagctgatgcctcaatagttgcaactgatattatgggaaccaatggcgtgattcacgtaattgatcaggttattcttccctaaacactagttaaattcatcaatttgaaaggcaatcctaactgggattgccttttttagtgtgtatagcgttcatagggtaattgctcgctaaggaggtagttgccccgtgattttttttcacttaaccaagatttattacaacgatatcgaatctttgccgtttaaattaaagcgcatatattagcatttataatactaaaactagttgttatgaagattttattattggccatagtattgacctgcatagctaaagtaggattttcgcaagaaatacgaaaaatcaccaagaaagatagaaattcgcctgttattgaagagtactacgtctttaggaaggagagagacgtaaagcatggccagtatgtaaaaatgtatgagagtggggagctagtagagacaggcttttacaaaaaaaacctaaaggatagcctgtggattagctatgctataaatggagaggatacattgacctttggaagctataagaacgataggcgtgttggcccttgggttattaacaatagcgatggcactttagattatgaatacaatttcactactaaaaagatcggtaggtataactggaggggtcagtccaatcggttccaggttttaaccgaggggcgttgggtggagcaggagattgacaatccgcccatgatgctcgatggaaacgatcccatcaaaattattgctcgcaatattgagtaccccatacgtgcatggagaggtgggattgatggcgaggttgttgtatcctttgttgttgatagcttgggccgaatgggaagtataaacctgaaaaagacggtggaccccgacctggataaagaggccctacgaattttcaaaaccgttgacttcgactggcacccagcacaaaaggatgataagtatataaccgtaaggtactcgcttcccgttacctttattcttcggaaataatcgttattgcagcaagctttggtaaggtttatactttagctgtgaggtaatcgatgcgttgagtacacccatccaccacccagatgtgtaaaacccaatatggaatagactaaatgagtagtatttaaaagtccgatatgctattgcagcatatcggactttttttgtatgatttcgatataatcttatggaaaagtgaagagagaagtataagaatattttgaatgctttggaataatcgttaagtttgagaacggatgttgattaggtgcatatattaagtagctaggttttttctttttacagtagggaatatgctccgtctattacaacgagggaggtataaataaaaacgacacctagtaggttaggtgtatttgttcgctattttttatttagggtgtttacggagcatttaagcaaaaaaataccctcgtattgtaagacgagggcggcttaaatgttttattcgccctttgtattatttcataaggtgcttatgaaacatttaaagctagtttaaacgaaaacgacacctaaacaagttagatgccgctttaaatgttttcacaacggaataatccttattgtgaattgcttcaagattgtaatgcaaatatataactctaaaacctaaaacgcaatagactatgaaaaaaatattaggattggatttgggctctgcatctattggctgggcagttacttcagaggaaaatagtaatggggaagttaaacgagaaattctgggtttagggagtaggattgttccctatgagggtacagagggaaaagactttgaaaagggtacaggtgaaagcaggaattctgttagaacaaaaatgcgtactgcccgaaagggttacgaccgctaccaacttcgaaggaagtacctagtaaatgagttgataaaaaacgaaatgtacccaaccgaagaggtgaagaatataccaaaaatggagctttgggagctgaggaatagagccgtaacatcaaaaatttcacttacagaattagggcgtttattactttggctcaaccagaaaagaggttacaagagtagtagatgcgaagccaatttggataaaaaggatacagattatgtagcggaggtaaaaagccgccatcaaaccataaaggaaaaaagccttaccattggtcaatatttctatcaacaactatcagatgatgagttctttagggttaaagaaaatatctttccaagagaggcttacattgaggagtttgaggccatttgcaagcagcaacagaaacattatcccgatctgattacggaaaagtttattcagaaggttagggatgagattatttactatcaacgacctcttaaatcacaaaaagggcttgtttcaatttgcgagtttgagggtttttggcttaaaggcaaggatgacaaggagtattttgttggacctaaagttgcccctcgtagttcacccatttttcaaattgccaaggtatgggagaatgttaatagcataagaattgaaaataaatatggcgacaagatagagctatcacttgaagagaaacaagcaatttttaatcatcttgataataatgagaacctaacacaggctcaaattataacgattctcaagctgaaaaagaacgaatgctttttcaacaagcaaatcgcaaaagggattaaaggtaatgttaccaaaacggctataataaaatgttttgaagagtctaaaaattatagccatcttttaaagtttgaatatagcatttgtgaagataaacttgttgacaaagaaactggagagatacttgaggatatttcatatcgctacatagaccccagaatcgaaaacgaaccctactatcagctttggcataccatatactcaattagcgatatggatgtatgcagcagagttttgcagcagaaatttagtattgaacctgatgttgccgataaattagcaaaacttgacctaacaaagggtgggtttgggaataaatctgcaaaggcaattcgtaaaattctgccgtacctaatggagggctatgtttatagcgatgctatgctttttgcggggtacgaccactcaaactcactaacaaaaccagaaaatctacaacgtaaacttcttgaaaggcttaagcccattccaaataattcgttacgccaaccaattgttgagaaaattctcaatcaaatggtaaatgttgtaaatgcaaccatcgacaagtacggaaagcccgacgagattagggttgaactagcacgcgagttaaaacaaagtaaggaggagagaagcgatacatctaggtttttaagcaagcgggaaagagaaaatgagcagattgtaaaaaaactcgaagaattcggattgagagccacaagaaacaatattgtaaaatggcgactttacgaggaaatggataatgaggataagaagctaaacgccatctgcatttactgtggacagcccatatcaattaccgaagccataaaagggaacgatgtggatattgagcatataattccaaaatcgaagctgttcgatgattcccaaagcaacaaaaccctcgcccacaggcgatgcaataccgataagggcgatcgcactgcttacgactttatgaaagggaaatcggaacaggctctagtggcgtatgttgatagagtgaataaactctttacgagcaaaattattggtaaagccaaacgcgacaaacttttaatgaccgaggataaaatcccccaaaactttatcgaccgccagctgcgcgagagccaatacattgcccgaaaggccagagaaatacttcaaaccatttgtcataatgtttggtcaacctcgggaactgttactgcagaacttaggcatttatggggatgggacgatgttacaatgaacctacaatttcctagatacaaagaattgggattaactgaaattagagagtgggaaagcgaacacgggaaaaacaaacattcaaaagaggttattgttggttggtcgaaacgcgacgaccatcgccaccacgccatcgatgcgttaacaatagcctgcactaaacagggatacattcagcgtttcaatacgctaagctcaagcaaaacccgcgacgacatgaaaaaagacgttgatagacgttctattgagtaccgcgaaaaattaaatctgcttgaaaagtacctaattagcgaacaaccttttaccgtaagggaagtggaagaaaaggctgcaaacattctaatttcttttaaagcaggcaaaaaggttgctgtagttggaaagcgcaaagttggacgaagaggcaataagaaggtagtgcaagagggcataattattcctcgtggcgcactcagcgaagagagtgtttatggcaaaattaaaaaggttgaggcgaagaaacccttaaaatacctttttgagaatccccatttaatttttaaacctcgcattaaacagctggttgaagagcgtttaggaaaattcgatggcgataccaaaaaagccttagcatcaattaaaaaagagccaatttatcttgacaaaaaaaaatcgacactacttgaatacggatcgtgctatagcgatgagtacgtaattaagtatagcatcgatatcaacttcaacaaggttgataaggtaattgatgaaaatattaagagaatactccagcaacgactcaaaaagtttaacggcaagcccaaggaggcatttaaagatgttcagcgcgacgaaaaggttttaaaatggtatgaggacgaagggcttgaacgcccaattagggctgtacgatgctatacaggcctttctgctgtagtgcctgtgcgcaaggatgcaaacggtaaggaaataggctttgtaaaacctggcaacaaccaccatattgccatttataccgatgctgaagagaagaaaattgaacatatttgcaccttttggcacgctgtggagcgcaagaagtttggtctaccagtaattataaccagtactaacgaggtttgggataaaattcaacaatcagcagaaggtacttaccccgagagttttctaaagctattacctgaaccccaccttaccctccacctaagcatgcagcagaacgaaatgtttgtgctgggtatgacaaatgaggaatttgagattgctaaatcaagcaatgattatagggcgttaagtgataagttgtacagggttcaaaaattgggaggggatgattacaattttcgacatcacttagagacagaactagtgaatgataacaatgcgaaagtcagtaaaagattttttagggttaatagtattggtgcattggatggattaaatccgattaaagtaaaaatcaactgtattggcaatttggtttaatctacttaaccgtcagtccgggcgcgacttcaagtcgcgcccggactaataaaaaatcgcaattgcctcaggttactcaaggcttgactccaagtcaaaccttgagtagagaaaactaaaagctatgatatttgaacagggtcacctataccatatctacaaccagggcaataaccgccagcgcatcttctttagcagggagaattacctgttctttttggataaggtgaaaaagcatatgttgccctacgccgatatcttggcctggtgcctaatgcccaaccattttcattttatggtgcatgtaaatcacttagagttgcctcaggttactcaaggcttgacttcaagtcaaaccttgagtagtgaaaaaatgcaaccattcaactactcaattggtgttatgctccgctcgtatacacgagccattaatatacaggagaaccgcgctggagccctcttccgtcaacaaacaaaagccaactgtttaacacgagtggataaaatatccaaagcatggtatcaggcgcagggtgtaacccaagttaccatcgattaccctgaccaacaatacccaaacatctgctttaattacatcaaccttaaccctgtgaaagataagctagttaagcgctgcgaggattgggagttctcctcttatcccgatattgtagggctgcgcaacggtatgttgataagcagggagaggattgcagagtttgggctgcagctaatttaaacgttacggtactcacgggttgactatttgctaagcaaagagtcaacccgtgagtaaaacttaacccttaaacctatgataaaacgtaccctttacttcggcaacccagcttacctcagtatgaaggataggcagctggtggtgcaaaaggaagttacaagtccgggcgagactttgagtcgcactcggactgatatttctaccatccccatcgaggatataggcgtagtgatgctcgataacccgcaaattaccctaacgcatccattgctaaatgcccttttggcaaacaatactgcagtaataacctgcaacgagaggcatatgccatcgggtatgttgctgccattggagggcaatacattacaggccgaacgctattcgaaccaaataaacgcgagcgttccgcttaaaaagcaactttggcagcaaatcatacaggctaaaattgccaatcaggctgccgtgttgcaagagaaaggggttgatattgaaccaatgcgctactttcagcgtaatgttcgaagtggcgatcccgataactacgaggggcgtgctgcagcttactattggaaaaacctgttcgatggggtagtggagggcgaatttaccagaggccgatttgaggacgatcccaacaatctgctcaactatggctatgctgtgttacgagcagtaattgcacgtagcctggtaggttctggccttttgcccacactgggcatccaccacaggaacaagtacaatgcattttgcctggccgatgatattatggagccttatcgcccttatgttgataggttggtattatcaatacttaatgattttgatgatgtgagcacgctaaccaccgagctaaaagcgaggctgctggtaattcctgcgcttgatgttgtaatagatggtaaaagcagtccgcttatggtggcatcgcagcgaaccacagcttcgcttaacgattgctttgagggtgctagccgtaaggtgcttcacccagttattctataactactctagggttgactatatgctgagcgaatagtcaaccctagagtagaagaaatataccgtgagttataacctcttaagatatgaccacaaccaaccgattaaatcagtacagagtaatgtgggtacttgtttttttcgatcttcccaccgacaccaagaaggacaggaagatctacgcacagtttcgtaagcaaataatgaaagatggtttcaccatgtttcagttctcaatatatacccgctgttgtcctagccgcgagaatgccgaggtgcatataaaacgagtaaaatcgctgttaccaccaaggggcgatattggcatactatgcatcaccgataagcagtttggcaatatggagctatttcggtcaaccaaacccataaaagctagccccgatccccagcagctgcagctattttagctattgcaatctagtccggttacgacgattgcttgtcgaagcaaaagttgcgcccgtactattatagtattcaccccgtgattaaaaaacaaaaatccccccaaaaccatttggagggatttactattgaacacttttttttattaaaaaatacgacctaacgaattgtgatacaattttttgacctatggtatgttgtgttcaataagtcaaagatacaatctgaaagcaattcacaacggtattatgcagttggagaatacggcactagttgtgttcaataagtcaaagatacaatctgaaagcaattcacaacttacgtcaaggacgaaacaccttaaaggcagttgtgttcaataagtcaaagatacaatctgaaagcaattcacaacactttcgacaagtcatacgtgagtatggttgttgtgttcaataagtcaaagatacaatctgaaagcaattcacaacttctagccactgtacaatttcatcctgtatgttgtgttcaataagtcaaagatacaatctgaaagcaattcacaacaccccctcatgcacccccctgcctggtatggttgtgttcaataagtcaaagatacaatctgaaagcaattcacaacagcgtaatggcgagctaaccatatcaaaaggttgtgttcaataagtcaaagatacaatctgaaagcaattcacaacacgaaatcgtagggaatccaagctaagaatgttgtgttcaataagtcaaagatacaatctgaaagcaattcacaactataaatgaggatgaaattgacgagcaggcgttgtgttcaataagtcaaagatacaatctgaaagcaattcacaacggttgcatttaataccgataaaacttttacgttgtgttcaataagtcaaagatacaatctgaaagcaattcacaacgtgagaagtttacattttcggtactgcagagttgtgttcaataagtcaaagatacaatctgaaagcaattcacaaccaacaaaggcagtggatgtggttgtgataggttgtgttcaataagtcaaagatacaatctgaaagcaattcacaacagcgcatttatgatttcatcaatacttttggttgtgttcaataagtcaaagatacaatctgaaagcaattcacaaccgaccacgacgaggagaattggaacgataagttgtgttcaataagtcaaagatacaatctgaaagcaattcacaacgaaacaaccaaagtatttaaacacacccgagttgtgttcaataagtcaaagatacaatctgaaagcaattcacaaccgatgtgcatatcaggggaaccgatatggtgttgtgttcaataagtcaaagatacaatctgaaagcaattcacaacaattaaacttattgacacaacggattttttgttgtgttcaataagtcaaagatacaatctgaaagcaattcacaacaggccggccggggtggtggcgctgggggtggttgtgttcaataagtcaaagatacaatctgaaagcaattcacaacccaacttctcacggctaatggcgatttttggttgtgttcaataagtcaaagatacaatctgaaagcaattcacaaccgtggtaattgataggcttaaagctaaccagttgtgttcaataagtcaaagatacaatctgaaagcaattcacaacagcgcaccgcgtgcgtggcaaggcggttttgttgtgttcaataagtcaaagatacaatctgaaagcaattcacaaccgatacggggaggggtatcgccccggatgagttgtgttcaataagtcaaagatacaatctgaaagcaattcacaacgcgctcgctggtggcatttacttccatttcgttgtgttcaataagtcaaagatacaatctgaaagcaattcacaaccgaggacgtgcaggccgagatagatgcctagttgtgttcaataagtcaaagatacaatctgaaagcaattcacaacttgcgggagtgtccgtttttttatttagaagttgtgttcaataagtcaaagatacaatctgaaagcaattcacaacgaacggggtggtgtttcagccctcgtttaagttgtgttcaataagtcaaagatacaatctgaaagcaattcacaacggatggccgcgtaagggaggagcacgcagcgttgtgttcaataagtcaaagatacaatctgaaagcaattcacaacaataagcgagtcggatattctaataatgtcgttgtgttcaataagtcaaagatacaatctgaaagcaattcacaacaggactttgccgacaatgtggaggatatggttgtgttcaataagtcaaagatacaatctgaaagcaattcacaacgataagggcgagatagtggtaaatcccagcgttgtgttcaataagtcaaagatacaatctgaaagcaattcacaaccggtaataaggggcagcatctgcgccacgtgttgtgttcaataagtcaaagatacaatctgaaagcaattcacaactaccttcccgtacttaccttagccgcttgagttgtgttcaataagtcaaagatacaatctgaaagcaattcacaactatcaattgccgcctccacaatggtatcgtgttgtgttcaataagtcaaagatacaatctgaaagcaattcacaacgaattgccgctgtagaattgtacccctcacgttgtgttcaataagtcaaagatacaatctgaaagcaattcacaactgggcttctcctccttttttggcttttgctgttgtgttcaataagtcaaagatacaatctgaaagcaattcacaacagcaaatggatgcgatgaagggattaaagggttgtgttcaataagtcaaagatacaatctgaaagcaattcacaactttacccgtgccaccttcgccagcgagatggttgtgttcaataagtcaaagatacaatctgaaagcaattcacaaccacccccggcggagcaatacaatcgctttagttgtgttcaataagtcaaagatacaatctgaaagcaattcacaacagcgtaatggcgagctaaccatatcaaaaggttgtgttcaataagtcaaagatacaatctgaaagcaattcacaacctaccacgtggagacctgcgtttcgaagtagttgtgttcaataagtcaaagatacaatctgaaagcaattcacaacaggcgagtggctacagcctaaagatattctgttgtgttcaataagtcaaagatacaatctgaaagcaattcacaacacaaaggtgtaagaagtcctataagttgtggttgtgttcaataagtcaaagatacaatctgaaagcaattcacaactatcgctgccgagttgcgtcgcattaccgagttgtgttcaataagtcaaagatacaatctgaaagcaattcacaacggttgctttcaataccgataaaacctttacgttgtgttcaataagtcaaagatacaatctgaaagcaattcacaacaactactcaatgctagtaccaacgtgcagcgttgtgttcaataagtcaaagatacaatctgaaagcaattcacaacaggccgttacctcacccgctgcggtgatgtgttgtgttcaataagtcaaagatacaatctgaaagcaattcacaactttcgacaatgtgactgccttttcactcaagttgtgttcaataagtcaaagatacaatctgaaagcaattcacaactccctataatgttaaggtaaaggatatagtgttgtgttcaataagtcaaagatacaatctgaaagcaattcacaaccaaacggcaattaccctgcgcccgttattagttgtgttcaataagtcaaagatacaatctgaaagcaattcacaacaacgcctgagctgtacttaatcttttttgcgttgtgttcaataagtcaaagatacaatctgaaagcaattcacaacacacggctcttcataataaaagactgcgatgttgtgttcaataagtcaaagatacaatctgaaagcaattcacaacacgtcgcggcggattttgcttaccttggtggttgtgttcaataagtcaaagatacaatctgaaagcaattcacaacaagatcgtcggggcaaaggaaatgggttaagttgtgttcaataagtcaaagatacaatctgaaagcaattcacaacagcgttgttaactctcttaccagtgggaaagttgtgttcaataagtcaaagatacaatctgaaagcaattcacaacggagcggaagtatatccgcccattccttgggttgtgttcaataagtcaaagatacaatctgaaagcaattcacaacacgtgtaggtgacggggttaagttgattgagttgtgttcaataagtcaaagatacaatctgaaagcaattcacaacggatttatgctgcttgccgcagcagtggcagttgtgttcaataagtcaaagatacaatctgaaagcaattcacaacccaagttccgtcattgccctttcgagcattgttgtgttcaataagtcaaagatacaatctgaaagcaattcacaactaccatcctcacgcaaaaaagcaagatagagttgtgttcaataagtcaaagatacaatctgaaagcaattcacaacggtgcgcagggcgtaatcccaaatcttatcgttgtgttcaataagtcaaagatacaatctgaaagcaattcacaacggtcgttggcagcaaggcgcatatcgagtagttgtgttcaataagtcaaagatacaatctgaaagcaattcacaacagtagctcacctgacccgctgtgcccgttcgttgtgttcaataagtcaaagatacaatctgaaagcaattcacaacagcaaatggatgcgatgaagggattaaagggttgtgttcaataagtcaaagatacaatctgaaagcaattcacaacgctcgtcgggtggggtatggttgcaattatgttgtgttcaataagtcaaagatacaatctgaaagcaattcacaaccaccgcttgcgatatctgctcggagtgtgggttgtgttcaataagtcaaagatacaatctgaaagcaattcacaactcagggcgtactacgatgtaatcgggaaaggttgtgttcaataagtcaaagatacaatctgaaagcaattcacaacgcgatgagcccaaccgaaattacacgcatagttgtgttcaataagtcaaagatacaatctgaaagcaattcacaactttaaccgcagagagcagtgccgcctactggttgtgttcaataagtcaaagatacaatctgaaagcaattcacaactgcatccatagcattacagaattttttttggttgtgttcaataagtcaaagatacaatctgaaagcaattcacaacaataaataatttcacgcttctgggggcaaagttgtgttcaataagtcaaagatacaatctgaaagcaattcacaactcttaataaattgtcatctgaactaattaagttgtgttcaataagtcaaagatacaatctgaaagcaattcacaacggagcgtaccggcatcgacaactagctcgcgttgtgttcaataagtcaaacctgcccgactgcgtcattcaggcggggatacaatctgaaccgaagacccgttgttctttaacgggtcgagctcggcggagccaacgcaattcacaacaggcagttggcgggttgccctagccatagtgttgtgttcaataagtcaaacctgcctgcatgccatcccttcggcaggcgggcctgcccgactccgtcagtcaggcagggatacaatctgaaccgaaccgccagttggcggtgagctcggtgaagcctgcaaacgtattttgtgagctggctgagtcaatgcaattcataactatgggaaaagcgaatcgtcgaggggaatatttacctctttaattattcaatttgttgcttttgtaataacgaaaaacttagtacaaacaaaacgacacctaataaattaggtgccgctttatatgattttactgtctagtattttcgaaatatatcattgagggtaaatcccaagcgaacgccagccagaaatagtaagttttcggcaactgggtgaccttgctccaggtaatcggttgtgatggtatcggagctaagtgtgtaaaccgttggcagggcattccgcccatcgataaaccatgttgtagcatttccttttgctatgcgttttagttctcgtttcttggtttctttcagcttgcttgatatattttcttcaaagagttgatttgtttcaattatctcggtatcccatattcgatgtaggctaaatgatttgccattgaaaaccacccttacatcattgcctcctcgatcagatccgtaaccaacgtgcaatgggttatgtaagtcgcccatgaggtgaaaaagcacctttaggtttagctttacctgctcgggggttaagttccgtcgattctttaggttgaaaattgccgaatcgagctgggttaccacattatcgccattttcaatggttggactgtatgcttggcctttgtcaacattgatgtagtgccatttctgcatgtaattgtattgtgaattacctcgtagttcgtccatccaggttgaggcagcatgccaggtgtcatttgcaaggtacttgctaatggagtctaatgtgctattggaaacatagttttgggcaatatcaacaattgtatgatgtcctgttcgcccccaaccaaaacttgcaatcgatactgaggttaacaatgcaacgagagaaactagacgtaatttcgctatgatggttgttttagtatttcttttaagttgtagattcatagttagatatggttaatggtagtgatctagattaaaatattttaattaatgtaaaaaggggtaaacgaaatatatagtcgaaagttaaccttttgtttaattattaaaggagaaattgtctgaatagtccgttttctgagagaatggcggagttaaagtagatcccaataacgtcctccattttactattcctcagggggcggcaatcagctatgcaaacattcggctcgtgaggagtagggggggcttgtgggtgcaaattgtgtgtacaacaaaaaaccacctacctcgataaacgctgtaagtggttgaatgttagtgtgggaactgctggcttgctcgctctgctcgtgagcgaagttcgaatttacctgtcgaagacaggccaacgaccctcccgcccgcagaggcgggatgctctgcaccagctgagctgagctgaggttaccgctttgtgtatagggattcgatacgcttgcggctcttccagctcttaatctcccgctcgcgctgaagggccagctcaaaggtctcgaagggttcggcgtacatcagtactacccagtcgttggctctgcctgtaaaacccttgtggtgggcgttgtgccttcggatccgctgctccagttcatcctgcgaggcacccacgtagtgcttgtcgagctgcgcggagtatagtatgtacgtgaaggccatagggggttttgtgggtaaagtagtatggataacaaaaaaccacctacctcgaaaaacgctgtaagtggttgaatgttagtgtgggaactgctggcttactcgctccgctcgtgagcgaagttcgaatttacctgtcgaagacaggccaacgaccctcccgcccgcagaggcgggatgctctgcaccagctgagctgagctgaggttaccgctttgtgtatagggattcgatacgcttgcggctcttccagctcttaatctcccgctcgcgc

SEQ ID NO: 1736 - DNA, 23678 bp, synthetic construct
  source 1..23678: mol_type = other DNA
  misc_feature 1..23678: note = Synthetic
tgaattcagatttaaagattttgtaataaccggtcatgattcacttcaaatcgcacttcaaaagaaattatttaatctttacaaaacggggcttcacggctttcaccagctctctaattctgctctggctgttaaaactgtgagtgaatctgtcggaatttcagattccgtcgttgtaaatagaggcttgatgaatgttattaaaaacactggaattcaaggccgttatgaagtcattcagaaaaatcctaaggtgatttttgatgccgcacataatgtggaaggagttaaagcattcctgaaggtgttcgaaaaggaatatcagatttacagacgcagggaattgatcttcggagttatgagggataaggatttgagctcgatgctcggattgctccgtaattacttcgatacaatttatgcggtggaaaccgggtatgaacggtctgccggtatttcagaaattattgatgccggaggggaacttggtttgcagttgaaacctcttgaaaatccttcccggtttatcgaacaattccggaccgatagggataacgaatgccttgtcgtactgggcagcatctacctcctgggtgaattaaaatcaaaaatgtcttaaaaaaaacttgacaaaaaggggattgcgggctaactttgacatgtgcctcaataatcttctgcattaattaattaaatcacttaatcattaattcaattagtccccaaattgtaagcctagtaaaaatcacgaataaatcacaattctcaggaaatagttatgccgatggatatttcagaactgcaatcgaaaaaaattgtagatctctataagattgcaaaagattttggattagctggttacagcgatctccgcaaacaggaattaatttttaaaattcttgaagcacagtcccagaaagatggattgaccttttcgaaaggagtgcttgaggtcttacaggatggttacggattcctcagatcagccgattataattatcttccttcacccgatgatatttatgtatccccgtcccagatcaaaagattcagtctcagaaccggagattttgtatccggacaggtgaggcctcctaaagaaggggaacggttctttgctctcttaagagttgaagcggtgaatggtaaagatcctgaagctatacgtgaaagaactttattcgataaccttaccccgatctacccgactaaaagattaaaactggaatccgctcccggcgagtattcaatgagaattatggatctcctttcaccgatcggtaaaggtcagagaggtttgattgtttctcctcctaaagccggtaaaactattcttcttcagaaaatagccaactcaattacgcgtaatcagccggaagttaaaattattatgctccttatcgacgaaaggccagaggaagttaccgatatgcagagatccgttcaggcggaagttataagctctactttcgatgaaccggccgaccgtcacgttcaggttgctaacatggtaagcgaaaaagccaaacgtatggtggaggcaggggatgatgttgttatcctcctcgattcaattacaagacttgcaagggctcacaacaccgtaattccgcacagcggtagaattctttcaggcggtgttgacgccaacgcgcttcataaacctaaaagatttttcggttctgcgcgtaataccgaggacggcggaagcttaacaattatcgctactgctcttatcgataccggcagcagaatggacgaagttatcttcgaggaattcaaaggaaccggtaatatggaacttgtcctcgatagaaatctggccgataagagaatcttcccggcaatcgatcttaataaatccggtaccagaaaagaagaacttcttctcaaagaggaggagcttaataagatctggatcttaagaaaattgcttgctgactacgatccaaccgaggctatggaattcatactcgataaaatgcgcggtacaaagaataacaaagaatttttattaagtatgaatagttaatccaggatatgattattgcccggagatttttctatccgtcattcgttttaatattcttatcgattcttctttcaaccgtttctgctcaacccggtaaaggaggggaacgcggtaaacctcccggttttttcgaaaaagtatttctgtccgacggggattcaatcgattgctacctcgctttcagaattccgttcgacaagctgatatttgttaaaaatggcgacttgttttcttcaggtgtaaaaattgatctggaaataataaaccggaacggattgatcgatagaaaatcatattctaaaagtactgtggcaattaactatgaagaatccaaatcaaaaagcaggttcctggaaggatttatcaaaatcaaaattgatgatggcgactatgtaatctatcctgttattcagatcgggaatgttaaggaatcttttaagctcgattctgtttcgatctctgccggagagattaagaaaggaaatctgctccatccggtaattgttgaaagtcttccggatgaatgcatcaataatggatcgtatcgacttgtaaataatagcaacagcattccattcgcacctaacgactatttaatgattataccgttgaccggcagccctgctgaggtttattcattgaaaattcttcagaaggggaaaacactttttcatgaagagtcggtaaaacctggaaacggaaaattatcgctctcattctgcaatgatgcggttgttatctccgactcaaatacaaatcggaaaacaaattatataattgttaaaggattcaataaaaaattagatgaaggacctgttgagattattattgaatcagacgggaaagaagaaaaatttaaaatgagtgttgattggctgaataaaccatttacattattcaatccggtattgtctgctgaattgctcgaaattatttacagtcgcgaggaattactgccgattcttaagagcagtaatgatgaaaagtatgaggcattgatcgatttctgggataagaaattgcccggaagggaatatagatttaatgaattgatgaacgagttttattcaagggcagattatgctgcccagaatttcagtactatcgcaaatcctgctggggcaagaaccgatcggggaaaaatatatataagattcggaagacccgacgacattaaacgtgattattcgtccggatacggcacagtcgaaatttggtattactatgatttgaaaaaagagtttatatttaccgataaaactggccttggcaattatatattgagtaaataaatggcacgcctggtttttacatgcggcgatatcaacggcatcggtcctgagatatgcattaaaacatttaataaaatttttaatccaagtaaaagagaaattatttttctctgcccctcagatgtattcaaaaaaactcttaaaataattcctcttcatgccgattatcaggtgatctccgataaatccgccggactgattgattctaaaaaaataacagtcatcgatctcgggaaatataaacagagaattggtaaaccaacggcatattccggccgggcatcttacaacgcaattgttgatgcggttaaactctgcaggtccggctttgcggacgcaatgatcacagccccaatctcaaaaactgctcttcagatcgccggtttgaaatttaaaggtcataccggacttttagcgtctcttaccggaagcagaaattacctgatggttttcctgtcggatgaaatggtttgcggactaacaacgattcatgtaccgcttaaaagtgtcagcagactgattactacaggtctactgcgtgatacgattaagacgctaaatgattctctggttggtgacctcggcttcaggaatcctgagattgctgttctcggattgaatcctcattcgggagaggatggacatcttggtaatgaagaagtcgatataatcatgccggctattaagtctttgaaaggtatcaaggtcaggggtccatttgttccggattctttttttggcaagcatctttataagaattatgacgctgtccttggaatgtatcatgatcaggtattgattccctttaagatgctcaatttcgaaaaaggtgtgaattatacggcgggtttaccgattataagaacctctcctgatcacggaactgcatttgatattgcgggaaagggagtagccgacgaatccagtatgatccaggcagtccgctgggcagaaaaaattattatcaatcgaaataaaatctgatgccctccagaatctattcgcatctggccccggtctaccctcacttaatgaggtctattgattattcattatggtccgacttcattcattccatcagccgggaaattaaaagaaaaaggatttcagttcttgaactcgcatgcggaaatggtcttattgcaggaaccctgaataaaaaattcaaatactactgcgcaacagatctctcgaaagagatgctcgcgtgcttcggtggagtggataaagtctgctgcgatatgctggcccttccattcaagaaacaattcgattttattttctcaacattcgacagtgtgaattatttaacgagcaggcagagatttatccggatgcttaaccaggcagctttgtgtctcgcacgggatgggatttttacattcgatgtaagtctggagaataacagtaagctgtatcagaagtatttgaaccgtaaaggaacatacaacggaatgaagtttcttcagaagagttattacgatgaagctaaacggattcattacaattattttgaattgactcttgctaatggcagtaaggttgaagaaattcataaacagaaaatattcaggttcgaggattatttcagttttattgatgattccgacttctatgtttataagtgcaaaaaagcgttttcggaacaggacgcttcaccggattccgaaagagcccaattcatacttaaaaagagaaggggatgatgctcatatttaatcatgtagatttcaattaccctaaccaaccggtttttaccgatcttaatcttcaggttgatcagggtgaattcgtttttctaataggtaaaagcggggttggtaaaacttctctgcttcagatgatttatatggatattctccctcagtccggatatgtccagataggtgattattcttcggaatcaatccggccgaaagaacttccgttcctcaggaggaaaatagggattgtgtttcaggactttcagcttctgccggatagaaacgtatatgataatctcgcgtttgtacttcagtctaccggttcttccggaaggttgaataagaaaaaaataattaatgccttatccgaagtaggattgtctcataaacagagcaacatgccgcatgaattatcgggcggcgaaaaacagcgtgtcgcaatagcaagagctattattaacgacccctttatgcttcttgccgatgagccgaccggaaatcttgatccggaaacggcagacgaaattcttgaaatcctgaagaagataaatgctcgaggtacgtcggtaattttcgctacgcataattatgatctggtaagaaaatataatgcgaaaataatccgtctggaaggcggtaaagcggtaaaggtgttattgaaaaagaaagagagttgagttagttaagctgcttcaaaatctcctctgttaccttctcaatcgacattgtcccgtctatctcgatgattgtagctttgtccttgtaaaaattgaaaaccggtgccgtcgtttcgtgatagacttttagtcttctccggataaccgattcatcgtcatctgcccgtttgtaataactgttctcagcgcggcagaccgggcaaataaaattctcttttaattcgctgttattcaggatgttgccgcatttattgcagaccatcctgtttgtaagccggtcgattattacctcatcatcagcatctaacctgatcaggtaatgcctttctatttttattattttgaaaatattctctaaaatttctgcctggtttattgtacgcgggtatccgtcgagtataaaaccgtttctgcatttttcattgttcagtgtctctttaattattccgcccattatttcatcgggtacgagttctcctttatcaacaatctcctttgcctttttccctaactcggactgatttttaattgcctctcttagtatatctccggttgaaatatgagggatattaagtctggacgctaaaatctttgcttgtgtccctttcccgactccaggtgaaccaaaaatgattatttgcatattattaaaaatggttagaggattaaaaaatattttactgaccaaagttaaacagatttgattttatagccaaacttaatttccaggcttaggtttatccctttttttctgaaaataactttcgagtagaaactttgcctcatcggaatagatccctgaataaacgtttggcttgtgattatacttcccgctttcgattatgttgaaaagggaaccgcaagccccgaatttcggctcgaaagctccaaagtagacatttcttattcgggccaaaagtatcgccccggcacacattacgcatggctcaacagttacgtataagtcgcaattatcaaggaactttgattgcaggtagttcgacgctgctgttagcgctatcatttcggcatgggcggtcgggtctttcaaggtttctgtctgattaaagccgcgtccaataattctgttctcatatacaataacagcgccgaccggtacttcttctacggctaaagcgttgtcagcttcctgaagcgcagcatacatgtacttatagactgtttcatcgaataacataagtcactttacagaaataataagatactttaatcagatagttttaagatcaggttttagttcttaccgggttttccgaacagttattcccgaaatctgtacgcccgtagggactcgaaccccaaaccgtctgatccgaagtcagatgctctatccaattgagctacgggcgcatgcaaaaaaacaaaaaaaatgtagacttgagaagaaactcaactctacatttacaataaattctttattctgtacacctgtagggattcgaaccccaaaccttctgatccgtagtcagatgctctatccaattgagctacaggtgcattcaaaaaaacgattttttcaaacttttcttaacagcaaattgaacattccagacattcgttacactaagtgtcttaatagtgtcttaattttttccgtccaatttgcttcgcaaatactcgaaattagtcttaatataattctcagaagttctaatatccgtatggtctaaaatatcctttatcgatttaatatccaaacccgccttaccaaattcagttgctgcggtatgacgtaaatgatggaatttataatgcttggagatccttttctcctcagtcagctttgttatgccgtagccgaacttatgggaaattgtactctcgttcaatttggtaaaccgtcctacaaaatactccttatacccgcagcccagcaggaactcctccagcgccttatagatcggaattacgaagtccctatccgctttcacatttctggcctgaataagtcgcctgggcatatctatgctcattggagcgcatatggtcgaccgtctgaacccggtcagcagggcaaactcaattatcctgtaaaacaggggatcattctccgcaaaatacttccggatttctattaggtccatttcgtcaatcggtttcggtttctcttttattcttattgcagtaatcggattcttccggatatactcattcttaacgaagtaattgaatacggcgaacacattcctggtaattattcctttagaagcctccgcaaaatcattcttttccaggtagcgtattaatgcctcataatcgaagatggtatactcatcaatccgtttttcacccgcagccgttataaaatgctctacggcgtttttataagaactctcggacgattttttcaggcttcttacgctcaggtaatgcttaaggccgattgatagaggaggggagacctttatattaaaaatcaccttctcattctgttttgcttctattagttttacgaaatgttccgcatctctgcggttgcggcattttgttgaaatgtcttttctcaccccgtcaagcacaaacttataatgccaataaggtgaattcctccccttataaagcgttcccattattttaactttagcttacgttcgaggaccgataccctttcccttaattcgcctaattctttggccatgttgaacaccatcaaatccgttgattcttttcccccgccactaccattaatgatattacgattgctgtgatcattaataactataccgtatttctccaactctttaatgaatttacgactagggtttttgagtttgtttgacaagtttccctcagatattcctagtttatctgctaattccctttgagtcgcgaatttctctagtattaagtcgaccagctgatctttcgttaaatctacaaaagataaatttttacttcccatatcttgcaattactttcgattttatttatattactttcgattattataattatactatatctatatggaaactaaacatttattttctataagtcaagaaaatttaattactttaagtcaagaaaatttaatacatcttcaccttaaaagacttcacaaaagccagacctggcttgctaaaagactcagcaccagaaaaaggaaatactatcagcccgaaatcagccgcgctcttgccggcagggatcctctactccttcagaagatcgtcgatttcttcagcaaataattgctttacatatatatgaataagatccttatttcaaggaatagggctattcaattactcgatactaattcctatatctttaagaacttcatctccccggaactcgagtttgtcagaatcggcgaacgcgagaaagtagtctttcaatccctccaggattatatcgaccgcaataagcataaacccgaaaatttcacctctcaaatctcagcacctgaccgtacccctcagtctatctgtcttcagttctgctcttcaaaaacatctaaaaaagtgaggatcaaccttgaaaaataacatcgagtactattgtcattatgcaaattctcataaccatcctaagttcaaactcctccgactcaaatacggctgggctggagaggggagattttgggcgctcaataatatcatcgccggatccgataactgcatccttaacctcaataaaaaatacgtggtggcgtcagtttcgtcagatcttggtatgagcatagaggaatttcaggagtttatttcttacctgatcaaggaatgtgaattactgattgatattgatgggaatgtttctactgaaaacgtacgcgaaacttttaaggaggtaatgaaacagcgtgtccgaaataaggaaaaccgcgaaaaagccatcttaagcaaaaacgaacttaagcttattagaccaacctgatttgtcgttacaaaaaaacctgtcccaaacacgttctttttaacaaagaaagaaagagagaaagaaagatagataataggaaaccatctaaaatgtgggtagaatgacactattcaatatttacaaaatttgcaatccatattggttaaaattcttgattatattttcccttcttaatattttaaacttaacggctcattaatattacatttcaatttgatcgaattattttgtttttgaataaactacctatccgcagttttaaaataaaaaacccccgttaaaggacgagggcaacctaaatgttttcacaacggaataatccttattgtgatttgcttcaaaatgtttcgttgcaaacataaaaaatatttttgaatatcaaaaggaatttttaagatgaaaaaaatattaggtcttgatcttggcgtatcctcaattggctgggctcttattgatgaagatgataaagagattcttggtgttggctgtagaatagttccattgtctactgatgataaagatgaatttgttaaaggaaatgcaatttctaaaaatcaaaagcgcactctaaaaagatcccagagacgtggatatgatcgatatcaattgcgaagaaaatatctacttgaagtgttaaaacaaaatggtatggttcctgatcaaacgttagttaaactgtctaaacttgatctctggaacattagagctaaagctgtgaatgaaaagttaacattaagtcagcttggcagagttcttttacatctgaatcaaaaacgtggttataaaagtagtagaagcgattccaatctggataaaaaggatacagaatatgtcgcaaatgttaaatcccgttatgaacagcttaaagaaatgggtttgactatcggtcaatatttattccgggaactttcccagaatcagtactttagaataaaagaacttgtctacccacgcgaagcttatattcaagaatttacttccattatcagaaaacaaagggaattttatccagaaatattaacagatgaattgatcttaaaaattaaagatgaaatcatctactatcagcgtggacttaaatctcaaaaaaaccttgtttctgtttgtgattatgaagggtcttggaaaaaggttcaaaacaatggaaaagaaaaagaggtatttattggtcctaaagtagctcatcggtcttcacctctattccaagttattaaaatttgggaaacaataaacaatatccagataaggaaaaaagatggtatctattttgaaattacattggaaaagaaaaaagaattattcaattatctagataacaacgaaaatttaacttattctgaattattaaaaattcttgaattaaaaaaggatgaagtctacagtaacaaaatgcttactaaagcaaaaggtctgcagggcaacattacaaaaaattctatattaagttgcttcaataatattgatgatcatagtcacttattgaaacttgatatagtaatagaacagaaaaatgatgatggatttcttgtagataaaaaaaatggtgagattctaaaatcaaaaccaaaaaaaataatttctgttgaagttgagaagcagcctttattcaaattgtggcataccatttattcaatctctgaaaaagaagaatgtatcaatgcacttataaagaatttcaatctcccagaggatgtcgcccttaaattagcaaacttagatttctcaaaatatgggtatagtaataaatctcataaagcgataagaaaaatactcccatatttaatggaaggagatatgctttatgattcctgttcgtatgccggatattaccatgtactatcaataactaaagaagaaaaccataaaagaaagctgaaagacaaactcgaacttttaaccaaaaatagtcttcgtcaacccatagttgaaaaaatcctcaatcaaatgatcaacctcatcaattcacttattactaagtatggtaaacctgatgaaatccgtattgaactcgctagggaacttaaacagaccaaagatgaacgatacgatacatataagtatttggacaaaagagaaaaagaaaacgaacaaattgcaaaagaacttgaagagtatggtcttcgcgctactcgcaataatattattaaatggcgtttatatcatgaaatttctgaagatgggaaaaaacaaaatgctatatgtatttattgcggtcaacctatctctttttctgcggctatttctggtgaagaagttgaagttgagcatataatcccacgttcaaaactatttgatgattctcaaagtaataaaacattagctcaccgtaaatgtaattcgaataaaaaagaacagaccgctttcgattttatgaaatcaaaatctgaacaagagtttaatgattatcttgaaagaattaacacactttacaaaaataaaatcattggtaaaaccaagagagataaattattaatgccaattgataaaatacctgctgactttattaatagacaacttcgggaaactcaatatatcagtagaaaagccagggaaattctacaatcaatttgtcataatgtttgggttactagtggatcagttacatcagaacttcgatatttttgggggtgggatacagttattgaaaatcttcgtttacctcagtttcgaaatctcggcttaacccaattggaagaaataaacgacaaaaattccaagattaaaagagaaaagattattggttggtccaagagagatgatcaccgccatcatgcggtcgatgctcttactatagcctctaccaaacagggatttattcaacgaattaataatctaaatagtgataatatccgcaatgagatgatgcgaaatattgaaagttcaaagttagagtttaataaaaacaatactctattagaaaactatcttatatcacaaaaaccttttacaacagagcaggttcaatccgtaatctctaaggttcttatatctattaaacctggtaaaaaagttgcttcctttggtcaacggaaaattaaaaagggtggtaagaaaattattgcacaatcaggtatcattattccaagaggtcctctaagcgaagaaagtgtctacggaaaaataaaagttattgagaaagagaaaccaattaaatatttattcgaaaatcctcaccttatttttaaaccatacataaagaaattaattgaagatcggctttatcaatttgataatgatccttatgaagcaataaaatctcttaaaagtaatccaatatttcttgatccagaaaataaaattaaactcatgtatgcctcatgttttaaggacgaaattgtaattaaaaaggatttacaaaccttgactaagccacagataggaaaaattgttgatcccagcattcgtaaaaaattatttgatcgcttagaacaatttaatggtaatgttaaagaggcattaaaagatttggaaaataatcctatctatcaaaatgaagagaaaaaaatcccagtaaaatctgtaagatgttttactggttctgaggtaattgaaccaatccgaaaaaatgaaaagggtgttgatattagttttgttaaaccgggtaataatcatcacattgcgctttattatgatgaaaacaataaaattcaaatgcacgtgtgtactttttggcatgcagttgaaagaaaaaaatatggactacctattgtaattaaaaatccttctagtgtcgttgatacagttttagagtatcctgagttgtatcctgaaagtttccttgaaaagcttcccgatggcaaatggtctttcattcaaagttttcaacaaaacgaaatgtttgttcttgggttgtctaaagaggcttttgaagaggcactttcttccaatgattatcaattaattagcgataacctttttagggttcaaaagctttccacaacaggttattttgttgtatttagacatcatttatccgtttcggctgatactccatatgaaatgatcggcttttcttctttccaggattttactggtattaaagtttctataaacaatttgggtcttattcaataatatgataaagcgtactttatatttcagcaacccagtatatctttcgaaaaagaatgaacagctctattttaattttccggatcagaaagaaaatgaaaaaagatctgaaatcttgaaccaagctcctattgaagatttgggtattgtcgttttagatcatcaacaaataactattactcatgggcttctttcatctttgatcaataataatactgccgtcataacgtgcgattcctcccacatgccaaatggtcttttttaccactttctggtaatacggaacagaatgaaagattccgtgaacaaataaattcctcagaacctcttaaaaaacaactctggcaacaaacagttactgctaaaattaataaccaattgtcagtccttaagaaaaataaagttcctatcaataacatggtaacctgggctaaaaaggtcagaagcggggatccggataattatgagggaagagctgctgcttactactggaaaaatatctttaagcagatacccgattttattcgtgaccgttatggcgaaccaccaaataacctgcttaattatggttatgcaattctaagagctgtgactgcgcgttcacttgtcggatctggtttgctacctacattaggtattcatcattctaataaatataatgcttattgtttagcagatgatattatggaaccctatagaccctttgttgatcttttaattaaatatattatcgataatggtgaagatttttatgaattaacaccttccattaaaaagcaacttctagagattcccactttagatgtcattataaatgatgaacgaagcccacttatggttgcattgcagaaaactactgcatctttatcaaagtgcttttctcaacaattaagaaaaattttatatcctatacttaattaaaaatattatgagatttagcgaatatagaattatgtggattttagtatttttcgatttacctactgaaactccaaaagaaagaaaatcatatactcgctttcgtaaagaattaatgaaagatggtttttctatgtttcaattctctatttatgtaaggcattgcagtagtcgggaaaataagaatgtccatgtaaaaagagttaggcaattactacctgaaaaagggcatgttggaattctatctgttactgataaacagtttagcatgatggaaatattttatggtaagaaaaaggaaagtggttttgttgaaccccaccagcttgaattattctaaataataaggaaccttttagttgggctcctcatttttttaatcctaaaacccccataagttattgtaattaaatgacatcttaagacctaccttggttttaagattgtcaaaaaacattttgaaagcaaatcacaactccgtcccattcggttatcttacttccctgcttggttttaagattgtcaaaaaacattttgaaagcaaatcacaaccctatcggctctcgacatacctctgcttcgcttggttttaagattgtcaaaaaacattttgaaagcaaatcacaacacaaaaagaaaaatggtgataaggatgacgcttggttttaagattgtcaaaaaacattttgaaagcaaatcacaacccgcaaggaataacaggaataatatgattacttggttttaagattgtcaaaaaacattttgaaagcaaatcacaaccaataactcaacagggactatctctctgcccttggttttaagattgtcaaaaaacattttgaaagcaaatcacaactaagtaaaagtaagggattgtcaagtaaaacttggttttaagattgtcaaaaaacattttgaaagcaaatcacaaccgaaagaagaaggaagaaagagttagagcttggttttaagattgtcaaaaaacattttgaaagcaaatcacaacttggtacaaaaggcaaccatcccggctcaacttggttttaagattgtcaaaaaacattttgaaagcaaatcacaactgatcgagctattgtttcaaaactgaatgacttggttttaagattgtcaaaaaacattttgaaagcaaatcacaacaagaaatgagaatgagagagaagagaaagcttggttttaagattgtcaaaaaacattttgaaagcaaatcacaacgaagtcggtatagtaataattgacggcttcttggttttaagattgtcaaaaaacattttgaaagcaaatcacaacgcagccgggagtgcgttatacagcttcttcttggttttaagattgtcaaaaaacattttgaaagcaaatcacaacccatttcattagtgtgtttctatgaatattcttggttttaagattgtcaaaaaacattttgaaagcaaatcacaactgcttcgttttcttccgaaacttttgccatcttggttttaagattgtcaaaaaacattttgaaagcaaatcacaaccacggaatgtaaagctcgtactgcgcgtacttggttttaagattgtcaaaaaacattttgaaagcaaatcacaacattagatcctgtgcaaactcatcatctttgcttggttttaagattgtcaaaaaacattttgaaagcaaatcacaactgatcgtagatgatcataaacctgtcccggcttggttttaagattgtcaaaaaacattttgaaagcaaatcacaacgtttgaagaagagtagagaagcgagaaagacttggttttaagattgtcaaaaaacattttgaaagcaaatcacaaccatcagcttatcaacaatagtgcgtatttcttggttttaagattgtcaaaaaacattttgaaagcaaatcacaactcacaaagtgatttccatattttttgatgtcttggttttaagattgtcaaaatacattttgaaagcaaatcacaactaggagtggctctgcgtataagcctctaacttggttttaagattgtcaaaaaacattttgaaagcaaatcacaactccaatcccatacaggtcgctgatcgcacccttggttttaagattgtcaaaaaacattttgaaagcaaatcacaactcgaggcatataacggctcgacttgggatacttggttttaagattgtcaaaaaacattttgaaagcaaatcacaactcacaaagtgatttccatattttttgatgtcttggttttaagattgtcaaaaaacattttgaaagcaaatcacaactgcctggccggagaatccctgcttaattgcttggttttaagattgtcaaaaaacattttgaaagcaaatcacaactgtttttgttgctaatccggcaaggatcacttggttttaagattgtcaaaaaacattttgaaagcaaatcacaacacatacgcaatcgtgtaactttgctttctgcttggttttaagattgtcaaaaaacattttgaaagcaaatcacaacgtaaggtttgccgtgttcttttatcataaacttggttttaagattgtcaaaaaacattttgaaagcaaatcacaactactgcttaatcttttcaatcattttgtcttggttttaagattgtcaaaaaacattttgaaagcaaatcacaacagttagttcaatggggttatatttgagattcttggttttaagattgtcaaaaaacattttgaaagcaaatcacaaccaggagacttattaatgtccacagtatttgcttggttttaagattgtcaaaaaacattttgaaagcaaatcacaacaacttatcagtaatcataattatctgttatcttggttttaagattgtcaaaaaacattttgaaagcaaatcacaacaaagtgaagataaaaaagaaattaaggttgcttggttttaagattgtcaaaaaacattttgaaagcaaatcacaaccggtagtttcaagaagtgtatttagttctcttggttttaagattgtcaaacctgtcccgttcattttacgggaaaacattttgaaagcaaatcacaacccgtcgtcctcaaacctgttgcctatatccttggttttaagattgtcaaacctgtcccgttccttttacgggaaaacattttgaaagcaaatcacaactaatcggcttcacgacggtcaagaatcctacttggttttaagattgtcaaaaaacattttgaaagcaaatcacaacaggcaggtatatctttaccgataatggtcccttggttttaagattgtcaaacctgtcccgttccttttacgggaaaacattttgaaagcaaatcacaactttattatctcagttttttgtttgactaggtcataattgagtgaccacctgatttttgctccatgcaattctttttgtaaaaaaactatgaaaaacctctaaaattgaatataattaagctcgattatgaattgtctgaatgcattataattcagacttttttttaattgacaatgacttcatgatttttatattttaagtaacttcaaaacgagataatctctttcttttacaaatggaacatattttagatttgttatgtctaagtcatattattgaaatagatcaggttttttaatttatgtataatcaaagaactaaaaaatttacattcaattataaaaaggcaattgcttcattgctgtatgtaagcaatagcgtacataatttatacaacataatgaaagttttttattttgctgataaattgcatttaagtaagtatggaagatttatgtttggcgaaacatatgttgccatgcctaaaggtcatgtaccaagtacgatatatgatatgatcaaatttattcgaggtgatggttcgaaggaatttgatccagaattaaaaaaatcaattattgtagatggaaataaaattaaggctattcaaccagcaaatttagattatttaagtccttcagaaattgaatgtcttaacaatgcaattgatgaatttgggaagttgaatcattcattagtctttttcaaatctcataaagaccatgcatataaggtcactccggtaaatagtgatattgctattgatgatatcgtcgattctcttgataataaaaatactataaaagagtatctcaataatttatacgaataatgccattctcgttttcacccggagatataatctatttagaagaagttccatatacggatcacccaaaatatcatttagtcctttcggtttctgacgatatgttttttataattaattctaatattaataaaactgttgctgttaatactcaattccttaattgtcaggttaagttatctaaaaatccgcataatagttatatgcccaaagaagaatcgtatattgcatgccatcaattggcaccagatttattttccggcgacatcgaagcaaaaatcaaagccggtaaaggtgaaataaaaggtaaactcgataagtcaacattggaacaggtaataaatacagttataaatcatggcgcgcatactctttcaccatatgaacgaagaataatagaggagaatctcaaatcagtattaagttgattttatttttactattcacattcagtcaaaattctataatcacttgcctgtaaattatacctcttattaaaatactcctccgtaaaccttatacccatgtcgtaaagcgttttgtcacgctgtacggtttcctcaataacactctctttctttgtcagctttatcctcggaccaatatccagtccgtaattaatcttaacataataatcgaacagggtgttcagactcttctcaatcagctttttatcccgcacacccataaactcaagcatttcacgatgcgtttcagctgctttataagatcccactttaccgatatccagtgtcagggtttccgttagaattaccttcgagatttccgaattataatgcgtaattatgttcgaaaacaatccgcccacttcatactttacagattccttaaactcgattggtatatcgtccctgaacgccgccacgttattctctgttatttcggtcagcttattcaccaactcgtctatctgcgcgtctgtaaaagtgctcggatacctcgcaaggaagtatggagtcccgaatttctcagccatcaattgccagtattcaatagcagccctcttaaaaatcacaggccagtagcatttcgataaaagcttctcgccgtatggattcgtgtacttcggattatttctagtaataatgaatttatactcaggaagtttctcacccacttcatatatgtaataaaatcctgctcttgaacctgatcttgctcttaacctcagtatgttatcgctgtcataaataaaccactcctgcggtttctcctccagctcgacgggaactatcttgccgtttattttcttatactcaatctcagcaacctcatacccgtacagaatgcagtctaaaagctgactcgctattttctgcagatccaggtttctggtaatctcaatcgcttcttttttaatctcctcattctcgtattgtatttcccagcccatctgcatcacctgcattttacgttgagtaatagccgccgataaatgcccgtccctgacaagatcccgtagaatctcataatcgtatccattctctgcaagaatcttatccggatccggcagatatccgtttacattcacgtccatcttctttcgcgagacaaatattttcagcaaatgctgcacctttttcaatatcgattctttcatctaatatttctcctaaatcttaaatattttttattcttttgttgacctcaaataaattgcgacaaaaaatttgatgagcggaatgttaagcagaaattgctgtttgacgatcccgctttccattaactatttagaaaaaagagcgggggaggagttcaatttctgcaatgcagcgaatcaaattttagcaatttatttgcagtcttgaacttttgcttcttttctttcaagagaaaagaagagcaaagtaattacaatatgaatttcataacctctacctattaggtctatacttaaaatatttctcactcttcacttttctactgactatgatattctcgcggaattctaaattccgcgactttatgtaattcagaaattgtgtcgcagcatccacctgatcgtcatactctccgtttggaaattcttcaagttcatccagaaaacttttaatccaattgctgtttcctttcagtttcaccttacccgcttctattatcggagtaattgaatgcacccttgcaagcttgtctttatccggttttatcggtttaactggaatcctcgtttccctttgaatctcctgaattaagcttatgccgctcgatttatcctctatcagaatttcattcggcccgtaagtgttaaacaattccacagctttctttttaagctccggaaattctacccggcctctccatacatcttccagataataaccctcattcgttacaatccaggtctggcatacggaatagtcattctcttctttctctttgaacgctgtatcccagctctgtatcgaggccacaaatctcttgctgttaaggtcatgttcttcataatatccgaaccattctctttttattattctttcggtcagctgatctatgaactccgcataaacttcctgatcgcgaagggcaggggagacttccttttcatactcttcaagttcttttttatcaatcatcggattgtcgtaggaagtatatctataacttttccatccctctttaccctcagcttcatagttgaataattcatagaataggtgtgtttcatcgccggattttttccccttcggtgtaccgccgataatcgctcttgccttcttctcaaacatcataggcctaatcgattcttcccacaatcttctgttcttcaaaattatcccggcttcattaagcatcactagatcatatccgaatccctctatattctccggtctgtccgcactcctgaaatcgcagtatgatttacacagatataaaatcgactgtgttttatggaacgtattaataattttaggaaactcttttaacaatggcataaagtatctttctatatatcttgtaatgttcgagtatgttgtgtcaacccataaagcagctaaactattacgaatcatttcatggattagaaaaaaagtcatccctttagttaatccaaaccgtcttcctttggcaactaccttaactctagattcatcaccataaaatatttctttctgcttttcatgcatcttcaactcaataaacagtttgcaattatccattattattaaaccctgaacctttcctagcatccagataataagttctccaaaattttagattcgaccttaaaaaaattgcgtatagaaatttgacgaacggaatgaaaagcagaaattgctgtctgacgatcccgctttcaataaactatttttaaaaagagcgggggaggagttcaatttctgccatgaagtgaatcaaatttcagcaatttttttgcagtcttgatcttttggttcttttgtatcaagacaaaagaacgaattaataattttttcataccttatttttttcaatcctatactagttacatttattaattgttaagtaaatgattctacttatcgaaatcatgaattgttgttactttcaaagtgatatcaaaaggctttttataattctcatcaaacaatctgtgataattacccaataactttaacgcctcaattttgttatgaagttttatattcttccgtttaccttctttagtttcagaaatccttatctctgctatcgcacccatcagctccctcggtatttcagtttcactccgtaagattatatcatcatctgttatctcggcataatcagtaatccgtgaaaatgccactattgccaattccctaattatcttctcttggtcgtttttatgcccgtcataaatcctctccaattctctgcttatttcctgtctgatgtaaggttttgtaaggttctcatatgccgtctgacgggcagtcttctttgaatatcccgcccttaccgcggcctgagtaccgttgaaatccttcaaatattcctcaataaaaagcctctgctttcccgttattttaaccgttattcccattctttcgataaactttattaaaatatataaaatattaataaaactattgcatatatcaaaagtatttattaaaattaattaagtaaaccaaaacttttataaagagaatgcaaaatgacccgtccgcgaaaatctgccgaatccgtgttcatccgcgttctattatttctcccgctatttttgtgtctcatttaaggggttaatcaatgaaaatcggcataattaacattttcgactccatttccaccttcggcatctcctccaaaaaaatcctggcaatcctttccgacttcaaggaaaagaacatcactgaaatagaagtacgcatcaactccgcgggcggatcgctgttcgaaggattctcaatctttaatcagcttagggatttcggaaacgttcacacggtcgtcgacggcgttgccgcctcagccgcctctctaatcgcacttgccggcagtaaagtttcggtctataagaactcctatctcttcattcacaatccctggtctcttgcgataggtgatcataacgatatggaatccgcttccgaggatctcaagaagtttactcagactatcatagatctctataaatccaaaactggtttatccgaagaggaactgaaggacttctgtactaaaaacactttcctaaattctgatgaatgcctcagctacgggtttgccgatgatgtgattgataattatcctatcaaaaagtttgtcgccctcagctctcagatattcgatccggaagatcttgccgcctcagaatcagaaggtttaaatgaatccggtacttaccagaacgatattaaccagaagctcctaacgctcggcaattctatttcttcgcttcagaacaatattgaccagctgaattctctaat

SEQ ID NO: 1737 - DNA, 23672 bp, synthetic construct
  source 1..23672: mol_type = other DNA
  misc_feature 1..23672: note = Synthetic
ttcaaatcgcggccgtatagtttgccgaatataaaattccagttactgtcgggtacatccagtgcagcctggtcgtcccatacggcggcactgaaaggtgcggcggcagcaaacaattccgggtatttcagcgcgtaaacaagcgtgccataaccacccatcgataagcctgctacgccacggtattttttctccgccttgatacggtatgttttttcaatggaaggcataaattccttcacaaaaaagtcttcatagttctccttgccgtcataagcattaatgtaaaaactcgaatcgccgttgggcattacaataatcatgggcggaatggtgccatctgcaatcgccttgtcggcaaaacggtttatttcgccaaactgcagccagccggtatggtcatcgctgaaaccatgcagcaggtaaacaacagggaaagtacggtcagatgattcgtaacctggtggcaggtaaaccacatacttaacggggcggtgcaaaatgctgctttgaacagattgggtttcgataattttaccctgcgcatattgtgcgtgcgccgtttgcagcaacagcacaaaaaccagcaagggaagcattcgttggatgattgacatatacaggatgtttacgtatggcacaaaaaaagccctttgcaaaaacaaagggcatataaatcaatttaattgaaccggcattgttataattaccatttatctacttcgtctgtggcaatgtggctggtagtggtgatgggagcagcggctgcaacaactacttcagctgcaggctctgctaattcttcctgaacggcaacttctgcaccatcttcagcagtttcagcgtattcgtggttgtaggcatcaaagtcaaaatcgggcatcagctcggttttaacgtagtctaccgcttcgttcaaagccttgataaacttgttgaaatcttctttgtagaggaaaatcttgtgcctgtcgtaaccatcatcattgaaacgttttctgctttctgtaatggtcaggtagtagtcgttgccacgggtggcacgtacatcgaaaaaataagtccttctttttccagccctgatgcgtttgctataaacgctttccattttcttgtcattgttttcgtacgccacagtgaaataggttttggttaaacgattcctttaaagattacaaatatatgattgttttcaaattgccaaaattttggaccagaaacttaaaaacttacctgcatcaggccgcagattgatcattacttatctgtaaacgatataattcagcgtaatatccattcaaatccatcaattcctggtgcgtaccctgttcaataatctcaccatcgtcaataataatcacctggtcaaagttcagcaccgtaaaaatgcggtgggtaataataatcgctgttttttcattgagataattatacaggttatggatgatctcgtgttcggtttttgcatccactgcgctcaggcagtcatcaaacagcaatatgcgtgcatctttaatcagcgcgcgtgcaatagatacgcgttgtttttgtccgccgctcagcgtaacgccgcgctcccctaccatggtttggtaaccttcgggcaggttttttatttccctgtcaatactggcatattgtgcagccagctcaacctgctgcggcggtgcgggtttatgcaggccaaagctgatattgctggcaatggtatcgctgaacaaaaacacatcctggggcacatagctcacctggtcgcgcaggctttttaccgggaaggtgttaatgtccctgccgccaacagcaatactgccttcatcagcattgtaaaaacgtagcagcaattgcgccacggtagattttccgctgcctgttttacccagtatcagcaccttttgcccttccttaactgtaagcgaaaagtttttaagtgccgtaataccggtgtgcgggtaggtaaatttcaccttgttaaacacaatatcgcctttcagttcgccgggctgcacaccgggcgcatcggcaatttcgggagtggtttgcaaaaactcattcacccttttttgcgaggcggcagcgcgttgtatcatacttgctaccgagccaatggcgctgaccgggaaagtgagcaggttaatataaattacaaactccacaatcaaccccacctgctggtgatcgtgcagggccatgcggccgccaatcagtaccgtaatcagcgtactaagacctaccatcagggtcatactggggaaatacactgcttctaccttggccaggctcactgcatttttacggtattcttcgctgttgcgggtaaaaaagttcagcatagagcgctcctgcacaaatgacttaataacgcgaatgcctgagtaagattcctgcgagttagaggtaagcgccgaaagcagggcctgtaccttttcgcttttcttataaataaccgtgttaacaatataaatagtaatcgcgagcaacggcagcggtgccagtacaatcagcgaaaggttggcatctttcctgaacataataatcacgcaaagggtaatcagcgatagcaggttaatgaggtacataatggccgggccggtaaacatgcgcaccctgcttacatcttcggcaatgcggttcattaagtcgccggtagtatgtgttttaaaaaaagaagcatgcaactgctggtagtgctggtaaacttcatttttctggtcaaattcaatatgccggctcattacaataatggtttgccgcataaaaaacatcaaaatgctgcgcagcactgccagtaccaggatggtaacaccgcaggctgccaccagctggccaaaaggcagtgtatcaatacggcttaccagcaaacgcattacaccatcttttacctgggtgctggcagctgttttagcgcccggcaaatgctctaccaccttacccatcacataaccaaacacctggggcgccagcacggcaaagtagttcgacaatataataaacacaataccggccgtaaaacgaacgcggtatttccagaaatattttgagagaacagagagttgcttcaaacgaacacggttttgcgcaaagttagcgcaactcgttcaatcgacgttcagtggtaccggcattggcagcaacacgtgcttctttcgccggtgcggtattgcggttatcagcggttacagggtaatatttattcagtcttttttccgaaaagccgttacggtagcgctgcaactgcacatccagcatggccaggcagctttgccaggcttctgcagccacaggcgcagtattgttctcgttcacggcaaggtaaatattgtgtccctgttcgttttcgctgcccgttgctgccaattcaatggttgcccggcggtacaggtacacgggcataaaaccggcatgtgtttttttaagcagcatattcaaccggttggtttgcgaaaaagcaatgggaaaggcgccggcaattttttcggggtaatataccgaaagcattactgccagttcgccgccctgctggtagcccgatacaaacgaacggcagtggtactggcggttaatggtgtgaataaaaccggcaatactgtccagcgtatgttgcatggtgcgggtacataccaatccttttgtatcgctgccgttaccggtaaaataagtgttcccgttgctgctgttgcaattgccaaagggaattaccaggtgcaccggttgcgccagggcgctgtaggcggcaataacaccggccgggttggcatcaggatgcataaatgcaacaagcaccggtataaaacgctggtcaccgcctgcgtttagtacagtatcaatgtagcgaaaacctttggtacaatgtacagtgggcatgccattggcagccagcagggtgtttacctgcaataaaacaaccagggctaaaaaagttctcataaggaaaaacggttatggataaataaggctgtaaacacgcaattagccgcaaaatgcatacttaatgtgcctggggggacacagcattttgttcattgtttttcttgagaactgaagctgttcacttgaagcgggtcaacagcataaggggttaaaaatccgggtcgatacaggtatgggggtaccgtgtggtcaatttgcttttacaagggatcgggcagtcaaaaaaaatcaaaaaaaaactcccgtcaagaatgacgcgagttggttttaaccctaaacccttaaaaaacagttgcaaaatagtgcgcaaaccgcatagggtgcgggctaatcaggtaaacgcttaattttttcccataagcgtggcaaaaaaacaggcaatgtataaaccaacaggggtaaaatgtattatgcgttggcaaacgtaaaatcaatgtaacaacactagttaatttgaaaatttgaaagtgtgctgatgtgaaaatggaaacccattacaacctattttcaaattttcaaattcgcacattttcaaattggctttctatcttgcactatgcgctccttttttaacctgaagcagaacaataccaccgtaacaacggaaattattgcggggatatcttctttcctggcaacctcgtacattattgttaccaacccttctattctgcagcaatgcggaatgccgtttgccggggtgcttactgccaccgtactggtttgttttttcagcagcgccatgatgggtatttacgcgcgcaacccggtaattgtggcaccgggtatggggttaaacgcctttttcaccttttcagtagtgctgggtttaaaagtaccctggcaggtggcgctcggggccgtattctggtcgggcatcgtgtttttaattctgtctgcctttaatatacgcacctatatattacgtgccattcctaccccgctgcgttacgccattgccgcgggcatcgggttatttatcacacttatcgggctggtgcaggcgcagtttattgtacacagcgagggcaaaaccattatcggcatgggggccattacccctgccctgctcaccttcctggctgggttgctgtttactgccatctgcatcatccgcaatgtaaagggtgccattttgctgggcattgtttttaccacgctggcagccctgcccatcgggcgcatttggggtacaccgggtgccacacttatcagctggcatggcttttttgcagcgcctgattttagcctgctgctgcagttggatcttgtgcattcccttagctgggccatggtgcctgttatttttgcttttatttttactgatatgttcgatagcctttcaaccctggtaggcttgtcagaggccgccggcctgctcgatgaaaagggcgaaccccgtcatgtaaaacgcgccctggtaacagatgcggtggccaccaccctggcgggactggtaggttccagtccgggtacagcttatattgaatcagccgtaggtatcgaagctggcgggcgcaccggtttaacagcgctggtcgccgcactactctttttgccctttttatttttggcgcctttattatcggcagtaccgcctattgccacagcgcctgcattggtactggtgggtgtatttatgatgcggcctgttgttaaaatcaactggctgcaaatggacgaagccattccctgtttccttgccatggtattaattccgtttacctattccatcacacagggcattatctggggctttttggcatttaccgccatcaagctggcggcgggtaaaaaagaggccatcaatatcggcctgcttattatagatgcattggccatagtagctttggcacttgaaaattaaaacacataaacaatgtataaacggataagtgtactgcttgcagtggtatgttgtagtatgtatacaagcgcacagcaggctaaaacaaccggtatactcggcgcttttaatgccgaaaccaacctgctcgttgcacaattgcagcaacccaaagagcaggtaatacaaggcattcatttcagcgaaggcacattaaacggtgcacatgtggtaattgcacaaacgggtattggcaaagttaatgcagccattactactacacttatggttgagcactttattcctgcaagtataattttcaccggtatagcgggtggtgtcaaccccagccttgcccctggcgacctggttatcggcaccactgttgcttatcacgattatggctccgtcaatgcaaatggcatgctgcacgaggccacgcgcaaccccgttactgcgcaaaacaaccctttatttttcccgtgcgattcattgctggtgcaactggccgtgcatagcagcaagcagctgcagttccagaaagcgggcattcccaatgcagccgtgcctgtagccactaccggcaccattgtaacgggcgatgtgtttgtgtcgtctgcagcagcaacagagcagttgcgcacacagctgcatgcggatgccactgaaatggaaggcgctgccgtagcacaggtatgctggcagcaacacatccctttcctggttatacgcagtgtaagtgataaagccaatggcactgccgcggcggatattgtgcagttttatacaacggctgcgcataattcagcgatgctggtgagggagatgatgagggagttgaaataatttgacgcatataaaacaataaattatttgtcattttgttactcaattcaaaccaaacaaactcataacagaggccgtatgtggtagcctctactatcaacaccatagcatctcaacttataacacgaatattcttgttggcttcataagctaaataccccaagctcatctttgctctttaaaaggccttctcacatcatataaaaaacacttaaacttcatctaacatctaccaaaagagtgtctgccttattagtatagttattaaagcctgtgtcagttaatacaagtcgcaaagaaatgtcattgattaaatcagatgcctttaaacaattatatttatcactaatccatactggctttttaagacctgattttcgaacttgaatcacatcattggttgtagctcctaacccgacgtaataaatttcaattttttgaccgttagatgtagtatgttctgttaaaagcctctcgtctttttcaaacaaactgcaagattgaataatcaaggtagtcaagattactgttatgttcattttcatatttattcttcctcgttgagattttttttattgttgtcataatatcgaaatccctgtttgatcattttttgatcatccggatcatctccatacggcggtaacatatctccccgcacagtccttgtttcgccaaagccagcactaatttcatttgtaccatagcgctgccattcaggttttgaagtcccagctttcatttgtgcgctgccagcctgttgtaataaaaactcctctgtaaacataaagaaaccaaagactttaccagtagctccatagtggtaattgcctaaatctggagctgtgtaattcgatccttgaaaagcaaactgggttttagattccttacccttatcaaatgcattggctaatccataaattgttttctgattatttttcaaatcccattctcctttatttttcaccaggtttttaaatgtaaatgggctatgcgatccttgggcttccttgatgttactgttaagcaaatttttgaatatcttatttgcatcaatagttttacctagctcacctattcttgttaattttttccctttttgcaaaaacactaaattatctttcccgtatttctgaactacataccccctcttatcgacaataattgtatctcctaatggatcattaaatagtataggatcattccccatggcactatacaaactttgggaataatccggtttaggatcaatctgccaccatcttcctatttgtgcatccaaacttctaaattgcgtcgcgtaaatatccaacccacttccatcgctgaattcattgtgctgtaactcacttcccttattgtacttgtatttattttctagctttccagaagcctgacttgagatccccgccatcgtcaatccaaatgggtagtagtgcgtctcttccagcaccggccctcttgtctgcactacctgcaaattatcaaagtatacatcaacagggctttcgttgctacagtatacataaatataaccattttttgctataggaatggcggataaatcagtgtgatgatctttaattatactattatcaccagactggctaatgccgctacctacacatcgtaactgctcgtcaaacagcaggtagttgatatatgccctcggctttgtcggcgttgcattattggcgcttgccgagtttgctgactgtgttgtaattggccctgctgtggcgctaatgcccgaaagcatacctgccgtaacgccaccatgcgctgcaccaataccactggcgccggggttccccagcagtccggtaagtaccgttaaaagcggaacagctgtgttatgattgttgtcaacggcattctgaaagtaatacgatttaccccatatgtctaccttatcccctgccattacctttaaggtaatgcccagcccggtctgtgttccattactgtttagcttatacagcttttggctctccgtattaacctggctgctgctattggtattatagggagggtttccattgttattggcatagttttgcccggccgcagctgtaaaccctgccacactttgtttgcttacaatattggcatcctgtatgtcgtagtagttcttttctaccgcagtcgcaccggtttcaagcgtagctaccgggtactggtctacctggtgctcatcggttagcaccagtcggttattgccaaggttatccttaacaaaataatcaaaagcgtatttctccagcttattgccattaaggtgccggcaaaacgtaacaacgacttatacttttgtttgcatcaaaatttcagtatcttacctgtcataaatatcagccctacgtgaccatcctgtcccaattcaagtttcatcatacaactgcgttttccattctcattttaacaactgcggccatctgcaactactttgttttctttgcagttatatatcctgcatatacaaaactcgtacacagcattcgtacatttttatatggagaacgtgtaatagggcgcgttgtaggcaacgaaacagagcaggatgcagacatgagaacactgcacaaggccgtaatagagtatcaaacaaaaagcggagaaacacataggtttgctacaaaagaaagttcaattcgcaaacctgttattagtaaaacagtgcctgttgcatatctactctcaacaccagaaagccccattattaatccaatccgaaccatagtttctactacactggctacgttgttaatcttgctggttatgatttcattttcagctttgtgtattagttacgttgtacataatagctaaacgtgttctaataataatataaccaccaacgttcctgtggttacgtgcataccaccctcagcataacgaacgtatgcttacggtaaaccgtaatacaaacagcaaaaagcgcagtaccttaaccggtctgcgcttttttattgcctgaatgaaataaataaatgctagaagaatatttttctatattgtataatacgggccattatttcgcctgctattcttcatttttcaacttaaacctgcatgccatgtactatgctgcacctttcccttattgcacgtacagttatagcaataaaaaagcccccgataaacgacgagggcagcgtaaatgttttcacaacggaataatccttattgtgatttgcttctttgctaaagtaataaaactaatgaaaacgcgaaaatctttttttactaacaaattaaagtcaggccttggagatgagctcacaaataattgaagtcaaaaattctcggattcattaacaaaatcaaaacacaccatacatccaatagaaatttatttacttaaattaaagaaccattcacatgaatattttaggactagatattggcgtttcgtccattggctgggcgttgatcaactttactgccgataaatggatgattagaggaatgggcacacgcatcatcccgttaaatcctgatgacaaagatgaattcacctcgggaaacacaatatcaaaaaaccagaaaagaacccagaaacgcacacaacgaaaaggctacgacagataccagcttaggcgaaagcagcttattttgttattgcagcaatacaacatgatgcctgacaacagcttgattcgcctatcagctgaacgcctgtatggcttaagaacaaaagccttgcgggaacagcttaccctagaagagctgggtagggtattgctacatttaaaccagaaacgtggttacaaaagcagccgtagtgatactaacctcgacaaaaaagatactgactatgttactgaagtaaaaaacaggcaccagcaactaaaagaaaaaaaagaaactattggaacgcattttcaccaagcactacaagccaatcaacactaccggataaaacagcaggtattcccgagagaagcatatatagaggagtttgatgccatcatcaagacgcagcagcaattttattcattgctaacaccaacactgattgaaaaaatcagaaatgagacagtgtactatcaacgcaatctgaaatcacagaaagacctggtgagcatttgtgaactggaaggctttgccacaaataatacaaccggcaaaactgtacaggcaggtccaagagttgcaccacgaagctcaccgcttgcacaggcctgtaaaatatgggaaaccattaatacactttcgctgcaaaataaatatggcgaaacctacctcccctcccagcagcaaaaactactgctattcaactacctcgataacaacgagctgctaactcagaaggaacttttcaaactgctgggtttgaaaaaggaagatggctggtacgcaaataaacaaataactaaaggtttgcagggcaatatcaccaaaacacttttactgaaacagctgaagaacaacaaccggtcagctgaactactcagatttgatttgcaaattgaaacaggcacaacaccggcttatttaactgataaaaaaacaggtgaggttttagcaacaagtgttcaaaagcaaattaccaggcattttgaaaacgagccactgtataaactctggcacactacttatgctatttcagatgtaaaagaatgtacacaaacattaatacgccagtttgctatagatgaaacaaccgcaaaaaatattgccaacatagattttagaaaattctcgttcgccaataaatcagctaaggctatgcggaaaataattccgcatttgattgatggccatgtttatagtacagcctgtgcatttgccggatacaaccactctaattcattaacttcagatgaacgcctgcagcaactgcttgcagataaattggacacactacccaagaacagtctgcgacagccgattgtagaaaaaatactaaatcagctgattaacctggtaaatgacatcatagcaatacatggaagacccgacgaaataaggatagaattggcgcgtgagctgaaacagagcaaggaagagcgaaataacactttcatgcaaatagcaaaacgggaaagggaaaataaagccatcatcgataggattgaaaaagaatatggttcttttggtgtaagggcaacaagaaatactattattaaatggcgcttatttcatgaaatcaatgggcaggatgttaaaacgaatgctacttgcatttactgtggaaaacagttcggaataacagatgcattacagggtaatagcattgacgtggaacatattatacctaaatccaaactttttgatgattcacaaagcaacaaaacgctaacacaccgcagatgcaatgaggacaaagacaacagaacagcttatgactttatgaaaagtaaaggagacagcgctttctccagctatttgcaaaccatagatcatttgtataacaacaaaatcatcaacaaaaccaagagagataaactattgatgccggcggacaaaataccgcaggatttcatagaccggcaactacgcgaaacacagtacatatcaagaaaagcgaaggagctgttggaaaaagtatgttacaatgtttggacaaccagtggcagcgtaaccgcctacctgcgacacatatggggctgggatgatgtactcgttaatcttcagctacccaaatatcgcgaactgggtttaactgaatataataacgataaagaaataatcaatggctggagcaaacgtgacgaccatcgccatcacgccatagacgcccttaccatagcttgtacaaggcagggatttattcatcgtatcaataccctgaatgcacaaagtacaagggataacatgtataatgatctgcaaaaaaacgaatcaactttcaacaaacgaaaaccgctgttagaagcctaccttgctgcccaaaggccttttactaccatccaactagaaaacgtggtatccagcatccttatatcttttaaatcggggaaaaaatcagcgactacaggtaagcgaaaagtaaaaatacagggtagcaagaaggtagtgcaaacaggcatcatcatcccccgcggagcactaagcgaggatactgtgtatggaaaaataaaagtcattgaaaaggaaaagccagtaaaatacctctttgaaaatcctgacctcattttcaaaccgtatatcaggaaattagtcgaagacagactaaaacaacacaacaatgatacctccaaagcattattgtccttgaaaaaggaggcaatttatctcgatgaagcaaaaacaaaaatattgcaatatggcacttgttttaaagaagaatatgtagtcaaatacccaatagaaagcataaaaatcaaagacatcccttatatcattgaccgtcatgtgcagcggattgttcagaaaagacttgagcaattcgataataaagaaaaagatgtcttgaaggatttacaaaacaatccgatctggcacaatgaggaaaagagaattcccgtaagatctgtacgttgcttaactggcttaagcatagtggaacctgttaagcaagatgaaaaaggcaacaacattggttttgtaaagccaggcaacaaccaccatgcagcaatatatattgatgcgaacggaaaaaaacaggaacatatatgttcattctggcacgccgttgaaagaaaaaaatacggcattccggtaattattacccagcctgcagaaatctggaatattattctatccagcggcaaagaatacccgcaaagtttcctggaaaaacttccaaacgaccaatggcaattcctgcaaagtctgcaacaaaacgagatgttcattattggcttgtcacaggaagatatcgtacaagcattgcaaaaaaatgacaaaaaaacacttagcccatacctgttcagggtaaggaaattaacagccggaagctactggtttctgcatcatctggaaacacagccgctcgaaagcacacaagataaaaaagctggtagagtagttcaggcaagcgcttcaacatttaaagggtataaagtaaaaataacaataaccggggatattacgcaaccggtttaaattcatacaaaatgataaagcgtacactttactttggcaacccggcttatcttaaaaccagtaatgagcaaatggtaatagaactgcctgaaagtggagaaaccaaatcagcctctatcgaggacatcggattattaatattagaccatcagcaaataacccttacacaggcgttaataaccaagttgctggccaacaacgtagccctggtaacctgcgatggaacgcaccatcctacgggcatgttattaaacctggatgggcatacattgcaaagccagaaatttcaggctcagatagaagctaccgtacccttaaaaaaacagctgtggcagcaaacggtagaggcaaaattagcaaaccaggctgccgtactggctattgaaaaggcagaaaacaactatctactcaatcttgccaaaactgtaaaaagcggagatgttgacaattgtgaagcaaagggtgcggcttattattggaaagcagtatttcctgattttttggctttcaggcgggaaagatatggtccgccgccaaacaacctgctaaattatggttacgcgattatccgcgctattgtagccaggtcgctggtaggaagtggcttgctccctaccctgggcatttttcatcgcaatcaatacaatgcttattgcctggccgacgatattatggaaccttacaggccatttgtagataaagtagtgtgccagctggtgcgtagcaatggcaagttcctggaaatgacgccagccatgaaaacagcactactggctatcccggcatcagatgtactgatagaaggacagaaaagcccgttaatgaatgcagtgcaaaaaacaacagccagcttgtcaaaatgctttgaaggtaaggtcagaaagatcacctatccaacgctgaattaacaaatgccaagctgttattatgtttaacagattaaatgcataccgaattatgtgggtgctcgtatttttcgatttgcctacagagaccaaaaaggacaggaaaaactatgctgaatttcgcaaaagaattctgaatgacggattccagatgttccagtttagtatgtatatccgtcattgcagcagtcgtgaaaatgcggatgttcacataaaacgggcaaaaagtatcctgccatctaaaggccatgtgggaattatgtgtgtcaccgacaaacagtttggcatgatggagattttcaggggcaaagagcaggttgaaacgcctgaaacagtacagcaacttgaattattttaaaaaattacggacaggataaaaattctgtagctcagaccccgatttttcatcctaaaaaacgcctgtaatgcatacaggtaaaggattacataaaattcggttgtcacagatctaagctacagaataatttgaaagcaaatcacaacattgagttggatcgcaatgtctttttgtttgttgtcacagatctaagctacagaataatttgaaagcaaatcacaacaacaaacgtacagtatatctcagccgaggcgttgtcacagatctaagctacagaataatttgaaagcaaatcacaactggccagcgcattgcggcaggaaccggttagttgtcacagatctaagctacagaataatttgaaagcaaatcacaacaccacgcaaaccacttcaaaacctagcttcgttgtcacagatctaagctacagaataatttgaaagcaaatcacaactgctaaaagcccctcgcgataaggcttccagttgtcacagatctaagctacagaataatttgaaagcaaatcacaacgctacagcaatgacacgccccaattcgccagttgtcacagatctaagctacagaataatttgaaagcaaatcacaaccgtaatagtaagcgaatcgcgataagccgtgttgtcacagatctaagctacagaataatttgaaagcaaatcacaacccacgtccagcgctttacctgtgataagtgttgtcacagatctaagctacagaataatttgaaagcaaatcacaacctggtcttcttcgcttggtggcgatgtagtgttgtcacagatctaagctacagaataatttgaaagcaaatcacaacgagcaatcgttagatcgcgtagttaaagcagttgtcacagatctaagctacagaataatttgaaagcaaatcacaacgccctgatgtaattgcagaagttaacaaagttgtcacagatctaagctacagaataatttgaaagcaaatcacaactggacagcagcgtccagtcaaggccagagcgttgtcacagatctaagctacagaataatttgaaagcaaatcacaacaagacttgtcactgatcaaaggcgctataagttgtcacagatctaagctacagaataatttgaaagcaaatcacaaccggactggcgcctgcatctttcaggtaagtgttgtcacagatctaagctacagaataatttgaaagcaaatcacaactctttaatatcttctctttttattttcatggttgtcacagatctaagctacagaataatttgaaagcaaatcacaactgttggcgttgacggcccaatgacgggtatgttgtcacagatctaagctacagaataatttgaaagcaaatcacaacggtaaaacgcttgccacattttcagcgtttgttgtcacagatctaagctacagaataatttgaaagcaaatcacaacagggacgccatgattgagcatatattctatgttgtcacagatctaagctacagaataatttgaaagcaaatcacaacataataaggtggtgcactataacaggcttgttgtcacagatctaagctacagaataatttgaaagcaaatcacaacagccctagaattgtgccctctagtaccaagttgtcacagatctaagctacagaataatttgaaagcaaatcacaacaacccactcatatacctgttgaaaggttaagttgtcacagatctaagctacagaataatttgaaagcaaatcacaacataataaggtggtgcactataacaggcttgttgtcacagatctaagctacagaataatttgaaagcaaatcacaacagccctagaattgtgccctctagtaccaagttgtcacagatctaagctacagaataatttgaaagcaaatcacaacaacccactcatatacctgttgaaaggttaagttgtcacagatctaagctacagaataatttgaaagcaaatcacaacgtccgcgtcgaacttcaatccgagcagcacgttgtcacagatctaagctacagaataatttgaaagcaaatcacaactcatgccgtttagatgtatgttagatggcagttgtcacagatctaagctacagaataatttgaaagcaaatcacaactggactggcgcctgcgtctttcaggtaagtgttgtcacagatctaagctacagaataatttgaaagcaaatcacaaccacattcaactactatccatatataagcaagttgtcacagatctaagctacagaataatttgaaagcaaatcacaacaaactgccagtaattgtactggccattaaagttgtcacagatctaagctacagaataatttgaaagcaaatcacaacatacataaacgaagatgcagaaagcagattgttgtcacagatctaagctacagaataatttgaaagcaaatcacaacagagagatatattccgtgttgatctgctcggttgtcacagatctaagctacagaataatttgaaagcaaatcacaacacgattccatagacttacccaatctttggcgttgtcacagatctaagctacagaataatttgaaagcaaatcacaacccctcgcattttagcatctatagcctgcatgttgtcacagatctaagctacagaataatttgaaagcaaatcacaacgggtcacgagttgtgcccaccagacctaccgttgtcacagatctaagctacagaataatttgaaagcaaatcacaactcatctttgtcaataataatagtcatgctggttgtcacagatctaagctacagaataatttgaaagcaaatcacaacataacagtaaatccaagcaattctattcgtgttgtcacagatctaagctacagaataatttgaaagcaaatcacaactatcgcataccctggtatagacctgctgtagttgtcacagatctaagctacagaataatttgaaagcaaatcacaacaaagaagtccgttgtagtacatagcgcatagttgtcacagatctaagctacagaataatttgaaagcaaatcacaacagcgccgtgattacgcagctgaatgatacagttgtcacagatctaagctacagaataatttgaaagcaaatcacaaccacgcctcgatagcagcaggtacgaacagtgttgtcacagatctaagctacagaataatttgaaagcaaatcacaacacatttcggcgccggttaaaacagggctgtgttgtcacagatctaagctacagaataatttgaaagcaaatcacaactgcatccacattttccatgataagctcatcgttgtcacagatctaagctacagaataatttgaaagcaaatcacaacgttggtggcatatttacctttaataaacaagttgtcacagatctaagctacagaataatttgaaagcaaatcacaaccacgcctcgatagcagcaggtacgaacagtgttgtcacagatctaagctacagaataatttgaaagcaaatcacaacacatttcggcgccggttaaaacagggctgtgttgtcacagatctaagctacagaataatttgaaagcaaatcacaactatcattatccactctgtcaatcgttaatggttgtcacagatctaagctacagaataatttgaaagcaaatcacaacggggagtatggcggggtccttcaggatcatgttgtcacagatctaagctacagaataatttgaaagcaaatcacaaccataattgtgagttttggttaaaacgtattgttgtcacagatctaagctacagaataatttgaaagcaaatcacaactggtaattgcgagtgttgaaaggcgagctggttgtcacagatctaagctacagaataatttgaaagcaaatcacaacagatcgaccgtgatttgcagattttggacggttgtcacagatctaagctacagaataatttgaaagcaaatcacaacgcgacgtcgttaaccgtatatgagctgtgagttgtcacagatctaagctacagaataatttgaaagcaaatcacaacacaaacaagccatttacttgatgcgctgggttgtcacagatctaagctacagaataatttgaaagcaaatcacaactagcggacaacagcaaaaaacaactatcttgttgtcacagatctaagctacagaataatttgaaagcaaatcacaacatgtatagtaacatggtcgcatatctttagttgtcacagatctaagctacagaataatttgaaagcaaatcacaactgtagcgttgtcctgatcctgatcgtagaagttgtcacagatctaagctacagaataatttgaaagcaaatcacaaccattcagctttgatttaagttcagcaatttgttgtcacagatctaagctacagaataatttgaaagcaaatcacaacgtacaccgcaagatggcggcggcggtacgtgttgtcacagatctaagctacagaataatttgaaagcaaatcacaacataggtatatgggtttcgcttttcaaagtgttgtcacagatctaagctacagaataatttgaaagcaaatcacaacccaagcaataacaacgaattaagcatgcttgttgtcacagatctaagctacagaataatttgaaagcaaatcacaactactccagctgccatgctgccaaaatgcttgttgtcacagatctaagctacagaataatttgaaagcaaatcacaactatcgctgggattgttggtgtgcttatacagttgtcacagatctaagctacagaataatttgaaagcaaatcacaactatcgctgggattgttggtgtgcttatacagttgtcacagatctaagctacagaataatttgaaagcaaatcacaacggttcgatttatcggccagctactattttgttgtcacagatctaagctacagaataatttgaaagcaaatcacaaccggtgtgtagctctgcacgaacggcctgtcgttgtcacagatctaagctacagaataatttgaaagcaaatcacaacataaagccgtatttggtccagtttgagcccgttgtcacagatctaagctacagaataatttgaaagcaaatcacaacttgagcttgaaagtggccatagcacggcgcgttgtcacagatctaagctacagaataatttgaaagcaaatcacaaccgtggagccaaactggatactaaccggtaagttgtcacagatctaagctacagaataatttgaaagcaaatcacaactattcaatatcgctggccacatcagtgacgttgtcatagatctaagctacagaataatttgaaagcaaatcacaaccaaaaaggaaaaggaaccactgagccatgagttgtcacagatctaagctacagaatgatttgaaagcaaatcacaacaagcatggctggacttaatccaaatagccagttgtcacagatctaaactactaaaaattctgccagacaataacttaccactaccctgcttctacaaagcaatcgccggcgttaacatttaacgcatgcgttttacggttacccgtaaaataaaatgaggcagtaatggttacttgcagcaacaaataagttatcaaaccatcccgttaaaaaatatatatggaattattcattttttgcattgtttatctcgcaggccttgccatagccatcctgttgcaaatacgtattatcaggcatgcagtaaatgccaaagagcaactgctgcatcagcgcacacaaacacaactgctcacactcatggctaaaaaaatgggcgttaccgatagtgaactctttattgcattgaatgatattgtataaaacaaagcgcccctacttaaccctctttatcatcaacaaaactttattaaaaaacacacttatgaaatttttaaccctgtttggtatcattctttttgcagcatgtgtagaaaaaggtcataccacatatactacccaatccagattatcgcatgctgattcaattaaagttcgttctgaagttgattctacagttaaagcgatggaaaaacaaacaatgtttgatacatccggactatcccaggcaccagtaaaggtactttcagcaaaattaactgagagggaatacagcacttataaagacatttatctcatctataaaaatgtttcttcaaaaaaaattgcaggaataaagtttagatggtttggtgaaactgtatttggcgatccggcagatatgggctcaagcacgcttgctgaaggctttggcggaggatttacagatgaaccgctcaatcccggtgaatcagattcaggtaaatgggacatattaagcaggaacggtaaaaaggtagtattagcatggcctaccgaaattatttacgaagatggaagtaaatggaaaattggggaaaggtagacttattttcatcggccggcgtaataaaaaacagggctggcatttcttgcacagccccatcttcctgtttataacattgcactctattttttcaacacaatcctcctcccctctttggcagattggctggcggcttccagtatctgcaccacaattaagttgttgggcagggatgacaggtcgttgccggggttcaccttaccgctcaatacggctgccaggtaaggtatattatcctggtattgtgcgccgtgcacttccagcatagcagtgctgtcgttaatgcgttgctgcagtttgttggcattaagggcatgcaggtagccatctttgccaaacacttcaaaatctttaatattaaaaggccagttccacgaggcttctataataccggtggcatcagcatattcaaccagtatggtggcatcatcatctaccttcgggtatacatccggtttaatgtgccgggtaacggcagtaacggcaaccggcgtttcgttcttcatcagccaggtcatcaggtcggcgccgtagcaaccaaaatcacgtatagcaccgccgccgttttgtatggggtcggtaagccagtttaaaaaatctttactgcagccaatttccttggggcctttatgcccgtcatgcacaatcattttgcgcacggggccaatggcattgctgcttaccatatcattaatctgctggttggtattgtaccaggtggtttcgtaattggttagcaccggtatatggtattgtgcggccagcgcggcaatacgctgtgcatctttcacggtagtagccaaaggtttttctaccattacgggtatatgccgcggcgcacaaaactccaccacgctcaaatgcagggcaatggcattgtaggcaagcaccgcatccgggtgcacatgctgcaccagtgcatccagcgttgggtaaaacaatgaatcggggagattgtacgtttttttatagcgcgccaccagctgcgggtcagcctccgcaataccggcaataattacttcaccacgtttgtactggtgcataatattgtgcgcatggtcgtgtgttaaacccgccacagctacgtgtaacaattgctgggcatgtgcagtggcagcgccgcaaaacagggcggccagtaaggcaagttttttcacctggtaaagtttaaagtgaatcaatcggtcaggttgtaaaataacagataaattaattaaatatcgttttagcaaaagctaaatcggccaattacggtatattatagtgtaatggttgtatactttcaggctaaaaaaagctgccgccattttttcagttaaatttagggtaaccgttataaaaatcaaaccgcttatgcaagttaccatcacgcaaatcgatactgcctgcatgctcatctccgtcaacggctttcacatagtgaccgatcctgctttcgatgcagccggcagccattacccgggtggccgcgcaggcatgctggtaaaaacaggtagccctgctttattgcctgcacaactgggcgcggtagatcttgttttaatcagtcacgatcagcataaagataatcttgataatgccggtcgcgaatttatcaaaaccgttccgctcgttatttctaccaaagaggcgcagcagcggcttgaagatacacacgtgcatggcctcgatgaatgggaaagcgttgccatacccaacaataaagtgcctggcttaaccattacggcaacaccttgtcagcacgcacccaacaaagagcttgacaaaggttctggtcatgttattggttttatcgttacctggctgggacagcaaaatggtgcgttatatatatcaggcgatacggttttgttcgaaggcattcaggaaattgccaaccgttttaccattgatacagccatactgcacattggccatgcaggttttcccgagctgaccggcgatatgaatttcacgttcaccggcgccgaagccatcgaggcggcgcatattttaaaagcccgcaaactggtgcctacacacatggaaggctgggagcattttttagaaacacccgaaactacgtacagcttaatcaacggttcagatatcaaagaaaagctggtgcgtcttaaacggggcgaaggggttaccattgatatttaagtaaccgcccagtcctaatcaataataccggcagaggaagtaatgtgcacatcggcatattgccatgcctggtcaaaagccagtttcacctgttgtgcttcctggtgttttccctggcctgttaacgcatggtataaacct

SEQ ID NO: 1738 - DNA, 23486 bp, synthetic construct
  misc_feature 1..23486: note = Synthetic
  source 1..23486: mol_type = other DNA
gaatatcaatctcgggaataatctcaatatgcctctgcgccgcaaatgctacaatatcccttaactgctcctgcgtgtaataccccctatgcggcacgccatccccctctgtatcagcccttaccgaacctacttcggttagtcgcggatatttttttatctcaacccgccaaccttggtcatcgctcaagtgcagatgcagatagttgtacttataacgcgcaatggcatcaatatatctcttaacatcctccgccgaaaggaaatggcgcgcagggtcgagcatcaaggcacgatattctaaacgcggcttatcacatatttcgataaaaggaatctccttgtcatcaatgagttgaatgagagtttgaatgccataaaagataccctgacgtgttgatgccttgattgtaactccccgattatcaaccgtgaggctatatccttgaacattatctatactcttgtcaatgagcaaagagatagtattaccaccatcggcggaaaagtcaaagtactctccgagaaatgctgattcattcctcagagagtcattcgataacctcaaggattttatcatttcaacactcaatttaccattacccaattttacatcattaggaataggtataatattttgtgctgcgccaacaacaaaagtcagtaataacaaaccgacaaaactctttttcatctttcagatacaaaaaaggcgaggcagggagttaccgcttcgccttatggttacaatttgtgtgaatctactttcttttcatcactcggcgaacagcttggacgacatccggcgtgtccaaatggtacttctcgagcagttcggctggtgtgccactctcaccaaacttatcatccacagccacatactccaccggagcaggcaactcacgcgccaatagttgagccacgctgtcgcccaatccgccattaataaaatgctcctccgcaacgacaacgcaaccagtcttgcgaaccgatgccaaaatcgcatccttatcaagaggcttgatagtatgaatattaatcaaatctacccctacaccctccccttccaactgctcggtagcctgaatagcacgccacatcaaatgacctgtcgcaatcacggtaacatcatcgccatctgcccattgaacagccttgccaatcacaaactcttcatcggcgggcgtatatataggttcggcagggcgaccaaagcgcaagtaggcaggtcctttgtgtttggtaagcgcaatggttgccgccttggtttggttatagtcgcaggggttgataaccaccatatcgggcaacattttcatcaaccctatgtcttccataatctggtgtgttgcaccatcttcgccaagggttataccggcgtgcgaggcacaaatcttaacattagtttttgaataggcaaccgactggcggatctggtcgtagacacgtcccgtggcaaatgccgcaaaagttcccacaaaagggacttttccagacacggctaatcccgccgccgcactgatcatattagcctccgcaattcctgcctgccaaaagcggtcgggattctctttggcaaacttgtcgaacttgacagagcctgtcaaatcggcacacatcgccacaatatccttgttctcgcgagcagcttcggccaatccgtcgccaaaacccgaacgcgtatctttcttaccttgaatagtatatactctcataattatatagaagtgtggagtgcgaagtgtgaagtgtgcaataattagtctaacttcaaatttctcacttcaaaatttatcaatagtctcccaaatctgtcgtagggagctctcggagtgcctgctcggtctgttgagcacttgttgccttgccgtggaattcattggtgttttccataaagctgactcccttacccataatggtttttgcaagaatcacgacaggtttacctttaccacaggcgttctccttggcatagcgaagcgtctttataacctcatccatattatgcccatccacctccaaaacgcgccaaccgaaagcctcgaattttcccctgaacgacccttcaccctgagacagaacctcttcacacgtgccgtcaatctgctggttattccaatcgacaatggcaattacgttgtcaatcttacgagctgttgcaaaagctgcagcctcccaaatttgcccctcctgcaactcgccatcgcccgtgagaacgaaaattttgtgggtatcaccatccaattttttcgcaagccccactccgagcgccaccgaaagcccctgaccaagagaaccgctcgcgacgcggatagtatccaaatgtcgtggcgttgggtgtccctgcaagttgctgcccagcaggcggaatgtagcaagttcgctgacgggaaaatagccacgacgcgccataacactgtatagcacaggtgaaatatgcccattgctcaggaaaaacatatcctcacctttaccctcgcgagtaaattttgcgggctcggcatccataacgtcaaaaaagagtgccgtaaccacatctgtcgcactcatcgaccctcccgggtgtcccgaattgacagccgcaaccattcgcacgatatcgcgacgaacctgagcggcaattttttctaaattctttatattattcataataaaatagttgctctagtttagagaaagaactttagggctgctttccaaactcaaaacattttctacattttttcggtaaggcgctgaactaaactaaatttattaaaaaattccttggcaataaccctgagcaccgtataggcaggaattgccaacaacatacccaaaactccggcgatataaccagccatcagaatcacaataaaaatctcaagcggttcggcttttaccgaacttgagtagatgtatggctgcaatataatgttgtcaataagctgaaagataagcaacaccagtcctatttgccaatagagcgttgcaagctcagtgcccattggtggcgaaaaagttacgatggcaaaggcaaaaagtcctcctatgataggtcctatatatgggatgacattcaaaactgccgttattgcaccgataatgagtgccgtattccagtctaatccaataaaatagagtgccacagcaacaactgtcagcttaatagccgactcaatgcaaatacctatgaagtatctgattaataagttggtaatagaattgagtgagcggcgaatattatccccatattttttcggaaatagcatcactacaccctctacaaagagattctcatccttcagaaagaagaaagcaataaaacaaaccgaaaaaattgccattataaaatcaactacaaacaaagttaacgagttgatagtattcgagataatacccgaagagaatagcggtctaatctgagccgcaagggcatcgcttatcgaaaaatctaccgatggaatcatattattaattccatcgtcaatgcttttgatggtctctttaagtatcactccgaaatgttcgggattgaatgacgagagaactttaaccttttccaccaaaataggcaccaaaaaccatcccaatgacataaaaaccatacccacaccaagcagggcaaccattgcggctatccacataggaatttgcttgccaagtatatttaacttccttattccccgcactataggcttacctataagcgagatgacggcagctatcagtacataaaaaacaatggtgtggaaataccataccaagaatcccacgaggagtaaaccagaggctgccgccaaccatttatatattgcattcatcgaggtagagttgcgattacggtctgtttacccacaactttatcgcccattttaatcttaatatccgcatccaaaggaaggagtatatccacccgcgaaccaaacttaataaacccgcactgctcacactgctcgaacttctcgcccacgtgttcctccgcataattgacaattcggcgagcaagcaaacctgctatctgcctaaagagtattttgtgccgtccggtatcgacaacagtggtagtgcgctcgttgtcagtggatgacttcggatgccaagcaaccaaaaattcgcctatatggtgctgaaactgcaccacctcgcccccaacgggaaaccaatttatatgcacattccacaccgacataaagacactgacctgaatgcgtttttcgctgagaaaatcatcatctacctcctcaatagcaaccaccttaccgtcagcagccgaatagaccaccgaactatccataacaggtaatcgacgcttgggcacgcggaagaaacggaaaaagaaaccaacaaagaagagtgaaatcaacagcaccggaatgtacacaaaaacgggtgcaaaaaaacaagatatcgccgacaatgcggtaaatatcaatgtgtttatggcaattattatgtacccttctttgtgtattctcattaaactttatttttttattatacaaatataatacaaatcgagcgaaataaaaatttatttttattcccaaaatacagtttacattatctaagtagcgtaaagcagttattatctaattttgctcacctcttttcagcgtattttttgtttgaaaaacactcatttattccaataaaattgcaatattcaaacaaaaatctgctcgataattaacttctaaaaaatcacttttaattatttttccccacttaaaacaagagagctataaaaattttcgctgccggaatcgccaaaagtgcagcatcaaatctatccaacattccgccgtgtcccggaataattgctccggaatcctttacaccaattaagcgcttaaatttactctctaatagatctccgaaaaacgccgccacggcaaccaccacaccaagggcaacccaaagccacttaacaacaatctcgtcctgaaacaacggcgcaatggttgcctgtgaatcagaccaatagagagcataccacaccaaagctactcccactgcaaaaaccactcccccaaaaaatccctcccagctcttctttggcgaaatcttgggcgcaattttgtgtttcccgatagtagagcccacaataaaagcccccgtatcatttgcccacacaatcgtcagaatggtaaccaccatctcgggctgcattgtggtcaatatccaaatcgcacctgcgatataaaccccaccaacaagatatggtaacagcttgcttttgaaaacgtcggaacgccgaacaagtgtaaagtactcatttaaggacaaaagggcaataattacccacaacagatagaagctccactcagtccaaagtgtcccctcgacaattacccaaacaaatacgatgcctgttattgttctcgttatcagtttcttcattttttactaatagaaaagggcaagtcttttttgaagaacctgcccttgagttgaaaacggtgcggatgaagggactcgaacccccacgcctcgcggcaccagatcctaagtctggcgtggctaccaattacaccacatccgccgctctttttacgggcacaaaggtaggtattttttctaaacttccaaacttattttataaatattttttgcaaaaacggagtcagcccggcaaaaaagaactcaaccgcaatgaccataacaattaagcccatcaaccgcatcataacattgttgcccacctcgcccagcaagcgagaaattttcgtagctcctacaagtataatgtaggtcaaaatgccaatcacagctatcgacccaaccaacacacatttacgaagcagagtgtgggcatcctccattaggacaatagaggaggtgatggctccgggtccgcaaatcatcggaattgcgagtggcgtaatcgaaatatcgttcacgtaactcttcacttccgattgcgttatcttcgtggtagtcagcctagcattgagcatatccatccccacaaagagaaatattatacctccgacaacacgaaaagcatctgccgagataccgaaaaacttaaacaacaactgccccgaaaaggcaaagacaatcaatgttaccatcgccgcaatggtcgcctttcgagccgttgtgaccttctgctccgtatccagagtcgaggtcatcgtaatgaacacaggcaccaaaccaagcgggttcatcaacgtgaaaaacgttgtaaagcagagtaatccaaaagtcagagaatcgtgcattgccttgaatgaaaaataaaaaatgttggggagttaaaattttgaaaatggaggtgagaaattgcgaataacttttcacctcctatttttcacttttgactttttacttttttgagcgtctcacccgcatccttcacaacggcacgcttccaagcctctgagtaaccgggctggtcaggtgatgcagggatattgtgattgtttccgttatccttgaaaacaccctcggcaatctccttcttcacattaccgtctatatattttactaacaagtatttatccaaagcgacccaagtattaaagaggttttgcgccgtatttaccgagtagtctgtgataaagtctattgccaattccttgttctcttcgtatagcattgttgcagcagcatcaacagccttttgctccgcgaagcaacgattctcgaatctgtccattgcgcgcttaacatctctgaaaatatagtcgtagcgaagatacgtaaagttggttacgcgttgctgaatccagaacattgaggttgaagaatactctgtcatatgaccattaccctctgccaatgaagcaggcacacgtgtcgagccacaataaatcggagtcagaggcgaagtagcagtatcatccacaccaaaccaaagcacaccgccgattggattgggcaaccacgaacgacactcacccacataccaccaaccggtctgttgcgtggaaatcgcacgctcattcacatactcctgcccgtcaacctcgaatcccatcggacgccagcggtaaggcagtgcgtgcccacccgcgccaacatcttgggtcatatccatcttagtaccttggtagtggtcgcgcatcaactctgccacatcctttacatcaagtttgcggttaggcttaacccaaagaggcatacgattttgaaggttgtaacccatcgcataatcctcatacttatccataccatcggcacaccgtctgaatatgctccaaacacgtgcctcacagccgcgtgcaccgccaaaatcgagggggtcgtaaacgtccgaaaaactgaaatctttgtccgctcccttataaattccttgctcgcgcgcaaagctgacaacatcaggtgaatagagacaatttgaggggtcattgagcggaaaagttgtaatacgagcgtggttagcgtgtgccgaaatcattccgtcaggaactttcagagcaacccaaaccgcacctttattcgcgtttactccattgataatcttctcgcccttgccgataatctccaaataccaaacctcgttaggatctgcaatagagatgctttcgccactgctgcaatagccgtacgttttcaccaaccatcccatatactcgacagcttcgcgcgcggttttgcaacgctgaagcgtaatataaatcaatgatccatagtcgataagacctgttttatccactagttgcgacaaaccgccaaatgtcgattcaccaatgagcaactgatgctcattcatattgcccaccacagaatacgtgtgggcaacctctggaatttcgcccaagattttgcccgtgtcccactctcgaacctgacgcatcgagcccggcttatggtcagccgccgcaaagaaatagagcgcaccataaagggtgtgagaatcggctgtgtaggagaccattgtcgcgccggtcttagatgcacccttggttaccaataagttagtgcaagcatgcgcattgttgtagattgccgagatggtggtcaaagctatgaaagcagtcgccacaaagatttttttcatcattattgtttggtttagttgcatagtccttaaaaataggctgcttatggatttatttttttcgaaaagtacgccccccaagtcggtcaatgagtcatcatatcaaacattgactatacctcacttcgtctcgtttcgtggtaacagttataacaaaggacaaaaaaaaggaggttcactccgacgcggagaactcttcttttttttgcataacacgctattaatcaaatgcaccattggcgcaaatagctgattttcactagggactgcataaaagtatctaaagaccagtattttgcactacaaagataaaacaataatttctaaatccaatagtcctaattcaggccgttttctcgaggcacagtcatcgtccgaatattcagacaaataggcacaaatgcaccggaacgtttatcgctactattagctcaacggtaatcattaaccctaacatcatatattctaattctttgattgtcatattacaaaatctcatcgttatattccaagtaaatcgccacagagtgaataacatccaaaatcatttcccatattatgatattactcctgagccgattagctcttcatcttggctataccaggcggcaaattgcccacaggtaatgccccgctggggcgagtcaaagcgtatgaaaattccgtcgtctgcaatggtaagcgtggcttcttgtaagggctgtcggtagcggattctcaccatatatcgtccgcctttttgtaagtcagggcgtatccaatgtacatcattgcgggcgatgaacagaccctcacgattgagcccagggtgactctcgcccatacccacatatataatattttccgccgtgtcggtttgcaaaacgaacaacggctcaaccttgccacccacacccaagcccttgcgttgtccgactgtaaagaagtgtgcaccattgtgttcccctaccttccatccatcctctctcgaatatttgcaagcctcaaactcgccgtgccgccttgggcagtcggcaggaatttcaattatgtcacccttgacagccctgagtttttgttgcaaaaagatgggcaaatccaccttgcccacaaaacatatcccttgagaatccttacgtgctgccgtagccaaaccctgctctgcagcaatttggcgcacttggctcttctctaattcacctatcggaaaaagcgccatattcaactgttgttgtgacagttggcaaaggaagtagctttggtctttgtttttgtcaagccccgcaagcaggcggaaaaagccgttttcggcaatagccttgcgacagtagtgcccagtggcaacatagtctgcaccgagctttagggcggcttttaggaaggcatcgaacttgatttcgcggttacagagtacatccggattaggtgtgcgtccgcgttcatactcagcgaacatataatcgaccacacggcggttatactcatcgctcaggtcgatgtagtgaaattcaatatccaactttttcgccaccaattcggcaaacatacggtcatcctcccacgggcaatctcccgcgagcgttcctgtcgtgtcgtgccagttgcgcataaatagtccaatcacctggtaaccttgctttttgagcaggtatgcggcaacactggaatcgactcctcccgacaatcctattactacctttttcaatttctcttatataaattattgcactacaaaggtagtgaagttatcaagaaaaaccaaagacgccccaaattcgtagattaagaattgaattcaccttcccaccgcggaggttcgctctatgatcttctgcgagagacgtgccgtgaagttccggaaacctcaaaaaaaagagcgagttgccccgctctaaatgttttcacaacggaataatccttattgtgatttgcttcaaaattgtattacaaagatagaaataacttttttattatgcaactttttttttgtataattttagcttaatttagttctctaaaaatatgctaaaaatgaagaaaatattaggtttggatttgggttcggcaagtattggctgggctttggtagaagagactgagcagatgcaatataatattgtatcgcttggaagcagaatcatcccatataacgggacagaggggcaggaatttgagaaggggacgggagagagtcgtaactcccttcggacaaaggcgcgaacagcccgtaaaggttatgacagataccaactacgccgaaaaaatctcgagaaaatattacttcaaaacggaatgtatcccaatgagcaagtcagagcactacaaaagttggagttatggaaacttcgagcggatgctcccaatgtgcaaatatctttacctgaattgggtcggttattgttttggcttaaccagaagagagggtacaagagttctcgttcggatgcaaacctcgacaaaaaagatacggaatatgttgcaactgttaaatcgaggcatcaaaaaataaaagatgcgggacaaaccgtagggcaatatttttatggtcaaattctcgaaaacgaatatcaccgcataaaggagcaggtctttccgcgcgaggcatacattgaggagttcgatgcgatagttgcccgtcaaaaagagtattatccgactattctaaagcaagagttaatagacaagatacgcaacgaggtaatctactttcaacgcggattgaaatcccaaaaggggttagtctccgtatgcgagtttgagggcagagagttcaatggacattttggaggtccaaaagttgctcccaaaagttcgccaatttttcagttagggaagatatgggaaaatatcaacaatatcaaaatagcggatattgagcttacggctgaacaaaaactggtatttttcaactatttgaactgccacgagagaatcactgaggcaaaaatcagagagttgctaaagctatcaaaagatagccgcctgaacggacagcttaaaaacggattgacaggaaataaaacatattcgcagattgcctcctgctttggcaacaaaatcggagagtacgaaaggttgtttaagttcgagttagaggtaattgaaagcgaaaagcttgaatatacatatcatccaaagagccatatacccgtaggtgagaagagacgaaaatatatatcggagaacgttgagaaagagccatattatcgtctgtggcatactatctattcaatcaaggataaggatgaatgccgcgcggcattgataaaaaatttcggtatcgaagaggagatagccgagaaattggcttcgctggattttagcgcgggaggtttcgggaataagtgtgctaaggttatccgaaagattttgccctacttaatggagggtgataagtacaatgttgcgatggattatgccggttataaccactcattttcgcaaactaaggatgaaaacttacaacgtgtattattagactcaataaaccatctcccaaaaaattcccttcgccagcctattgtcgaaaagattctcaaccagatgattaatttggtaaacgaggtgattaaacagtggggtcgacccgatgaaattcgtgttgagcttgctcgcaaactcaagcagagtaagacagagcgcaacgatgacgataattttatgagaaaacgtgagcgtgagaatgaaattatcaaggcggatttagcgaagtatggattgaaagccacgcgtaacaacgtcattaaatggcgattgtatcacgaaatagacgacaaggataaaaaactgaacgcccgctgcatatattgtggtcagccgatttcgctaaccgaagcaatactcggcaataatgttgatgttgagcatattataccgaaagacaaactatttgacgactcacagagtaacaaaacgctcgctcaccgaagttgcaacagcggcaagggcaataaaacggcttatgactttatgaaggataagcctcagttcgaggagtacgtggcacgtgtggaagagctttataaaaaacacttgatttctcttacaaaaaaacgcaagttcttgatgagcgaggataaaatcccgagtgatttcatcgaccgccagttgcgagaaagtcaatatattgcacgtaaatcacgcgagattctccaaacggtgtgtcgtaacgtttggagtacggatggcggggtaacagctcatttgcgcaaattatggggttgggacgatgtaacaatgaatctccaaatgccaaaatacaaagggattggtatgaccgagattgtggagtgggagagcaaccacggcaaaaatcaacacacgcaagaggtaatcaaagattggagcaaacgcgacgaccatcgccaccacgcaattgatgcgctcgtagttgcttgcactaggcaaggatatatccagcgcatcaacacactcaattcgagcgaaaccaaagatgagatgcatcgtaaagttgcaggtagtctggtggagtttaaccagaaacatacgctgttgaataagtatttaattactgaaaaaccgtttacaacctcggaggtggaagatgtggtatcaaaaatattggtatcgttcaaagccggtaaaaaagcggctacgcccggcaagcgtaaagttggcaaaaggggaaacaaacaagttgtgcaggatggtatcatcattcctcgcggagcattacacgctgatagcgtgagtggaagcatcaaacaatatgacccaacaggcaattttgagaatcataatgtaataaaatacaaggttggagttgggaaaggttatttgtttgacggtaaggatgacaagaagaaaattgacaaaacaattgattgtattgttgataagaaaataagagatttgataaagcagcgtgccgaagaaagcaattacagccttaaaaaaatgtttgaaaccccaattttatttaatcaaagagctgtttttagtgttagatgcaaaaccggaaataaagcagtagttcctattagaaatggttatgtagtacctgacaataatcatcatactgctatatacaaatatgacggtgggttgaaagagcaatgtgtatcgttaatgcaagctattgaaagaaaaagatataatctgccaattattattaaaaaccctaaagagatatatgataaaataacagaaatagcaaatattaatcaactgctttttgacagtttaccaaagcttgattgggaatttgtaacaactctacaaaagaatgatatgtttattttgggaatggattattcggctactgaggaagcattagcagatggaaattaccgattattaagtgaatatttatataaagttcaaaatatttcggatggtatttatagactatgtcaccatactataactaaatttgatttgagtaaagcaaataaaccagacaaaagattttacaatatccaaagtctcaaagcttggaatactcttaatcctcaaaaagtaaaaattaacattttagggcaaattgaaagacaatgattaagcgcaccctctacttcggcaaccccgcctatctgagcctgcgtaatgaacaattggttgtcaatattcccggagctaacgggatggacgatgccacgggcaagaacagtgtgcctattgaggatatcggggttgtggtgttggacaacaggcagataacaatcacacaaggggcgttggaggcgttgctcgaaaataatgctgccgttatcacctgcgaccactcgcgaatgcctgtggggttgatgctgcccctttgtggcaatacaactcagaacgaacgattcagagagcagctggatgcctccctgccgctgaaaaagcagctttggcagcagaccattcaatcgaaaattgccaatcaagccgccgttctcagagggtgtcgcggagcagaggtacgcaatatgctccgttgggtgggggaggttcgcagcggtgatgcagataacctcgaggcacgtgccgccgcatactactgggcaaacatttttacaaaatttaagcgtgacagggagggcgaaccgcccaacaatctccttaattacggttatgcgatactgcgcgccgtggttgctcgtgccttggtctcgagcggtatgatacccacgctcgggattcaccaccacaatcgttacaacgcctactgtttggcggatgacgttatggagccttacagaccttacgttgataggttggttgttgagatgtttgatagcggcatagttgaacttgacaaagatgccaaagctcagttgctctccattcctgtgttggatgttgtgattaatggtcagcgtagcccgttgatgatagccgtaggtttgaccacctcttccctttacaaatgtttcagcggcgagtgccgcaagattgtttatcccgagatatagtggaacgattttcggaatatcgaataatgtgggtacttgtattttttgacctgccgaccgaaaccaagaaggagcgcaaggattatgcttcgtttcgcaagaaactcttgtgcgacggtttcggtatgtttcagttttcgatatacttgcgccactgcccctcgcgcgagaatgccgaggtgcatataaagcgggtcaaagcctccctgccacccaagggcgaggtgggcattatatgcattaccgacaagcagttcggagatatggagatattttcgtgtaaaaaagtagtcgagcgcaagggcgttccgcagcagttggagttattctaaagccccattggcagaacaccaaaacccacctttgcgggtgggttttggtgtgtaatacagggttgttttttaatcctatgacaaggttcaagtcggtgattttgagtgattttgaggcattgtgctgtattaccaatcacaaagatacaattttgaaagcaaatcacaacaatcacaaacgaatacagacacgagcagacgctgtattaccaatcacaaagatacaattttgaaagcaaatcacaactgcgcatatgattcaagagggcacagtagagctgtattaccaatcacaaagatacaattttgaaagcaaatcacaacggacacgacaataaggttacacttgatgctgctgtattaccaatcacaaagatacaattttgaaagcaaatcacaaccgcgtcattgacgtataggtttattgtaggctgtattaccaatcacaaagatacaattttgaaagcaaatcacaactggaacacgcccgatgaggataagatagaagctgtattaccaatcacaaagatacaattttgaaagcaaatcacaaccaaggcatcttcgattacacccgcatttaagctgtattaccaatcacaaagatacaattttgaaagcaaatcacaactcgagccaagcgcaggaagcagcaagcagagctgtattaccaatcacaaagatacaattttgaaagcaaatcacaacgggatgtctgccgcggaatgggataaaatgctgtattaccaatcacaaagatacaattttgaaagcaaatcacaacttgtattgattgatacacagcctctgttacgctgtattaccaatcacaaagatacaattttgaaagcaaatcacaacttaaagtagtcgctttgctctactttttggctgtattaccaatcacaaagatacaattttgaaagcaaatcacaaccaaattttgcttcggatacattaaaatatgctgtattaccaatcacaaagatacaattttgaaagcaaatcacaacaatagttccaccgccatttcttgcaacgtagctgtattaccaatcacaaagatacaattttgaaagcaaatcacaactcatcggaacggatgcaaggtcggatgaaggctgtattaccaatcacaaagatacaattttgaaagcaaatcacaacctgtttctgatgtgtttatgaattttggttgctgtattaccaatcacaaagatacaattttgaaagcaaatcacaacatataactcaatggcaattttatgcgataggctgtattaccaatcacaaagatacaattttgaaagcaaatcacaactcaataagatatggagtgcttacggtgagtgctgtattaccaatcacaaagatacaattttgaaagcaaatcacaaccaactagtatattatcatctcttcaggcaggctgtattaccaatcacaaagatacaattttgaaagcaaatcacaacacccgtctattgagtcgaatagtgttgtaagctgtattaccaatcacaaagatacaattttgaaagcaaatcacaacgctgccaatcgattgcattttatgtgagatgctgtattaccaatcacaaagatacaattttgaaagcaaatcacaaccatcttgacaaactgaacatccatataatgctgtattaccaatcacaaagatacaattttgaaagcaaatcacaaccaaggcatcttcgattacacccgcatttaagctgtattaccaatcacaaagatacaattttgaaagcaaatcacaactaacccagcacaggcagagtgttacgctgtgctgtattaccaatcacaaagatacaattttgaaagcaaatcacaacgaaactattaatcaatacgaagcaattgtgctgtattaccaatcacaaagatacaattttgaaagcaaatcacaaccttaattatgctcgtataattagtgaggaggctgtattaccaatcacaaagatacaattttgaaagcaaatcacaacatagctaacatcgtctttgtgttgaacatagctgtattaccaatcacaaagatacaattttgaaagcaaatcacaacataatgttgggaacattttcgccaacaacgctgtattaccaatcacaaagatacaattttgaaagcaaatcacaacaggacttccgatttgttctcaaggtctcgagctgtattaccaatcacaaagatacaattttgaaagcaaatcacaacacgacatcgccgatgcctacaacgatgactgctgtattaccaatcacaaagatacaattttgaaagcaaatcacaactgctctttgtgagttaactcaaggctgagagctgtattaccaatcacaaagatacaattttgaaagcaaatcacaacctatttacttcgatattaatctcatcgccgctgtattaccaatcacaaagatacaattttgaaagcaaatcacaactaaatttagttcaccatctacgtgtgatgagctgtattaccaatcacaaagatacaattttgaaagcaaatcacaacacgcctaacgtccataattaagcctgtgaggctgtattaccaatcacaaagatacaattttgaaagcaaatcacaactatacaatacctatggacatagcgtaataggctgtattaccaatcacaaagatacaattttgaaagcaaatcacaacaaagtgcttcttggaagctattgcttgatgctgtattaccaatcacaaagatacaattttgaaagcaaatcacaacgcgacaataggatgatgtggcgtttcatatgctgtattaccaatcacaaagatacaattttgaaagcaaatcacaaccgatattaatcaatactttaaagaattgatgctgtattaccaatcacaaagatacaattttgaaagcaaatcacaactggtgataacacagactgtccgcgacacttgctgtattaccaatcacaaagatacaattttgaaagcaaatcacaactgatagaggggctgaagagcgttgtagaacgctgtattaccaatcacaaagatacaattttgaaagcaaatcacaaccctatgattgtacactctttccattgtagtgctgtattaccaatcacaaagatacaattttgaaagcaaatcacaaccgccacctcggtatcgaaaatccgctgcagctgtattaccaatcacaaagatacaattttgaaagcaaatcacaactaaggatgcgcgcggtgaaatctatgataggctgtattaccaatcacaaagatacaattttgaaagcaaatcacaaccgcaacgaggtagtggagggagaagaggctgctgtattaccaatcacaaagatacaattttgaaagcaaatcacaacaccagctacctatctgtttgtatgacgtcggctgtattaccaatcacaaagatacaattttgaaagcaaatcacaactaggagttaaaagtaataaagtcacagttggctgtattaccaatcacaaagatacaattttgaaagcaaatcacaacaacagcgtggtctacccttgcaaaaaactcgctgtattaccaatcacaaagatacaattttgaaagcaaatcacaacggcggcggaggtcggcaggggaggtaggaggctgtattaccaatcacaaagatacaattttgaaagcaaatcacaaccggttttcaaatgtgacacccgttctttttgctgtattaccaatcacaaagatacaattttgaaagcaaatcacaaccgtatgaaatggttggcaataaggatggtagctgtattaccaatcacaaagatacaattttgaaagcaaatcacaactttggtttttgggttggcgaaagtgggttagctgtattaccaatcacaaagatacaattttgaaagcaaatcacaacttgagctcttcgacccacaccagttggcagctgtattaccaatcacaaagatacaattttgaaagcaaatcacaacgatgtttcacgcaaatattcaatatctcttgctgtattaccaatcacaaagatacaattttgaaagcaaatcacaacacggcagtaacgatgccgacgacacctgccgctgtattaccaatcacaaagatacaattttgaaagcaaatcacaacaactaattgaaataggattatctcctcgtggctgtattaccaatcacaaagatacaattttgaaagcaaatcacaactagtcgcctgagcaacgtataccatccctggctgtattaccaatcacaaagatacaattttgaaagcaaatcacaactcagcggagagcgtcaggttggaaacagttgctgtattaccaatcacaaagatacaattttgaaagcaaatcacaacttaatattgattggtctaattcggatgttagctgtattaccaatcacaaagatacaattttgaaagcaaatcacaacttctttttctcaatagctgcaattactatggctgtattaccaatcacaaagatacaattttgaaagcaaatcacaacggatagtaatagctgtgccttgtgagatgtgctgtattaccaatcacaaagatacaattttgaaagcaaatcacaacaatacggcaatgctgtcaatgaaaagcggtgctgtattaccaatcacaaagatacaattttgaaagcaaatcacaacgataacctgatgcacgatgcaaatactattgctgtattaccaatcacaaagatacaattttgaaagcaaatcacaacctaactccacctcttctcgctcacatctcagctgtattaccaatcacaaagatacaattttgaaagcaaatcacaaccatctgcgcggagtggctttcgttaaattagctgtattaccaatcacaaagatacaattttgaaagcaaatcacaactgcaatcgctcgccttgttcattgagataggctgtattaccaatcacaaagatacaattttgaaagcaaatcacaacaacaagctattgatgtattaggcgaggagcgctgtattaccaatcacaaagatacaattttgaaagcaaatcacaacaaatcagcacttgtgaaccaacgtgaattagctgtattaccaatcacaaagatacaattttggaaactgtaatataaactactgttatgttaattttgaattgacggatataattttttgagttttattcttgcatcttcatttgtaaattgccagttaattttcaagtttgcgttatttcgatggttttgccacgcttctacctcagcgataactttttctttggtaggaatatgcctattcaaacactgaccattgagcacgtgtaactctatctctgccatattcaaccaactgccgtgcttgggagttaaaataaactcaaatctatcccataactcctttgcctgctcaggtggaaaaatctcataaaaagcagaaccatcgtgagttttgaagttatccataaccaattttatcttcttggcagtgggatattcatcagatattttcttgatgaattttgcccaatctgcttttgtcttaaaatccgtaacatccactattctcctacctgtaaggggttcattggcaatgaatatatttaccgttccgtgcctaatgtattcataatctactcttgcatcctgccccggtttcattggaattgatgcaacttcttcaattagctgctttggcgactcgtccatacaaacaaccggatactcttcattatagggctgcttataaacatccaacactcgctccatattagccacaaaattagcactctgctcaggcggaatcacccacccctttactttccaaggcttaagttcgttttttttaatacattagacacactaacgtgtgaaatgtaatcaacatactgcaattcaacaactttattagaaagcattcgcaaagaccatttggaaaatcctgctggcggttcgctacaacacaatgctactatcttggcttctaaatcaccatctacttttttctgatagagctgacccgaagggcgacgttcgagtacctcctcaaagccttcttcgacaaatcgtttcttaactctgtcgattgtccttgctccaatcttcaaaaccttacaaatactctcattggtaatccctttattgtcagaaaattctcccttgtcgcaactcaataaaatatgagcaacacgaaaagaatgagcactatggcttcccttttttattattgtctgaagctcggcaacctccgctgccgataatttgatagtgtaacgaatcattgtaggctatatttatcacaaagataaaaataatttacgccatatcaaaattaacataacactacttcttttgcgcccattaatatcagactactcaactacctcatccattggtcggcaatatatgcgagaaaatagctaacccatactaataatagtttgatgattattgtctctttttgcttgtaattatagtactttcccttgactaatactattatcagagccaaaataaaccacatcaaaggcataataagcggaatgagttggattaatatccaataccaatcaatagaatgcctaataggcaaaaaaccgctcacactcagaattagcggtatccaaaaaacagataaaacaatccaccacgaaaatctgagaatcttcaaggattttgaatcattattaaccgactaaaatcggatttttgttaattatttctgcaatcgtttagtaatcagcatgtatttccgcataaatagtcatttcaaaatacctaccccccctcaaaatagtgccatttgtatcgttggggctcggctcgatgagcaaaaattagccccttttcgcttgtgataagtgcgtttgcagttctgaatcatccaaaaaatatccagataactcgtcaaatgtatcctcaccaacaccgcaacagtcgaaaatgctttgtcagtctgcgttttgactttcaacaccgtcaaaagtagatgagcaatgagcgttatccatatctgcgtcttaattccattctcggtctcagagtagaaaaagtgtagttgaaaattctgcttcaacttcttaaacaacagctctatttgccagcggcacttgtagataaaagccacatcctctgcactgatttgaaagttattggtgataaaaaccaatatccgacccttttcatcacgataaacaactttccttaaacaaaccttcttctgctccttattatccttgtaattcagatgaatgtgctcctctgatattactccaaactctttgtcgttcagcactttctctgaaataacctcctgtacctcgtaaacagcattgcgtttcaaccgtccgacaaaccaaactccctcttctgtccagcgggcatattgcccatagtcgttgtacgccttgtcgaaacaaatcatactccctgctgtgaggttgagcttgctcagaaatttcttatcgtgcatttttgcctcgcttatattgacgtgcttggcacaatcggcgtgagcgtctatcatcatatgcaccttcaatccacccttcttcttaccatctcctttggggttacgacctacccccttcattatgtccgaaaataggcgaatagtggtagaatcgaagatgtaaaacttctcaaaatccacccccttaattcggctgaccgacaaaagtggcgagtagtggctcaataactcaaagtagtaatccctgaacaaaacctcatctctatctcgcaaagcatcgcctatggtgcttttggcgggcgatttatctagccccaaatagctcaacttgccttgcaagccctgcattgctgctgcaatctcgcccacagaatcacacctgctaaagaccccaaagagcaaagttatcaactgctcccacgagcgaaatcgtttgtagtacctatccgatttgtggcggtgaactaacaggtcaaacttcgctcttggcagaaaatctacaacctgtttgaaaatcggctgaccgactaaatttttataactatctttgcccatagttgaatcttgtattgtttgcacttacaaaattacaactatcggggtaattctcttcaaaggggattacccctctctttttttctcaacttttttgtcggtcagtaatgattttgaataactatttgtatacatatccatcaaaccaagttgcataaatggttgcaatttctaatgttcctgtattatattatacgtttaaacaattaacaataaacatgcagcaatcagcaaactctgcaatctatttgcgtcggctacatagtacggtaatgctcccggcaattttactattttcactccgtaattcaaaaacacacccacttccattaatagtatcaacatcccttctatggaaatcaacagtacaagattagaattccccatatgctacttgctttccgtcgacataacgaacaacattaaagagtgcgccctcaagcgttgcaacaaccatataacccgtaataccaaatagtctaatcatgggattattgacaaataaaaatggtactactgggttttgtatggaaaatagtagcatagtataactaatcaaaaatcaccttagttgtctttgcggctttcgccgcagtgacaactaaaagtattatattgaaaacaagtaatatataattatatcacacgaaatccagtagaaccaaaaaaagaggccccaattttaccgcaaataattatgtttgttgattctatatgg

SEQ ID NO: 1739 - DNA, 22961 bp, synthetic construct
  misc_feature 1..22961: note = Synthetic
  source 1..22961: mol_type = other DNA
tttaacgacttgcttcaccaaatcgcctctgacccagagattgttctgagaaacatttttcagctttttcatgatatggtaaggtattatgttcccgaagggactgatgactatcccatcaccggtgaacatgccggatttatgcattacgacacctataaacttttcgaggaaaactgtgctgaaccattttttgccgaccgattgtttacaaaccgcctcatggatttggttgatagtattaaaaatggtactcagaataatcacatctatcttttcgaaggccctccgggcagtggaaaaagtacttttttgaacattctattatctaaactcgaagcatactcacgcttacctgaaggaaacatatataagattcaatggcgtctcgatcactcaaaaattgacacttcaaagaagatagttacttctaagcatttcgatccggaattccccgaatttgtttctgaagtttctcagacttttgaaacacaacaatacacgaatatcacctgcccaaataacgatcatccaattacattaatacctattgagctgagacgtaaatttttcgacgaactgatttccgataaagcatttaagaacacgctttttaacagcaaagcctacgaatgggtatttaaagatacaccctgtagtgtttgtagctcattatacaacgaattactcgacatcacaggcgatccactcgaagttttttctatggtctatgcccgcagaacagatttcaaccgtcagtttggtaaaggcatcagtatttataatcccggcgacgagtataatccccgacctattacaaacgcatctatccagaatctgatcaacgagctttttaaaagcgacgaaatacgttatgtctattcaaatctggcttacaccaacaatggaatttatgctttgatggatatcaaagaaaataacattcaacgactgaaaaaccttcacggtattatcagcgacggtgttcacaaagtagaacataccgaagaaaaaataagaagcttctttgtgggtctcatcaacccggaagataaaaagcattatcaggacattcaatccttccgcgaccgtatcattaccgtcaaaattccgtatgttctggactattataccgaatgcaaaattttaaaaaataaatttggaagtgatatcgaaaaattctttctaccacgcattctgtcgaattttgcaaaaattatcatttccacacgtcttgacaggtcttcctttgtcctcaataactggctaaagtcgcccgacaaatacaaaaaatacattgataaagatctcttgctccttaaaatggaattatactccggcaaaattcccaactggttatctcccgaagatgtaaaaggcttttcgaaacagattcgcaaagaactgataagtgccaccgaattcgaaggaaaagaaggtatttcgggtcgtatgtcattgaatattttcagtgagtttatggcaagatatcagcaatgcgacgggtttattcatatgggacaagtatctgagtttttcaccacgaacgagcagtataaaggaatgattcctgatggcttcatagattcgatgaacaaactatacgatttcgatatcctgcaaagagtcaaagaagccatttatttttacaacgaagaccaggtcacacgagacattattaactacttatatgccatcaattatgagtcgggtgacgaagtgaaatgtccttatactggcgatgtaattgaagttacgaatgagtactttaaaaactttgaagctttctttattggttccacttcatccgaaagcgaaagaaatcagttcagaaaagacattcatcatgaatacattacaaaaacgctatctcaagaaatcaaactaaaaaagaagaaaattcatgagacagaactcttcaacgaactttttagacgttattccgacaatctaaaagaaaactctctgaccccttatgcagaaaatgacattttccgaaatgccctattggaatacggaaccaatgcatatgtcaaaactgacgaaaaaatcaaaaaagaagtcaaccgtattgtcgccaaccttatgaaaaaatcgggctatagtgaaaaaggcgcattgtacatcatgctgcaagtaattgacaaaaaattgcatctaaaatttgacgatttcaagccttattaatacgtttttatagcagtaattattttctgcccaattattcatgagaaataccattggcctgattcttataacactattctttgttagtgatatttttgctatacctgttaagaataagtctccccttattcgaaaaacaatgacacacaatgggctgcaacgcagttactatttatatgttccttcgaagataaaccaagcaaaaattcctctcctgattgcattacatggcggcatgggcaacggagaaaaaatggaaaaactcacccaatctgggtttaacacgctggctgacgaagaaaattttattgttgtttatcctaatggcattggcagaaactggaatgacggaagaaaaagcatgccctcaaattacaaagcccacaacaataccattgacgatgttgggttcatttctgctttgataaaaaaactgatagaaaccgataacgtggatccggcaagagtctatgtcactggcatgtcgaatggagctatgatgacccacagactggccatagagttgagtgatcagatagccgcaggagcggccgtatgtggaaatattccggcagatctcacaagcactccgaaatctaaagtatccatgatgatgattaatagcatgaacgatcctttagtaccatacgaaggaggatatgtgcatttcagaaaaaagcaactggggcgcattctttcagccaaagaatcgctgaatttctggttagagcataatggcattgtcgtggagcctaccaacaaagaatttccgagcactcaacctgacgatggttgccgggcgattagcgtttcgtatctcgataatgatcaaagtacagaggttgttttaatttcgatcgaaggaggtggacatacctggccaggtggatggcaatatttcggtgaaaagctaatcggaaaaacctgccgcgactttgatgcctgccagatgatctgggatttttgcaagaagcatagcaaataaatataacaaactatttgatctaatgtagattttgtttatttttgataacttataaatgaatttatctttcaaataaatatatgtacatgctaaaaacaatatttttaaaaatcagtaacataataattgttagttgtttaacgatattaggatttgcagtttcgtgtaaaaaacaacccgatgaatatggcacaccctatgccgtatttaaagtaaatggtaatgttacaaataatcaatcaaatgataagataagtggaataagggtaataatgaattcagacacatcgtatactgacagtaatggattttactctgtacttgataaatggggttttccatctgatcagacatattacatacattttcaagatattgacagtatcacaaatggatcgtttaataatttggatactgctgttcattttatcaacccaactttttctaatggagatggtaattggtacagtggtgagacttcaaaagttttcgatgtaaaattgaatccaaaaccatgacagcatctaagctctcatttcgtaaaaaaattgctttaaacttattccgacaatataaacttaatgaaagtaaacttcatcagctcaactatatactttgggaatgcacattaagatgcaacttaaattgtattcattgtgacagtgattgtaaaaaaaactctacagtaaaggatatgcccaaagaggatttttttacggcgattaatcaaataaaaacaatagttaatcccaataaaacaatgatcgttttaacaggtggagaaccacttttaagaaatgatctggaaagtattggatttgaattatataaaaatgggtttccctggggcatggtaacaaatgggttcctgttaaataaagaaagactcgaaaaccttacaaattcaggactaagatcgttgaccataagtttagatggacttgaagatagccataactggttaagaggttcaaaagaaagtttcaaaaaagtaattagatccattgaattacttaaaaacaatgtagaaataatatatgatgttgtaacttgtgtaaatcaaaataactttaaagatcttgaaaacctaaagtcattattaattgacaaaggggtaaaagactggagaatatttacaattttccccattgggcgggcaaaagaaaatattgaattacaattagactcatctcattttaaaaaattgtttgattttattaaagaatcaagaaaagataaaagaataaaaattagttatggttgtgaaggatttttaggctcctatgaaggtgaagtaagagaaaacttttttatttgtcgggcaggaattaatatcgcatccattcttgcaaatgggtcaatctcggcatgtcccaacataagagataattttattcaagggaatatctacaaagacaattttgcggaaatatgggaaaacaagtatgagatttttcgaaatagaaattgggcgaaaactggaatttgtaaagaatgtaatttctttaggtactgtgaaggtaatggaatgcatttaagagatgaaaagacaggagatttactgttttgtcatttaaaaagacttgaagaaggagaaaatgcaactaactaaaagtcaataaagcaatgtattagatgtcatcttttttacatccaagtcaaaaacatagcaataattcaaatttctgacaatatttcacacacacaacgtcaccttttgggcattttagtagtctttaaaatgtatttgcttgtttttttttaaatctttttttagctttgaagtacctaatcaacctttcatttatgagaaccaccctattattcacgcttttggcaattttcaccatatctttttcatttggaaaaggtattgatatagagaccgccaaaaaagcagccggaaatgtttatgtaatgcttaacccggcaaaaaaatcagcttctgaaattcaagtccaattaggaagaatattttcagacgaaaacaatcaacctaccctatatgtcttcaatgtgaattataatgagggattcgttattatttctgccgacgataacgcaaaacccgtggcaggctattcattcgaaggcagttttcccgaaggtaaattgattccccattttcaattctggatggaccattatgccgaagaaataaagtgggctgctaagaatccacaatctgtaacttctgaaattaaacaaaaatgggacgaagtcctcgtaagtcatgctatggctaaagaagtaatgatggtgcagcctttgcttttaaccacctggaatcaggactggccatacaacgaattatgtcctgttgatgttgacggacccggcgatcatgtatatgttggttgtgttgcactggctatggggcaggtaatgaaatattacaactacccacccaccggacaaagcagtaatacaacctacaattggcagaatggcggttatggaactttgtctgtaaattttgccagtcagacatataactggaacaacatgtctaatcgtatcattgggaacaatttagaaatagctaagatgctttatcattgcgccattgctgtcaacatgaattttgcacccgacggaagtggttcacaaaccgaatatatagccactgctttaaaaaattatttcaaatattctaccaatgtaacatacaaatataaagacagctacacagaaaccaactggaaaaatttactcaaagctcagattgatgcaagtaagcccatggcatactcgggtcagggtgatggtggtggacatgcctggaattgtgatggttatcaggatgatatgtttcatatgaactggggttggggcggcgctgccaatggttatttcgaagtagccagtatgacggcaggcggttatactttttcctcggattttggtgctgtagttgatataacacccgcttctggctatccagaaggttgtacttctaccgctaaggttatttctggcgccgatggcactttcaatgatggcagcggcaatcagaactatgccaacaataaagattgcagatacctcatacaaccagcctgcggcgaaaaaattcaactcaacttcgacgctgtttatttaagtactggcgattcactttacgtatacgacggaaacagcacatcatctcctttgctggcaacctattcttcatctaatgtaccttcttcgtctgtttcattaacaacatccaacggcatgttactggttcgttttactaccgacggctcaggcactgccgaaggctggtacgcgagctacagagtcactttttgcagtggtaccgaaacaattacagcagccagtggcaccgtaacagatggaagcggcacgtgcgattataaaaacaattctttatgtactttcgacctctatcctccgggagttactaatttcaaccttaacttcaccagtttccagcttccttcaacagatacaaacgactatgtcatgatctacaaaaactctatgacagcagccaatctggtcgctaaataccacggacagaatatcccaagtcaactgaatctggaagctacccgtgtgtatttacgtttcaaatcaaacagcgatgtattaggcaatggatggaccgtagtatataatgccaccaccgacgtgcctcagaatattgccaatcttcaggaactgatactctatcccaacccttcgcaatcaaatgctttcatcagttttacttcacctgtaaacgacaaaattgaaatcaccatgaccgacattaccggaaaaatgattagcaataatgtaattgaagccagcgaaggtcagaatctttttgaagtaaatgctcctgaaaccggcgtttacttaattcatctacaaacttcttcaggtacagctacgctgaaattcattaaacaataagtgatattcacatacaaaaaagagaggctgtcgcagatgcgacaacctctcttttttcatactatattctcaagacaccagaactagttcaggtaatcttttctcattctgtctagcagttgctgttcttcttcgcttacattaccatctacctgagcagctttctccatcagtttaataatcttttcgcgctttttaggattatcgggcatacgaataggaagacgattattgattgccaacgaaatcataggttcaattttattaacattataaccccatttcttcgaaagacttcgtagtagtgccgattcttcgtcggttatttttccatcaatggctatcataacagcaacattattgaaagcaaaatctcttacatccagcagatcgtcgagtttttcggcattggctaatacgccaaatcctccttgatctgtttcaatagcatcagccataccagcattaaaagtcatataacccggttctatcaacgaagaaataatccattcgcctttgactgcgttaagaacagaaccacaccactgacatttaatatcaatggtatcgcccaacgtaccaccgcaattcggacaagtatgtgcatataatgatcccttagaagctttatcatcggattcatacaacatattaaccatccaggtatcagacatcactgcataatccagtttaatcagttttccactgctaatatctactcgttggaaagacattttcacagcaactttaattgaatatttattgccatctttgttggctccggtaacagttacgtcgttcaaataaatacggttatatacgaaaggagcttcgttcttaatctgttcttcgagtttctgatataattcatcgctgacaaaacggcgaagcatagcggggtctttgtgcgttctggcggtctgtatctgcaggaatccgttggccactttatcttcgatatgttgaattgacaaacctggaatatcgcctatcatagaacgtactttgcgtatatgtccactgtcataagatgtaattttcctgttttggaagatgaaatcgtcggcttgagtaatttcgcacaatacccaatcgaaatcgcccatagcggttatggctccacaatgagcacatttagatatttcgcccatatcagtgggtaattcggcgccacattgaggacaattattattgctgtaaatattcttttcggctaccccttttttacggataaaactccagtattccagaaaagcttctccaccacctgaattaagttccgaatatttagtacttacaaatttatcttcgagcgatgcgctaacggccacatgtattacatcatattctccgtcgggttcatagccgaacacacgtacatccagcaattcaattttatcgagtttattggtaacttccaattgcttcatcatacggaactgcgtgttaaaacgctggtaaacaccatcactgataaaacgacgaacgggattcatactgccactcgaccaggcattttgtatgcccataaaagcagtcctgactcttccgtaaaaatcttcgagtttaaaatcaggattgtttttgtaaaattcttcttcgcctttgggaaccaagggagcattctcattcatcttattgagtaccgatctttgtcttgcctttttacgtcccagataatagagtagaataatgactccgattagaattacattataaggaaaaggaatagtaaaaagtataaaataaatgatctgtcccagtccttcgcctccaccatcaccgccaccaccgccaccaccggcacgtgcgtatccctcggccacaagcacaaacaaggccagtatcaatatcgacattttaatcaacaaatgataatttactactctcttcttatgtatcatatctgcattttttttatctgataaatgtaagttttttttgataatgagaaataatttttgttcgttttttgacaaaaaaaatgcccccgtattgaaagacgagggcgacttaaatgttttcacaacggaataatccttattgtgatttgcttcgttcaaaacaaaagtaataaaatttaattacaactcaaaaaaatattttatttttacagtagaatataacattataattatgaaaaagattctaggattggatttgggttcggcttctataggatgggcaatagtatctgaaaatactactaacaataaaactgactatcaaattattggtttaggtagtagaataattccttacgaaggtactgaaggaaaagattttgcaaaaggaacaggtgaaagtaggaattccttaaggactatagcaagaacttcgcgtaagggatacgatagatatcaacttagaagaaaatatttagttgaaattctcattaaaaacaatatgatgcctgatgagaatctgaagcaattgcctaaaatgcagctttgggagcttagaaacaaagctgtttcttctgaaatatctttaaaggaattaggcagactattattatggcttaatcaaaaaagggggtataaaagcagtagaagtgatgcaaatcttgataaaaaagagacactttatgttgctaatgtaaaaagtaggcatgaaaaaattaatgaacttaaccttacaattggtcaatttttctatgaacagttaaaaaaagacgatttttttcaagttaaggaaaatatttttcctcgtgaagcatatattgaggaatataatgcgatttgtaaaactcagcaaaaatttcacccagaacttactgaagtcttaatagaaaaaattaaaaccgaaattatttattttcaaaggccgctgaaatcacaaaaaggattagtctcaatctgtgattttgaaggcttttggaccaaaaaagataataaagaatattttgtaggacctagagtagcgccaaagagtactcctctttttcaattagttaaaatttgggaaaatataaacaacattaaattaaactctagaactggagaagaaatcgaaattactaaagatcaaaaaatagcgttatttaatcatttagacaataatgaaaaactaacacaatctgatttattgaaaatcctaaatctaaaaaaagagaattgttatgtaaataatcaattatcaaaagggttaaaaggtaatattacaaaaatcaaaatcaagcaatgttttgacagtaatgagaatgcgacaaaacacttaagacttgatttaaatattaaaaatgggtctggagaaggatatctctacgataaaaaaactggagaaatttttaattctaaaccagccgtgttcattgatccattagttgaaacagaaccattatttcagttatggcacaccatttattctataaaaaaccaagaagaatgttcgagcgttatacaacgaaaatttaatattgaaaaatcaacagcagttaaactagccaatattgatttcagcaaagagggatttggaaataagtcaacaaaggtaattcgcaatatattaccatatcttatggatggcgacggctatagcgaagctatgagctatgctggatatgatcattcaaattcactaacaaaagagcagaattttgacagaaaacttctagacaagttaaaaccaattcccaaaaactcattaagacaacctatagtagaaaaaatacttaatcaaacagttaatgttgtaaatgctattattgacgaatatggaaaaccagatgaaataagaattgaacttgcccgagaattaaaacaaagcaaagaagaacgcattgacactgaaaaatcaatgaatagaagggaacgagaaaatgaacaaattatcaaaagtttatcagaatatggattaagagcaactcgcaataacattatcaagtggcgcttatacgaagaaattgataactatgaaaagaaactgaatgcagtatgtatctattgtggacagccaatttcattaatcgaagcaataaaaggaaatgatgttgatattgagcatattattccaaaatcaaaattatttgatgactctcaaagcaataaaacacttgcacataggcattgcaatagaaataaaaacgacatgactgcatatgattttatgaaaagcaaatcagaccagtcgttatcagagtatgttgaaagagtaaatactttatatacaaatagaattatcggaaaaactaaaagagataaacttttaatgtcagaaaaagatattcctgacaattttattgacaggcaattaagagagagtcaatatatcgcaaaaaaagcacgtgaaattcttcaaacaatctgtcatgaagtatggagtacaagcggtaccgttacttccgaattaagacatttgtggggttgggatgatgttactatgaatcttcaattagaaaagtataaagagcttggattaactgaaataaaagaatgggaaagcgaaaacggaaaaaataaacacacaaaagaagtgataaaaggctggagtaaacgtgatgatcacagacatcatgcagtagacgctctgactattgcatgtacaaaacaagcattcattcaaagatttaatactttaaactctggtaaaacaagagaagatatgcaatttgaagtagaaaatcgttcggttcattttaaagaaaaaatgtctttattagagaaatatattgtttctcagcaaccaatctctgtgaatgaagtcgaaaatgcagtttcaaaaattttaatatcttttaaagcaggcaaaaaagtagctgttaaaggaacaagaaagattgggaaacgaggcaataaaaaagttgttcaaacaggtataattatcccacgaggatcattaagcgaagaaagcgtatacgggaaaattaaaactattgaagaaaagaagcctgttaagtacctttttgagaacccgcatctaatctacaaagcatacattaaggaattagtcaagaatcgtttaacagaatttaatggtgatactgcaaaagcattaaattcattaaagaaaaatccaatttatcttgataatgacaagaaagaaataattttagaatttgcaacttgctataaagatgaatatgtaataaaatatcccgtaaatactgactttaaaaaaactgataaagtaattgataaaagaattaaagaaattctcattacccgtctgaataagtttggtggtaaccctaaagaagcattcaaagatgtacaaaggaatgatacaattttaaaatggtatgaagatgaagaattaaaacacccaattaaaactgttaggtgttttacaggcctttctgcaattgtccctgtaaaaaaagatgaaaatggaaaggatattggatatgttaaacctgggaacaatcaccatattgctatttatactgatgcagacggcaaaaacattgaacatgtctgtactttctggcatgctgttgaaagaaaaaaatatgggattcctgtcattattcaagattctaatgtactatgggacaaaatacttgaagatcctgagggcacatacccagaaagtttcttagataaattaccaaaagctaatctgtctattaaattaagtatgcagcaaaatgaaatgtttattttaggattaactcaaaacgaatttgagagcgcaattgttcaaaaagacgaaaagttattgagtaaatttctttatatagtatggagtacttcaagcagcgattactggtttagacaccacctagaaacaaagaattcggaaataaaaaacattattggagcaaaagaaagtaaaagatattatagaataaaaagtgtaagtgcttttttcgaattaaatcccgtaaaaattaaaataaattgtctggggcatatttcaaaagagttaacatttactaaataatgaaaataaacgatttcttgtttccagaaaatttttaccacatctacaaccactccaatggtcgcataaacattttcaacagcgacgataattttcgattttttatgggcagatataagaagtatatcagtccagtggcagatacatacgcatggtgtttaatgcccaatcattttcatttattattgcggataaaagaagaaaatgagatagttgaggtgatgcgaaaaacaaatttgaaaaacaaaaacctccaaggtttttgcaaattaaacagcgacgataaaataaacaaggtaaaccttggaggtttacaacatataaagtttattaatcagcaattttcaaatttatttaattcatatacaaaatcttataataagtttttcaatacccgaggaaatctgttcaatcaaaattttaagcgaaaagtcataaccgacgaggattcaataattcgcttaattctgtatatacacaataaccctgtacaccataagtttacaaaagaaattggtgattggccatactcctcgtttcatagttatttgtctgctgactattcgctgttacatcgcaacgccctaacggatcatttcgacgacttgcaaaactttattttcatacacaaacaggagaatcttattagaggagatattacgctagaggcagaagactagtaacgcacctttttatttgaggacaaaaaaaaaacctccaaggtttttgcaaaataaattacgacgaaaaaagaaacaaggtaaaccttggaggtttacgtttaatttattttcgttcttaaataaaaagttgtattatgattaagaaaacgttgtatttcggaaatcctgttcatctcaaactcaggcaggcacaacttattgcaagctatctcgaagaaaattctgaacgttcagtttctgttgaagatattggtctggctatactggatcatcctcagataactattacacatgggttgatgaatgcattaatcgataataatgcagctgttttatggtgcgacagtcatcatctgcctaacggtatgatgctgcctatgagtacaaatcaggtttttacaaaaaaattacaaatacaacttgaagtcaccgaacctttaaaaaagcagatgtggaaacaaaccattcaggctaaaatcagaaatcaggcgatgcttttggaaaggctgggaaaagatgccggattgctgtatgcattgatcgaaaaagttactagtggcgatactactaatattgaaggtcaggcagctgcgtggtattggaaaaagctatttgaatttgacgaaacgtttcgacgtaaacgatttggggtacccccgaataatatgttgaattacggatatgccatcatcagagccgttgcagcacgtagtctggttgccagtggttgtttgccagcagtgggcatacaccatagaaatcaatacaatgctttttgcctggccgacgacattatggaaccctacaggatttattgcgatgtggctgttattgactatttatgtgaacatggggctatagaaaatgaaattttacaagcagaacataaaaaattactcctgcaactacccgcttgtgacgtaattatcgacgacgagaaaagtccactaatggttgctatgcaaagaactacagccagcgtaatgaaatgttttgaaggagaaacccgaaaaattcaatatccgttactttatgcaaaatgaacgattaaaccaatacagaattatgtgggtatttgtgttctttgatcttcctactgagacaaaaaaggatcggagggattatgcacttttcagaaaaagtctgatacgcgatggttttgctatgatgcaatattccatttacacacgacattgcaacagtcgagaaaatgcagacgtgcatataaaacgggttaaaagtcatttgccacctaaaggagaggtcattatcttttttctgaccgacaagcaatttgggatgatggaaatatttaaagggccatcgttgaaagaaaaaatgaaaattccccagcaattggaattattctgacaggataaaaaaaaagctgccagaaataaacctgacagcatttttacaacagtttttttgacgatttcaaacctacaatctaatacgattaagcctttcagacataaatactgttgtaaaagtattgaaatcaaagaacgaaagcaaatcacaacgttaataggaaacatcaaaactttgcaagactgttgtaaaagtattgaaatcaaagaacgaaagcaaatcacaacgtcattacttcaagtgaaagttatgaagtaactgttgtaaaagtattgaaatcaaagaacgaaagcaaatcacaacgttggtgtcgccattatcacacagaagaatactgttgtaaaagtattgaaatcaaagaacgaaagcaaatcacaacgccaaatgcaaacggatcctattcattcaactgttgtaaaagtattgaaatcaaagaacgaaagcaaatcacaactagcacgtgttagccacagtacattggttaactgttgtaaaagtattgaaatcaaagaacgaaagcaaatcacaacccaaggaaccatacttaatttttggcctttactgttgtaaaagtattgaaatcaaagaacgaaagcaaatcacagtaaaaattgaactaactgttgtaaaagtattgaaatcaaagaacgaaagcaaatcacaactcgcacattacgagtacaaaaaactcgataactgttgtaaaagtattgaaatcaaagaacgaaagcaaatcacaactggtaattgtggagggggaatatgaagtatactgttgtaaatgtattgaaatcaaagaacgaccgcgaagcagcatgagcacctttaaaaatatacaataagcgaataaagcaaatcacaacaagaaaatgcgttgatgtttctcattcaacaaatttaaacatctaccttctggtggattgtttgtgtttgatgtttaaaagaattagagaaagattttgaatagattttatttaaaccctacatttgtttaaattttaaacacagaatgaatctagattttgtaaaaacatacaatggcttacaagtaaaaatgttttatgctactgtattaattttcacaataagatatatagtagttataggctataatatttctaatgatcaagatattttaaccataataaattcaataagtttagccattattattggaaaccttattttcttattccgaaatactaaatatattaaatttgcaactttaattttagtttataatagtgtaattagcatatttttatctttatcgttgaatatatcaggagccactgaaagtatttatttagctcgcgatttaattgttataaatattttaatattaattactgcctttatgaccgataggctaaacactttaattttcaccttagttttaattaccttattcttaacattaaaacctgtttttggcattgatatttattcggcatatatttatttaatcttgttttttatagtcgccggtttttttatttatagtttattggcaaatttaattgagtcaaccgttaaaatgagtatggaggccaagttaaaaattgaagaactttcaaattttaaaaataaaataacacaatttttatttcacgatttaaaggtgcctgtaaattcaattattgagttaaatgcgcatgagaataacagtaattgtaaaaaaacagttcattatgccgaaacaattaaacggcaattagaggatgtgttagatattgaaaggcttgaggaacctgaactgacaataaaaaaagagaaaatattatttagcagtattcttcataaggcagtattatctgttgaggttttagccattcaaaaaaacataagggttaactacgatttgtttaatttgggatacctttattgcgatgggaacattatagaaagggttatcataaatttattgtttaatgcagttaagtattctcacaataacactgaaatatccatacaagtaactaataaggctgatatttgtgttatctctgttaaagatcagggtttaggtataaaaaaggaacacttaaataaggttttcgataagtattttaaagttgaacccggattgtctaaaaatacttcttcgaatggattgggattaaccttttgtaaattggcagtaaatgcacataaaggaactatcagggttacttcttctgaaaatagcgggtccgaatttattattgaattgcctggatattcaccaagtatagaaaaagcaatacctttaacgataacgaaaaacgaaattatatttagtggaacggaaaaagagaaaataaaagacatctgtgttacattattgcacattcctatatataaaatgggcgaaataattcccattttgcaaagcctagaaaaaattaaaatacctaaaattcaacaatgggtcgaaattcttacacatgcagtatatagtggaaatcaggaatatttcaaggcacttttaaatcaagttttagaaaatgatggtaaatcccaataaaaaaatactgatagttgacgatacgcgcgagaatcttcaaagtgccatgaaatttgtacttgaggacgaaattccttattcgttgcttgctgcacaaaatggtcaagttgctttacagatagccaatcttgaacttccggatattattattatggattgggaaatgcccgtaatgaatggcattgaagcaactattgaattaaaacgaaatacaaaaacccaacacatccccattatcatttcaaccggcattcggttatcctctaacgacttaaaaatagctcttgaagcaggagcatccgattttattcgtaaacccttagaaaaagttgaatttatttcgcgaataaactctcatttaaaactagcagaatatattaatactgtagttaagcaatcggttcaaataaacgaagcgcaaaatcaaaaaaacgaagaaatgattcgtgttttagagtcaaatgttgaagatattcagaatatggtagatttttacggtagcttattgcatcttattataaaaaaagcagatagtgttttacaaaagactgacattaaacatgacgatattaaggaaattatatcaagtattgaaatgggtcaaaaaacactttcaggattttcaacattaaatactttgcccgattctaaatttgtgcaacttctgttacaaaaacatgccaatttaacaccgcaagaaatacaactttgctattatttaaaacgcaatttacaatcgaaagatattgccagtattacttttcgcgaattaacttctgtaaaagttgctcgaagccgattacgtaaaaaactgggcttatccaattctgataatcttacgacgtattttaatcagttttagtaaaaaaattaccgcttaccttttgtataccttacgacaggcttactgctaaccttatatccctacaactcaatgcatttataacgtaaactagtctatattagcgtaaaattaaatttataagtatgtttagtaaaaaatggaatgtatttagtattaaaatgttgtttttagtactttttggtctattatcgataagcaaaagccaggcacaatttgatattgatggtggttttatagttgataatggttgcaataaattaaaagtatactggggaagtggtaataatgcatgtgtaaccccatattacaatgaaattgctatgtatgttaatgggacacaatcttattatggttcatggaatcatcctgatggattatggggaaattgcacttacaatacgagtcacttagcccccggaacccaattaaacgtatatttagcaattcgtcacatgggattctggtgcgattattgggttaattcaagtactttagtatttacagttcctgggaatcagcctattaacaatgttagagcggatgatggtaagtatgggaataaaattaatatttactgggatagattaagtacgatttgctacgataatttaacatataaagtatattgtaatgggtctcttctcgcgactttacccggcacgcaattatcctatactcataccggattacagcccggagtaaccaatacatatgtagttagatcagtagcaaatggggttgaattatctggtgtttcttcggttaccgataatggttcaacattcgatataaacttacatgctacgaatagtgactctaccaaagttctattaacatggaataattttagcaatgttaattctcctaatggtttcactattgaaagatacaatggcgtttcatcaactcctatagccgatttaaactttaataattatacttcacacgaggattttatgtcaacgcaaggattaattcctggttatacatatcgttataatatttttgtaaaacctttagcatccacaggaatagttgatactgtttacggtaaagtccgccccaacgggaaaataattggttcagtaaaaacaccttcaactattgcgaatcccaatggagttggtattcctaatgtaagagttgttgcaaccttgcgtgggacagcacttccttccgatcccacatcagtatacgaagccataaccaattcaaacggcgaatacgtaattcctaatatttactattatacatctgcaacttttaaggtccaacctattttagctggaagaacttttagtcccgactccatggatgtaacattaacttctgcaaatcctgctctggctaatttcactgatttatcatcctttattgtttcaggaaatatttctcaaggtacatgtccggttgaaggggttgatatgtatttaaataatcaaagtcaaggcgtattaaccgacgaaaatggagattacagtttaaccatttctaccggtggcacttatagtattaaacctatcttcgagaacaatttatttaatccggatagccaagtagttacaataactgctgatatgacaggaattaatttttctgatacgactaaatatgtattagaaggtcatgttaccgctagttgcgaaacttatattggtgttgcacaaattcgtttctattcaaacgataacggtacttgtttcgatcaaacagttacaactgatgccaacgggtattattctcttgttttgcctgccagaagaattaacataaccatgactaatttcacatccgttgatgaattattggttaactcaattgctgtacaggcttatttttcaaacattaatgaaattgatttaacccattacaatgcaaatactttccataacgacagtactacattgaattttgtatatagggttccacctacaattgaaatgttaggtttaaatacttatcaaacgtgtgccggcgaattattaccaatattacaacaacacagaccagttgtcattgaatttgcagcgtgggattcttttaatggatcaaattgtcctgctggagatggttatattttaatcagcgaaaatatttcgtcgacaaatatggatatcaataccgatactatttattatactcaaggcgaagccattgaatacagcttaattccgggaacgcctaatattattgcccctcacaaaaaatttattgaggctatattagttcgagacaaccaaaaagacactgcttatgccgatgttgttgttgttggacatagaccccgttcgcaaacttttactaccgttacaccccaaataccatttcatattttacataaccctcccggagacggcagttatagttatctggcacaaaatacaagtatttccaattcattcactacaagcttcttgcaagaaggtagtgtggatacatatattcgagcacaattgggtcaatcgatttcagtagaagtcggatttattgccggagtttcaaccgaagtatcgactcaattagatgttacaggaagttttggtattggcgcatgtggattaaccgaagatgcttctaccgttacatcaactgcaaatcaaatgtttcaaacttcaggtaatgtaaatattaccggtggtgatggcgatgtttatgtgggaggcgctttaaacatgctttatgctgcatcggatgtattggaatataattttgacttatgccaattcgaaaccgatgtaactcttgtcatgcaacccacaggaatttccactacttttatgtacaccgaagaacatattgtaaactccattattcctgaattagaaaacattacaaactattacttacaacaacaagaacaggactctgcctctttctttcaggatcaattagatatgtggcaacaaatagttgatgccaatcacgacaatataacagctgccgattccattgacaatgtatcttttagtgccggcgtattgaatgattattcagttgaaacagtaagatccaattcacattctttcgattttaatttctatttagattatggtgtagccgttgatattggagcatcagttgcaggaaccggcttatatggcggagttgctgttcatggtcgttcaacatggggcagtgtagttgcaagtgaaacatctacctctacaactgtaggttatgtgttgggagatgacgatttgggcgataattattctgtaaatattttagaagataatgtttacggtgttcccgcatttaaacttattggcggaaaatccagttgtccttgggaacccggaacactcccacgcgaaggccttcaattaatatcaaatacatattctcaatctgttgaagaaagccaaagtgctgtatttgtattgcaattaggaaatttaagcgaaaacaacgaaacaagaacctacgatttggtattcgaccatacttccaatccttatggtgctattttaaccataggtggtagtcccgtagtaggaaatgtaccttatccctatactattgcaccaatgggaagcgcaactgcaaccattaccatagaaaaaggacctattgaacaagtttataacggattaaaattcactctacaatcacaatgcgacgaacaaattaatgatgatatattcttaaatgtgaatttttacgaacaatatactttaaatattgctgtttcgggttcgggaactaccaatttacctttaggaaataatatgtataacgaaggaactacggctattttatatgcctctccttctttgggttccgttttcctaaaatgggttgtaggaactacagaatatacgagtcaagcaattgaagttttaatggacgaaaataaaacagcaacggcttattttgttcccacaacattacctcaatttacgcttacagtaaccaaatccggagacggaaatacaatgccaccaaccggaacttatatcataaataatgatagttctatcacattaacagcaatacctgatattggaaatgtctttgctaaatgggaaataaacggcgttgattatttagataacattattagcattacaattgattctaatacaacggcaaatgcatgttttattcaaacatacaatgttcaaatacagcctatttgcctagtctcagtggatagcattcagaatgccaacttaattgtttgggaaaaagttcaatcattagggatttcgcattataaagtctacagagaaacatctatacctaacgcttatcagtttgttgcatctataccttatgatagcatgagtacttaccttgatattgacgccaatccaatgattcgcgcctggagatataaactatctgccgttgatagtagtggaaacgaatcacttttaagtcctcatcacaaaacaatgcacctaactgtaaatcaaggaacagggacaacattcaatataatttgggacgactatgagggtttcagttacaattcatttattattgaaagatatctcccatccaccggctgggtaatacttgatacacttccaaatacgctacactcatacaccaacattgctccttcta

SEQ ID NO: 1740 - DNA, 22343 bp, synthetic construct
  source 1..22343: mol_type = other DNA
  variation 18497..18511: note = n is a, c, g, or t
  misc_feature 1..22343: note = Synthetic
tgtgcaaacaaagataaggaagtgctaatataactaaatttttgcaaattatgaaaaattttgtattcaaaatttctgggtattgcccagaaatagttaaagcaggaaggtttggggcaaagttccttctgccagggttatcgttgattattgtctttatgacatcatgctacgggggagtccatcttacaacaactcttattgacccgcaaaatgtactccaatatgttttatgtgcaggtggtactatgtgttttactacattgattctagttatagattatacctttatacatggaaataaatctggctggaatattctgattcgtatcattttggcagcaacagcaggttttctgatttcaattcttacctgcctttctatcttcgaaaaagatatagaagcagcacgtaacaaaataattcatacacaaaccaagtcagagagccaaagttatctggaaaatgtagaaaggataagaaccttacctgattctataaataagtacttgcacctgtctaatatggctcacaatggagacttaataatagaaggtcggaaggttgggcgatgtggagcagtagagctgccgcaatcatattgtcaggtgtacttaagcaaagcaaatagttttcgggatgagtatgatgccaacaaatatttattgactgacacatcgcaagttgctcttgcaaagaatatggcggaagaacaaaattcgaatgcgctgattggtcaaatcaaaaatctatggcaattgatgagcgaagagccaattatagctgtgggagtaacgctcatttttatattcctgctgtttgccgacttggtacctatatcggtgaaatttggaatcaaagaccaattggacaaagattacgaaaactttataaatgaactcaggaatgatgggtttgtggatatcgagaagaagcgtattatcaagttcaatgaacatggtattgaagagatagagcatgaatatgagcggaaatctgaactgcagaacataaaaagagaatattttgaaaaaaggatgaagtttattattgataaaataaaccggatgagtactaatactggatttgcagaagagactgaagttaataaccaagaagaaccggaaacagataatgaaagcgatgatgaaaaatgaaggcaacattctattgtcatggctaaagtctttttttgtccatggtaatacagaacctcctcctcccgattttgatatatcggacaagactgcggagccagctacacaaagaagtcagagggaaaagaggtggcaggagaaaagtgaaaggatagaaaagagaaacgcagaaccatttactggtacaagtgcatactcttctacctcttcaggggcagagtccttggttttagatgaagtgaatatactcgacgagtatttattgcacttgtttcgcgagagtatggcggatatacgagaatttgaaaaggaattggataaatctatggagcgactaaatgatgaatttaataaaataacacagatatgatacctttgaataaaatagcaaatgcaagagcttttagcaatgcaaaattgattgtactctctctactgtttttgggggcattagcctatgggcttctttcccttaatggcattgtttacaatagtacatattctcggacattgatgtttgagtcattaaaactagacccatctaaagaatatttctttgtaagagaatatgaaactccggcttcgcctaatagcatgatgataccaatgggcagagtgaatatgcccgatagtctgtgtactctatactacgataaagagcaaaaggaatggaaactatggctgacaccagacttacgtacaagccatattgataaagatgaaaaaacgattctgtatcctttttgccgcctaaatgaaagaaaaaggagttatgtggaggaagactttttccatcccacgacgaaaacaccaacccaaaaagatttactgaccggaatcaggtttaataatgcttcggggcaagatgcttttgtactgcaaattaaagaaaaggaaggtgagtattatctggcaaaaggttttgcttttttacctaggcgaaaagtaccaattctcagaaataataagaatgtgacggaattggatttctgtataaatggagacactgtcggcgacattaaatatattttttctttccctttaccaggctttgatagtcagcccgaaagaagaaaaataatagtagaaggcgacagcctcaattataatgggtattatgaagctatagaaaaagataatttgtcatttatagtcaacgattgtgtttttgtattgaagaataattatacctctttttcgaaatacattatcttacccttattgtttttgatgatagtatgctttggatcatctatgttgtggcgtctttacatcctgacaaacaggagccaaggtctcaggcaaagaaaccttataatagtagagcaattcaatgttttaggtttaagggtgttgtttaattgtattattctattaggtttccctatattactgataaagatacagggtgatgaaagtcggctatatacgatcgtcttgtttgctttggcgctcaacctgaattggataagtataaccaggtggttcgcacaaaggttgaggagtgatagtaaaaaaatccgtatagcttccattattattgttattgtaatgatagttgtttcttgtttcactaccaacgaacttgttttaggtgaagtgcctgtgctaaaagtagctacaatcgtttttgtatttcttccatttgctatgggttattttttcaatctaaaactttcaattctcgaaaaattgacaaagaaagtagtaaacaatgaagaggatacggacagaaatgcaagaaatgaatctgggcgaaagtttgtttttaatctgacttgttattttgtgttgttgatcattattattcctttgatagcttatttgtcaagcgattcggcaacgcttatctttaccttcctgtcattgttgcttctattgaccatcaatttcaaacgccttctgattcttataaaaacatctacagtgaaagtgaagtgctattttgttctgcttcttgttgttggagttgtcgctttgtgtagttatacattttatgatattgatgaaaagcgatacagggctttgtcaacattcttctttccggataatgaaaatatgtttggcgaatatcccaatattgaaggctcaagggaaacaatagcaggacagctttttttattaaactcagtggggcacaatttcgaattcaatttcaacactatcatcctgcctgaatataaaactacttttttctctgattatgcagttttatggagttttaaaataggaggctggatttggtttattctttatctgggtgttttgattatgctttcgtacacaatactctcattattagtaatatttagcaaacctattcgattaaaaacaggcaaaaagagttgttataatacaaaagtaatttttggattgaaccttttactcgcaattatgctggtgcaatatatctatacatttctgactaatttttgggtaattccactaacagggcagagcccgggcattttttccccttccagatatgaatatatttttcatatcgtagtaatcaattacatatatgtgtacctgctaagttctgtcgaagaccggaaggtagctataagacaggcaaaagctataagtaaaaatattccgtcatatatctctacaaaatccaagtcactattcatcccagtattaatagcattgtgtagtgtttgctggttatttgttcaacgcaataggatgaatgggtatattgaagaaaaaggagggaaaatgggatggcaaataatgcaagagtcgaagtttagctttttgtcgaagctcagtaaagatagcctgttggtattagctcacggcagttttgagaaaatggataatgatagagtcgaaaggcgtaaatttagagactatctccgtgcttattatagatcgcatgatgcgaaacggactcacaacatcggtgccgaatatataaaaaggaatacaaacatcgatagcttgacaagtgtaagaaaaaaagtgttgggcaaagatgcttcttcttgggcatattttaaatacgtaaatggtagagaaacaacttttataaatgataaatatcaaggaggctgccctccgagtgccgaaactgttgattttgacctacaatgtaacttaaataaagctctggaaaattgggcaaagaaaataaatagcaaatatggctatgagatgattggcggttccatccttattgcagaaaaccagaaaggctatatacttgcatctgcttcatacccctttatgtataatgaaaacttatatcatgttttgttcgaaaacgaaaagatgaacacagccatgcagggtagaggagttgatgttgaccggatagttgtcagatatgataatcctgattatctaaactttgcagaaaatgatatattgcccggcagtattgttaaacctctacttgcatattgtggcttgagtatattcccagctaattattcggaagaatatctattcgactttctttgttggtcgaggaatgacaaggcggaaaagatttatactgacttgtttgtcagaggtaataattctgctactgcacatgctattcttaagtccgattttggttttactccttatactgaaaaaaggacggagctaaaggacgctcctgcggttacacatgcaataggtcaatatagcaaacaaagtttcaagaatgtagtacaagcatatatacggataaaaacaggcagaaaaacaggcttgtcttatcagaaaacagatgcttccgatgaggtgttatctcttgatgagaagcaactgaaaatattgagaaaaagtatgtgtgctctggataagggaacagctgtaatggttgggaatacgttgcgacgcaaaaagataacaactaaacattttatagcaaaaacgggtacagcccagataggtaagaataaagaaaagaacaggtcttcttcgataatcatagttggcgaaaagataactatcggcatccagctatatggaattcttccttccagtaagaacggactatctgcacaacatttgtgtaattaccttgtcagcaatggtgtagtagaattacaatagcgattcagactacagtataatataaacagtttcttgatatccaaaacatttacttatatttgaatcaaaccaacaataattatggaaaataggatgaaatcatctgtggtaatatccaccgaagaagtatcttcgaatcccaatgacctttatcttcgtttggcttatcccgaagactacgctgctatttgcgccatacaagacgaagtgatggctgaattaataaagaataatgacaaaaacctgtttattcctaccgagaatagcaagataagggagtatctggaacgggaagatgtgctgtttctttgtggtcaaacatcagatacggttggagcctatgcatatacttttttcggctcagacatagaatgtgatttaagttgtcactttgattaccaacaaccggttgcgacatttgatactgtagtggtgaggggaaagcatcgtggaaatggaatacatgccaaactgttgagactctctattacggaggctgtattgagaggttgcagtatcatggcagctacggtagacccgaataatgtgcatagtctcaataattttctaaaaagtggttttaaggtgttgaagaccattgataatgaagaaggctatagtggttataaaaggtacattgtgtacaaaatattatcaaaagaagaagtaatatgaaaatgaaatatccagcaattacaattaataaaactaagtttaaagagaatttagaaattatccatagaaaaacaactgaagcaaatattagcgtttgtgcggtgacaaaaggattttgcgctatgcccgaacttgtaaagttatatgcagatatcggttttagtgagtatggggattcgagacttgataatcttttaagtataaatgttcccaatagccgtaaatggatgcttcgtttgccaatgatttcgcaggcagaagaaactgtacggttttctgatattagcctgaattctgagattgaaaccatacgtgcattaggagctgaggcattgaaagctggcaaacatcataagatagtcctagctattgagaagggggatctgcgcgaaggagtgatgtccgaagatgctgttgtcatggctggagagatactgactatagatgggatagaattgcttggtatagccactaacttcaattgtttcggggggataatcccggatgttgacaagttgaatgaactggttaggatagccgaagaaatagagcaaatatacggaatcaggctagggattatctctggaggaaattcaggtagtgcctatatgattgagaatggcgaattgccttcgcgtattaacaatcttcggattggtgaacttatcttgtgtggaagagaaacttcgtatcaacgaaacctatgggagcttcatacggatatttttacaatgcaggcagagattgtagaatgtaagacaaaaccctcattaccttatggaaatgttggattagatgcctttggaaagacaccgttacatgtagataaagggttgcaggaaagggcgattatcgctgttggcaaacaggatgtttccatggactacattagtcctcgcgataaagagcttaaaatcttaggcggttcgagtgatcacttcattatagatgttacacattcatgtagaaattataaagtaggggatattgtagagtttgatttgagctatggaggtatattgaatttatttacatcaaagtatatcaataaggtgattttatgaaaataacgtgcagaagttaggacttgatcagatattactatatacaaggattgtagcagctttcaatattttctctttttaaattccctccccaaaagcccaagagagcgtttggaaagagaaaatattgaaagatatgtcaaaacttatttccatgtatctgtaagattgagtcttattttttacaaattagtctgaagtttcttagtctatagaagagggaatattttttgccaattattttctcattttgactctcaacgattccggcagttccgactttttataatatactttcctgccatcaatagaataagacttcagtaaacccttcctgcggtatcggtataaagttttctttgtgccccctagtagcatacataaatcctgattatccagataatcatcttttttaattgtatcaggattcacaaaaagatctattttctcatctattctgcccaattgatttagtatcaattccagcttttctattattctgttatccgaatcttgcatagtctgtacatttaatcattagagacagacaccaattcagaaaagtggtttcgcccatgattattccccttcaccttatctctaaccgatattaagtctttatatctaaaagacacctttcctttatcgatctgataaaaaggaataataccctttttccgatacctgtcaagtgttctagctgatatattgagaacttccgccgcttgcgttttgtttaatacctcattcggattaatatgcatattagaaccatccgaaaaactatccgaagaattatcactattaccatcaactagtttttttccatccaataatatttcaattctcttcaacccttccactatatgcgacagatgcgttgaaatatcgttaaagccctggcttatcatccgtatactctccagtttcttcatactatataaaattaagttcgaagcaaagatgctatattccgataaaagaaatccccgacatcggtaccgatatcgggaatcttttttattaactgtttgattatttagaatttatcttatccattttttttaataagacaccgggcaatgtttttaagtattggcaaggccctccctttcgggtattgagttcacctaaggtatcgtaaaagttgccaagatcgacctgaaaaataaattcaagacaacggataatccgtgccatactagcatttccattattgatagagccggagatactatacgccagttcgatcaaattgattttataatctgtccactcaaggagctccggaggcattttatcagctaccttatcctgtttatccaagtgcattaactccggattattcagcttgagtaagatgatttccatttctagatcaataagagctatcatacgttcagaaagatcatataaagtcagatcaataacttttccttttaaacagatatctattttaatctgttttaggattctgtatgccgaaaatatttttttctcattggtgacgaattctataaggaggtctacgaatgtattaaatctaaaattgatttcatttgcgctacaattctttcttacatcttctaataaaatgtaataacattcatttaatttagtagtcataaattcttgtattctaaattgttaatacaagactcaataaatacgttacaataaaattaaaaaattttcttcaaaaaagcttgcatataaaataaaaagccttacttttgcaaccgctaaccgagagagggtagctgttaaaaacagaaattaaatatatatttcattcaaaatatataggagtttagatgttttgagcaacaccacccacctcgtggaaatttcatggggggaaaggattaaggatatgtttttttatttgtatagtacttgttattatatagttataaaaagttattcaaatctgcatgggactacatcgcaaacttggttaagtttgatcaaaccaagtcaaacgaagaaagaaatagacaagacgcttagaacgagatagttctaagcgttttttttatgcctaaaaacgaatgaagtcatgctttgtcggggcaggagtagccaacttggacagcaaccgcatgggaaattcatgggaaatttagcaagaatatattttccatgaattttgacctaaataacttataaataatgtcttactttgtcaaagttgtgtttggtcaatgatagccaaggtagtaacggatgctcataaacgtttcatgtacactttttctttgataaccatatcatggatagcattcaaacaatgcaaaacaaggattctacttgtctccggtgtataatataaggcacccacataccacttacagcaatagacatggcgttttaatggacattcagatgtttcatctgcgtgagaataatctacattcctattaagtccatttactttattgaatatgtcttcataattagagttttttgatttccatctattattttcccatcaagatatgcgtgtttaatctttccatagtaaaacggattatgaaatatatcacttagcttttgtggaggtctttttagcccttttgctttgtaattattcggcaaacatcatggtttgataggagttcagacgattgctacaagggaggactggaaaaggattaatgcgattatcaaatataaaacctaaaaaagaaggcgagaattacttcccgccttaaatgttttcacaacggaataatccttattgtgataagcttcaattttgtaaaggcaaatatatatcaaaaaatcatatctacaaaatacaaattagcttatcataacacctattgcataaaattatcaaatcaaaccatcattttaattaaaaaatgaataaatttgtaaaaatgggtgctttgatttggagccaaaacaaacttggattggtgcccaagtaacaatatttcgtcaaatactgccccatttagaataggaagatagagaagtatgcttcatatgtaataggtgagagcattgttttgtgtatttgtgagataaaatttgaatgttatgaaaaaagttttaggtctggatttaggttcaagcagtataggttgggcgttgatagataaggatactaataagattctgggattaggaagccgtattattccttataatggagctgagagtcaggattttgccaaaggcactggtgaaagtagaaattcgttgcgaacaaaagcgcgtaccgcccgtaaaggttatgatcgttatcaactgaggcgcaaatatttagttgatgttcttatcgaaaataatatgatgcccgatgataatctgaagaagctacctaagatgcaactttgggaattacgcaacaaagcggttatatcaaacatatcaaaacaagaattgggacgtctattactttggctcaaccaaaaacgaggctataaaagtagtagaagcgatgccaatcttggtaaaaaagatactgaatatgtaaaagatgtaaaaaatcgatttgataaaattaaagatttaggattcacaatcggacaatattttcacagcgaattaaagaaggacgaatattttcgtgtaaaagagaatatctttccacgcgaagcctatatagaagaatatgatataatttgtgcaaggcaaaaggataatttagggctgacagatgaactcatagctaaaatccgcaacgaggttatctattatcaacgtccgttgaaatcacagaaaggtcttgtttcggtatgtgaatttgaaggcttttggactaaggataaaaacaataaagaagtttttgtggggcctaaagctgcacctaaaagttctcctttattccaaattgccaaaatatgggaaaacataaacaatataaaactaagttcaaaattgggtgaaaccttagagttaacgctggaagaaaagcaaaagatttttgaatatctggataataacccgaaattaactgcaaccgacttgtttaagatattagggaaaagacggaatgaatttactgttacaaaacaaatagaaaaaggcatacaaggaaacattactaagaatgagatcttacggattttagataaaaatgaagcatataatagtttgctcagattcgatttaaacattattgaaactgataaattcggttatttatattcaagaaaaacaggagaagttttaggggaaaaaagcgttaaatatattgatcctatagtcgagaacgaaccgttttaccaactctggcataccatctactctataaacgatgtgcaagaatgtagcaatgccttacagaaacgttttggtatagatttagataccgccaataaactttctacaatagacttcaataaatatgcttttggtaacaaatcggcaaaggctatccgcaatattttaccctacctgatggaaggggacaagtacagtgatgcaatgagttatgctggatatgaccactccaactctctgacaaaagatgagaatcttgaacggaaattacttgataaactaaagccaatcgagaaaaattcattgcgtcaaccaatagtggaaaaaatccttaaccaaatggttaatgtcgtaaatgctattattgaaaagtacggaaaacctgatgaaatccgtatcgaattagcaagagagttgaaacagggtaaagaggagcgcagcaataccgataacgcaatacgcaaacgccaacgagagaacgaaagtataaagaaacgtctttctgaatatggtttacgagctacccgaaacaatattattaagtggcgtttgtatgaagagattgataatcacgataaaaagctcaatgcaatttgcatctattgcggacagccaatttcgattacagaagcaataaatggaaatgaggttgatattgagcatattattccaaaatcaaaactctttgatgattcgcagagcaataagacgcttgctcatcggcgttgcaactcgaaaaagaatgatatgacggcctacgattttatgaaaacaaaatcgcaagaagagtttgatgcttatgtagatcgtgtaaattcattgtttgccaataaaataataagtaagacaaaacgagataaattgttgatgtcggaagataaaattccggataatttcattgaacgccaattgcgggaaagtcagtatatagcccgaaaggcacgagaaatactacaaactatctgttacgatgtatggagtacaagtggaatagtgacggcagagttgcgccggctgtggggatgggatgatgttacaatgaagctccaaatgcctaaatacaaagagttaggtttaacagaaatgaaagaatgggaaagcgaacatggtaaacgaaaacacacgaaggaaatcatcaaagattggacaaaacgagacgaccatcgccatcatgcagtagatgctcttgttatagcttgtactgatcagggttttattcagcgtttcaatactttgaattcgagtaaaacccgcgaagatatgtacaaagaagtagaacagaggtccgggcaatataaagaaaaactttctctattggagaaatatattatttcaaaatgcccgattgcgattgttgatatcgaaaaagctgttgcaaatattttaatttctttcaagtcaggtaaaaaggtggctgttttcggaaaacgaaaaataggaaaacagggtaataaaaaagtcgttcaggcaggtattgtagtgccaagaggagctttgagtgaagatagcatatacggaaagataaagacaatagaaagaaacaagacactgaaatatctattcgaaaacacacagcttatagtagactcgcatattcggcatttggtagaacaacgtttagaagaatttggtaaagatcagaagaaagcattagcctcgctcaagaaagaccctatttatttggatgtagagaaatctaagtcgttggaatatgctgcttgttttaaagatgaatatgtgataaaatatactgttgatataaacttcaataaggttgataaagtaatcgacggcaaaatcaaagagattcttcaaaaccgcttaaataaatttggaggaaaagctaaagaggctttcaaagatgtacaacatggtgaagattcgttgagatggtatgaagatgagggactagaacgtccgatccattcagtgcgttgtttcacagggctttccgccgttgttcctgtaaagaaagatgaagatgggaacgaaataggcttcgtgaaacccggaaataatcatcatattgctatttactcagataaagaagggaataaatcggaacatgtttgtactttctggcatgctgttgaacggaagaaatatgggatacctattattatcgaaggcacgaatgaaatatgggataaaattttatcggcaaaagaaggcttttatcctcaaagttttctcgaacagctccctcctcctaatttggatttgagtttgagtatgcagcagaacgagatgtttattctagggatggcagaagaagatataaaaaatactattgaaaaagctgattacggacaaatcagtaaatatttgtatcgggtgcagaaattatcaacagccaattacatgtttaggcatcacttggaaactcagataatagatgatgaaaattctaagaaaagcaaacgctttcaaaatgtaagaagtataggagctctatttttacttaatccatttaaggtgaaaatcgattgtttaggaaatgttaaacctccactaccatgattaaaaagactctttattttggcaatccgacatacttgagtatgcgtaacaatcagttagtcgtaaaactacctgaggttgaaaagaacgacactttacccgaaaaatttaagaaagatagtgaggtgacttttcctattgaagatttgggtgttattgttctcgaccacaaacaaatcaccctgacgcatgggctgatggagatgttgttggaaaacaatactgcccttattacttgcaatagcaatcgtatgccggttggtctaatgctccccttgtgtggaaataaaacacagacggaaaaattcaatgcgcaaattcgggctaccgaccctttgaaaaagaatctttggcagcaaaccatcaaagctaaaataaagaatcagactggcgtcctgaaaaaatatcgttcatgtaatattcgcaatatggagtattgggcgagtgaggttaagagcggtgaccctgataattatgaagcccgtgcagctgcctactattggaaagaagcttttccgcaaattgataattttgtaagaggaagagaagaacttcctcctaataatttgctgaattatggctatgccattctccgtgcggtagtggcacgttcgttggtttccagcggtttgttgccaacatttgggatacatcatcataaccgttacaatgcttattgcttggctgacgacattatggagccttatcgtccgtttgtcgatgcagttgtattttccattgtcgatgccggcgaaaattttgaagaattatcgaaatctataaaaacacaattgttgcaaataccaactattgatgtaatgattaatggaaggaaaagcccattgatggttgccgttagccagactacatcttcattggcacaatgtttcgaaggtaaattgcgaaaaataaaatatcctgaatttgtattataagattatgctatgcagcaggacagattaaatcaatatcgaattatgtgggttttagtactgttcgatcttcctaccgaaaccaaaaaagacaggaaggtatatgcagattttcgtaaaaatctgcaaagggatggatttaccatgtttcaattttcaatctatctacgtcattgtatgagtatggaaaatgcaaatgtccatatcaaacgagttaaaaagtttctaccagaaaaggggcatgttgggataatgtgcataacagataaacagtttgggatgatggagttgttttatgggaaaagtgcggaggctaagaaaacggaagggcaacaactagaactcttttaagaataaaaaatcccgactataatcgggatttttatttgaaatacatcattttttgaaatcttaatgagttgtgatagttgttgatatacagctggttgtatatacctatactgtatttcaatgaactaagatacaaaattgaaagcttatcacaacgagtattggcattcatccgggtactgtcaaactgtatttcaatgaactaagatacaaaattgaaagcttatcacaacgatatggcgttcgtagggtgtagtaggatgactgtatttcaatgaactaagatacaaaattgaaagcttatcacaactaagagtaaaagatgtacagttatactacaactgtatttcaatgaactaagatacaaaattgaaagcttatcacaacgggtcgtaagcaaggaactcgtctaaaagactgtatttcaatgaactaagatacaaaattgaaagcttatcacaacttcacttcgtagcctaattttgcaattgcagactgtatttcaatgaactaagatacaaaattgaaagcttatcacaacagactgcccaagcttcacatagcccaacccactgtatttcaatgaactaagatacaaaattgaaagcttatcacaacaagggcacgaaggttataaacgggcacggtactgtatttcaatgaactaagatacaaaattgaaagcttatcacaacccatgctggaacttgccaatctggtattgactgtatttcaatgaactaagatacaaaattgaaagcttatcacaacagtgtcttagaggtctttattttagtttcactgtatttcaatgaactaagatacaaaattgaaagcttatcacaacactatggttaatgctcccgatatatctgtactgtatttcaatgaactaagatacaaaattgaaagcttatcacaacccagaaccgaacaatcccatatccttatcactgtatttcaatgaactaagatacaaaattgaaagcttatcacaacttcattgtaaaagcacctgatagcaagacaactgtatttcaatgaactaagatacaaaattgaaagcttatcacaacttggttcttctgaaggaaaaaagagaggaaactgtatttcaatgaactaagatacaaaattgaaagcttatcacaactatcggaggagtggtaatattttctattccactgtatttcaatgaactaagatacaaaattgaaagcttatcacaacgatttggatattgtgacaaccatccaaggaactgtatttcaatgaactaagatacaaaattgaaagcttatcacaactttttgatgtatgtattatttttataatctactgtatttcaatgaactaagatacaaaattgaaagcttatcacaacaaaccatcgactgcttgcaaaccgattgcactgtatttcaatgaactaagatacaaaattgaaagcttatcacaaccttaatctctttcttaaacgtaactgcatactgtatttcaatgaactaagatacaaaattgaaagcttatcacaacttgggacaacaattcgtctggtagaaattaactgtatttcaatgaactaagatacaaaattgaaagcttatcacaacctaaatttgttgcggcattgccgcaacaaaactgtatttcaatgaactaagatacaaaattgaaagcttatcacaacgaaggctcactaggaacgataataataatactgtatttcaatgaactaagatacaaaattgaaagcttatcacaaccctctgatcagattgatccttcgtatttatactgtatttcaatgaactaagatacaaaattgaaagcttatcacaacctttcgttatttttaattaaactactctgtactgtatttcaatgaactaagatacaaaattgaaagcttatcacaactacgactcgccattcaagccaccgcctgcactgtatttcaatgaactaagatacaaaattgaaagcttatcacaacgatacaatgccaattgaacttacggaacaaactgtatttcaatgaactaagatacaaaattgaaagcttatcacaactataggtgcagggatatgtttaatattctactgtatttcaatgaactaagatacaaaattgaaagcttatcacaacagatattttcatctatctttgtagtatggaactgtatttcaatgaactaagatacaaaattgaaagcttatcacaactaggttgtttaaatcccatgagacatatttactgtatttcaatgaactaagatacaaaattgaaagcttatcacaacaaacaatcaacgattgtgttgaagcactcaactgtatttcaatgaactaagatacaaaattgaaagcttatcacaacggcgctgcagttgtcctctaaatgtaacttactgtatttcaatgaactaagatacaaaattgaaagcttatcacaacgtcttgcagatatttttctccttgctttaaactgtatttcaatgaactaagatacaaaattgaaagcttatcacaacgcattcattttgtttgcttgcgctttgttcactgtatttcaatgaactaagatacaaaattgaaagcttatcacaacttcgggggttccgctttcattaattccgcctactgtatttcaatgaactaagatacaaaattgaaagcttatcacaactcaatcggttctttattcgtaacgattcttactgtatttcaatgaactaagatacaaaattgaaagcttatcacaacaaacaattaggatttaaaaagatgcttattactgtatttcaatgaactaagatacaaaattgaaagcttatcacaactattactccaagtgcctagccgtaaggccaactgtatttcaatgaactaagatacaaaattgaaagcttatcacaacgaaataccgcaggcaatcccaacacgccaaactgtatttcaatgaactaagatacaaaattgaaagcttatcacaactcatcatacatatatgcttggtgtatatatactgtatttcaatgaactaagatacaaaattgaaagcttatcacaacaaaatcattcgccgccttcatgcgttcgtcactgtatttcaatgaactaagatacaaaattgaaagcttatcacaacatagaagcaagtttgttacatttcttaacactgtatttcaatgaactaagatacaaaattgaaagcttatcacaacgcgagtttgcatcaatgttgtttgctcctaactgtatttcaatgaactaagatacaaaattgaaagcttatcacaacaagaactctttgcctgctagcgcactctctactgtatttcaatgaactaagatacaaaattgaaagcttatcacaactattccttacataagggcttaacagcttccactgtatttcaatgaactaagatacaaaattgaaagcttatcacaacatattcttcgcagatgtaataagttcagtgactgtatttcaatgaacnnnnnnnnnnnnnnntgaaagcttatcacaacatattcttcgcagatgtaataagttcagtgactgtatttcaatgaactaagatacaaaattgaaagcttatcacaactacagtagtggaaggattgcggacaactaaactgtatttcaatgaactaagatacaaaattgaaagcttatcacaaccttgtaatagctggtattgcaggaacggtaactgtatttcaatgaactaagatacaaaattgaaagcttatcacaacgtaaaaattctgactgtctgcacattatacactgtatttcaatgaactaagatacaaaattgaaagcttatcacaactaacagtttgttatattcatcttccgattcactgtatttcaatgaactaagatacaaaattgaaagcttatcacaacaaataccaatgaaaaaaataacggacataactgtatttcaatgaactaagatacaaaattgaaagcttatcacaacaggtaaaccgctatcgttaattccgcctaactgtatttcaatgaactaagatacaaaattgaaagcttatcacaacaacatacaacaggctttaaaataaatcagaactgtatttcaatgaactaagatacaaaattgaaagcttatcacaacagtagcatagttgggaatattatagtatagactgtatttcaatgaactaagatacaaaattgaaagcttatcacaacggactggcaatactaattctttgtattgatactgtatttcaatgaactaagatacaaaattgaaagcttatcacaacagaatactctgtgagggttaatattgtatcactgtatttcaatgaactaagatacaaaattgaaagcttatcacaacatccgcaaaagtcttgataatacccttttcactgtatttcaatgaactaagatacaaaattgaaagcttatcacaactattatctaatgtgaaacataaattttcaaactgtatttcaatgaactaagatacaaaattgaaagcttatcacaactataagtttcttattaatttggagatctttactgtatttcaatgaactaagatacaaaattgaaagcttatcacaactaattgttctaatttaccaagatgttctatactgtatttcaatgaactaagatacaaaattgaaagcttatcacaaccaatcaggtatagttacaaccccaataattactgtatttcaatgaactaagatacaaaattgaaagcttatcacaaccccatcaccagaaaggttaatttcatctgaactgtatttcaatgaactaagatacaaaattgaaagcttatcacaaccaaaacgatatgggaaatggaagagtggaaactgtatttcaatgaactaagatacaaaattgaaagcttatcacaacggaggtaaatttgttgcctcatttgcagcgactgtatttcaatgaactaagatacaaaattgaaagcttatcacaacatgcccaattctaatcctatacgcgcattaactgtatttcaatgaactaagatacaaaattgaaagcttatcacaacccagttcatacttaagcatcggcttagtgaactgtatttcaatgaactaagatacaaaattgaaagcttatcacaacagtatggcatgagtgacgaatgctgcgatgactgtatttcaatgaactaagatacaaaattgaaagcttatcacaacttagttaatgttttaaattccaaaaaagatactgtatttcaatgaactaagatacaaaattgaaagcttaaaaaaatcggatcactgccgcgtatctgacccgcctataaggctacaaaacagcgaaaaccgtttgtagtaaacggttttcgctgatattagttgcggaagccggattcgaaccgacgacctccaggttatgagcctggcgagctaccactgctccatcccgcgatattgtgagtgcaaaagtatgcaatttatatataccaaccaaataaaaaagcattaataaattgagaataattgtaagtggctgttttataggaagaaaaaactgttgatctaatgcatacttgaaagccgaacttttcaataatgatgttgtaaaagaactatccccactatttgacaaaaatctaaaagactattatatcagaaaactacaggatgataaagatcgctttcttgtcattaacaatgttcgcaataaactcatacacattctgtttactgttattaaaaacaaacaaatcatttacaatgagaacaaacgctgtgcattagaagtagacaaaacaacttcatatgagatgggacagagaccggatttgtgtagtcaactgggacgtgacagacaggcttgtgctgaatgggaagatataccaatcaacaactttgcctgccggcaaatatgttctttcggccatgtttactgaattacacgccgactttggcactcaaaatcactgttatatgattatcaacaagggcaaccagactatgccggattggaatgatcgcaaaacagccttcgaatatacggatgtggcttcgagcagttctatcgaattcgaactcaccgaagaaacaacactgaccatcggattcttgtataacttccctactatcggcgaaaaatgcgcgtacggattcgaccgcatcaaattagctcaaataaccagtgaaaacgaagaataacagaaagataatgaaaaaaattatattccttttaattacggctgcatgttttatacacacagcttgtggcgataacgatgacgataaaattggtagaaccttcaaaaatccggtaatgggcaaacctgccgccgaccctactattataagggcacaggatggagcatattatatctataccacaggggatcttgtacctatctacaaatccaccaatcttatcgactggcagtacatcggcaattgctttaccgaagcaaccaagcccgcgattgaaaatacgtcgggtatctgggcacccgatatacggtatgtagacggcaaatatgtgctctattacagtatgccgggaacaacatcggggcaaatagacggcgtaaatatctccaactgggagtgtgctatcggctgtgccgtagccgacaaacccgaaggcccttttgaggataaaggtaaaatgtttaacggatacgacattaacatacaaaactgcatcgacccctgctacgtagaagaaaatggtaaaaaataccttttcttcggtagctgggagggcatctatggtgttgagctttctgacgatggtttccgcctgaaagaaggaacaactccggtgcaaatatctggacgcgacaatgaaggtgctatgatacacaaacgtggagattactactatctgtttgcctcgtggggttggtgctgtggcggcgacgaaagtacatacaaaactatttatggccgctctgagagtttattcggcccttatctcactaaagatgggaaaaacatgatagacggagcttttcacatactcatcgattccaatatgttttttgcaggtccgggacataactcgcaaatcgtaacggatgatgccggtaacgactggatggcttaccattcatatattcgtgcacaagcagggaaagaccgcttgttgatggttagccagattaaatggaccgacgatgactggccttatgttgacggaaattctccttctttagatgcattagctccggttttttaatcatagttagaggtgagggtgtgtcaaaagccccaaaatatgaaagaccgaagtttttaatagcttcggtctttttcgttcactctaaaatatgtatcttagagttgcaatg

SEQ ID NO: 1741 - DNA, 22157 bp, synthetic construct
  source 1..22157: mol_type = other DNA
  misc_feature 1..22157: note = Synthetic
agatactaaagcaaaatctacctcattattttctaaactttctagcactttagacttgttggtaacgtccatggttaaatctataccggggtgttcttttaaaaagtctgttaaaaagtaaggcataatatattttccggtagataccaccgcaatttttaacctaccagataagatgcctttataagcttgtgttttataattgatggcatttacctcatctaaaattttttgcgccatacgggcaatttcaaaaccaaaatcagttatatacacctgttttccaacaacttcagttaaagcaatatcaaactgatcttgaaaatttttgaattgaatagataccgcaggctgggttaaaaaaagctcatgtgctgctttggtaatacttttagtttctactattttaaggaatacctgtaattgatgtagcgtataattcataaaaattagttatgcatttcatatcaaatataaataataatatatgaaaaagacctgatatgtttgtaatgttcaaaaacacaaacaacatggaagaaaaacaattctcatttatagactggtcttttagtgcagaagatgctgcccatttactttctacattgtacaatgcaaaattagaatatcacaacagacagtctttaattaaccatgaaggacaaaaatctattcctgctgatgagttgaaaagaatagcggaattagaggaagcattaaaaaatataagagaagaaattagcttagctaaagaaagaaatactaagctgcacattaagagcagtattagcttaaacttcatccccaaataaatgttgttatggcagtgcagcgcaaggctgcctgccttaatattaaaaaatgctcttaaaggcaaaaatcgtccaatctaacacagaaaaagacaaaaaagattagaaaagcattaaaattcatcaaagaattcgcttaactaaataaaaaaatgctaggttgcgcaaaaaaagcaacattagcttaaacttcatccccaaataaatgttgttatggcagtgcagcgcaaggctgcctgccttaatattaaaaaatgctcttaaaggcaaaaatcgtccaatctaacacagaaaaagacaaaaaagattagaaaagcattaaaattcatcaaagaattcgcttaactaaataaaaaaatgctaggttgcgcaaaaaaagcaacattagcttaaacttcatccccaaataaatgttgttatggcagtgcagcgcaaggctgcctgccttaatattaaaataacagttattaaaaggataaatcactcgatttgagaagaaaaaagacaaaaagattagaaaagcattaaaatttataatcaaattagcttagctaaagaaaaaatactaggttgcgcacaaaaagtaacattagtttaaacttcatattaaaataaacgttgttaaggcagtgcagacaaaactgtatgtcttaagaaaattaaagaagcgaaaaaaattatatggcgaatgctgaaaactattctataagaaaagcaattaaaaggtttaaccaactggttaatttagagaaaagagaaattagtaacgtttatttttatgccattattaatggttttatactgctctctctacccttaggaattcaagctattgtaaatttactcttcggaggcaccataagtacttcattaattgttttaattggtgttgtgataaccggtgtattatttacaggtattttgcaaatagcgcaaatgcgtatcacagagcgcttacaacaaaaaatatttactcgcttaacttttgcttatgcttatcgcatcccaaagcttaatttgttaagtgtagattcttattacctaccagaattggtaaatagattttttgatactgcaaatcttcaaaaaggtttttcaaagcttttattagacttcccggcagccagcattcaaattatttttggtttaacattattatgcttttaccatccggtatttatcatttttgcgattaccatatttacattggttattataatcttttatttttcatctgacaaaggttttgtcaccagtatgaaagaatctgattataaatacgatgtagcacattggttagaagaaatatctcgagcggtcaaacccttcaaactaaacaggcaccatgagttacacctcaagagaaccgacaaactggttaatggttatttaacttccagagaccagcatttttcggttttgttgtttcaataccgtattcttaccgcttttaaagtggttaccacggcagcaatgttaattttgggttcttatttatttatagaacagcaaattaacttaggacagtttattgcagcagaaattgtaattattaccattttaagctctatagagaaaatgattttgagcttagaagttgtttatgatgttcttactgctctagaaaaacttaataaagtgctttccaaaccacaagatgatgaggtaagcgatgagaaaagtttagcatttgctgcctctagtggcttaaatcttaaaatgacatctttagactttgcttatcctcatgaatcattaaccttaaaaaacatcaatcttgagataaaatcaggagaaaaagtttgtattataggatcggaaggatccggtaaatcaaccttactaagaattctttctggaatttatcaagactttaaaggcaatatcttatataacaatactcctttaaaaatgatagataccagaactttaaacaaaaatgtatcctcattattaggtgatgaagacgtatttagcggttctatttttgataatattactttaggtaatcctgaaataagtttttctgatttagatttggtatgtaaaattgttggtttagatgattatatcagtaaacaacaacaaggttatgatacttatgtagacccacaaggaaaaaaattacctttcaatatcatccaaaaaatattactagctcgttgtctggtaaccaaaccagcccttattttagtagaagataattggaatggtatagagcccttgataaggcagcaggttatcaattacctaaccaacccagatcatgagtttacactggtagccatcagtaacgatgaaacctttaaaaaccagtgtgagagaattatttatttagaaaatggccagttagtagaaaattaacgttttaattatgtttttagaaagtaagataccttcagaccattttacaaaatataagtctttcggcagaatcatgcatgagcgtgatggaacctcgagaagaagaaaatggtttacctttactcttataggtttagtaatagttttatgtttaccgtggacacaaaatatacagcctgatggtgtggtttctacgcttaacccacaacaaagaccacaagaaattaacagtattattgctggtcgtatagagcaatggtacgtaaaagacggtgatattgttaaaaaaggtgataccttattaaaaataacagagattaaggaagaatatttagacccatctcaattgatacgtgtagatgagcaaattaaagccaaatcagcgtctatagatttttatgagaacaaggctagattgactggcgaccaagccatagctatagaaaactctagaaccttaaaattaagtcagctaaggaataagcttaaacaatacactttaattgtacagtctgatagcatcagctatgtagcagcagaaaaccagctcagaattgctgatgagcagctaaaacgacaaaaacaattatacgatgcgggcttaaaatctttgaccgagtatgaacaaagacaacaagcttatcaggatgcgctatctaaaaagatgggggcagaaaacaagttttacaacagtcgtaacgagttattaatcatccgcctagagcaaaatgctgtagagcaagaatatcaagaaaaagtactaaaagctaatggcgataggctctctaccctatcagatatggctaccacccaaagtgaagttgccaagcttaaaaaccaaatgtctaactacgaaattagaaggggtttttatgtgattactgcgccacaatctggccaagttattagaactaccaaagcaggtattggcgaaacagttaaagaaggcgaccctctgctagagattgtacctattaattttgaagttgctgtagaaatttttgtagacccgctagatttacctttaatcaataaaggtcaaaaagtgcgtttacaatttgatggtttcccggctattgtattctctggctggcccaacacttcttacggtacttttggcggtgttatcgctgcggtagatccatccatcagtgtaaacggaaaatttagagcttgggtgcgtccagataaaaatgagaaaccatggccaccacaattaagctacggtaccggagctaaaggtatagccttattgaaagatgtgcccgttatttacgaactatggcgtcagctaaatggcttccctcctgagtattatgtagctacaagtacaggtaataagacaggtggtaaagatcaagcaaaaagcgataagaaatgaaaaggttattagtttctattattctgatagcgtttttgctgccggcttttgcacaacaacagcctacagacacccttaaatgggaatcttttaaagagattatcagatcttatcatccggtagcacagcaagctaatttggttggcagactagccaaagcccgcatgcaacaagcttggggcggttttgacccaaagctgtctgtagattacgatagaaaagcttttgatggtacagaatactttcagtttttaacgcccgaggttaaaatacccttatggtatggtatagaattgaaaggaaattatgctactgccgaaggtgctttccttaacccagaaagtaaattacccaaagaaggtttaagcaatgtaggtgttaatttttctttaggtaaaggtttattgatggataaaagaagagctgctttaaaacaggctcgtatttttaccgaagccagtgaaaatgaacaaatattaatcattaacgatttaattttgaacgctggtgaggcttatttaggctggcaaaaccaatataaaattgccgaagtctatcgtcaggcattagcacttagcaccgtcaggtttgaggcggtgaaagaaggttttagaggtggagacaggccagccattgatactgtggaagcattaacacaggtacaacaacgcgaagtacaataccaacaagctaatttagatttacaggtagccaaataccttttagcctcttttttatggttagaagacaataccccggtagatattgagaaattaaacgctttgcctcaagaagctaatattactttaccagaaagtgcagaattaaatattgccaataaccctaaacttttaagttacgattttaagctgcgtgatttacaaatagaaaggcgcttaaaagctgaaagtttaagaccaacgatagatttacaagtaggtttattaaataacgatacacaatttctgagaaatgtaaacagaagattttgggagcaaaacaataaagtaagctttcagatagctatgccccttacttttgctgctgcaagaggagaattggcagaagcgaaaataaaaatcagaaatacggaattagagcaagatttagtacgtaacgatttaagtgtaaaactaagtcagaatttagcagaatttggagccctgcaaaatcaattacgcactcttaaagaagctttggtagctaaccagaaactcttggagggcgaagaaatgcgctttaaatttggagatagctctttgtttcttatcaatgcccgagagagtaaattgatagaggcacaagaaaaactgatagaaacacaaaataagatgctcaaaaacaaacttaagaaagagtggttgttgggatctttggtaaattaatttttttaggtttggttgtaaaacgtcggcaagaaatactcttgccgacgtttttattttaagtatatcagcttaaagctgaaaagcaaataattcttggtctgtagtgaggcaagtttccagatcttttaaaatctgttccttatccatatcttgaccaataaaaaccaactcatttaagcggtctccaaaccttttatcccatttattttctatataatctttgttttccaaataatcgggatatttgatacgctctgcgaaaggcatacttgtccaccatacaccagcgccctctaaacgagaagagccaccagcctgtgaaaaattataagcttcatgaggtttatcggccatccaaaacaaacccttagacctgatgatgttatgcggaaactcttgttgcaggtaaagcatccatctttctggatgaaaaggccttttatttctaaaaacaaaagaacttatgccatattcttccgtttccgggatgtgctcttgttctaattctttttgccatccggcagatgaggatgccttctcaaaatcaaattgatgcgtataaaaaatatcatgaatgttgactttagaaaatacggtttctatcacactggcatcggggttaagtttattgattaaagcttttagcaatgctacatcagcaggtttaaccaaatctaccttatttaaaatgatggtattggcaaactcaatttggtcggtcaataagtttacgatggtacggttgtcatcctctatttctgtaagctgcctatctttcaagagttctgatgttccaaaatctttaaagaaattataggcatcaaccacggtaatcatttgatcgatataactaaagcgtgagaggtctatccccttttcctcatccttaaaagtaaaggtttgcgctacaggtataggctcagaaatacccgtactttctatcagtagataatcaaatttaccctcgttagccagtttttctacctcaatcatcaaatcttcccgtaaggtgcaacaaatacagccattactcatttccaccaatttctcttctgttctagataaagtagcctcgtttttaaccagacgggcgtcaatatttacttcactcatatcatttactatcaccgcaacttttaagttctctttatgatgtaaaatatggttaagcaaagtggttttcccgcttccaagaaaaccacttaaaactgtaacaggtaatttcttattcatatttgctttcttttgaagcaaatataacatgaggaaaacattaatgcaacaaaattgcattaatgtttatttatcgacttaagtctaaacttgctctgcggtaaaacccgccttctttaccgtatccgcaatttcctgggcgccaattccttctgcttctacggttagtattttatccgcattagcggtatcaacttcccatttgttaagtcccttaaggctatttaaagctggcgttacggtggcaatgcatccaccacatttaatattggttttaaattttatagtttccatgttcttgtaaattatgatgttaaatattttaagcgtaaactgtttgttactaccgatacggagcttaaagccattgctgcacctgccagcatcgggttcaataaaaatccgttaaaaggatataaaattcctgccgcaagggggataccaatgaggttataaataaaggcccaaaacaaattctgcctaatggtttttacggtttgtgaggatagctgtaaagctttaggcaccaaccttaaatctgaagataccaaggtgattttagctacatctatggcaatatcagaacctttacccatggcaatagatacattggcctgtgctaaagcatggctatcattgataccatcacctatcatggctaccactttgccttcttgctgcaatttatcaacaaatgcggctttatccgcaggtaaaacatcagcctgataatgctgaatacctgtttgtagggccacagctttggcggtttgctcattatctccggtaagcatatacaccgcaatgccttgttgttgtaattgctgtatagcttctttagagcctgctttcacctcatcggcaatagccacaacagccaaaacttctttactgtttgcaaaatataccagtgtataggcttgctcttttaaagccagtaattgctgctgcaaatcatcagcgatagctaaattttgctgctgaagtattttatggctagcggctacatacgtttcttgctcaaaaaccgcttctacacccaaacccgttaagctgttaaactgtctcggctgtaccgttggcaaagttttttgttttaaatgactaatgatggcctctgccaatggatgttcagactgctgttccatcgccaataaaaccgcttcataagtttccaacttattcaaagctgcttttgaccaaagcacttgctgcacttgaggatgtcctgctgtaatggttcctgttttatctaaaatgatagcatttacttggtgaccggcttctagcgcctcggcatctttaatgaggataccctgctcggcacctttaccaatacccaccataatggcggttggtgtggctaaacctaaagcacaaggacaagcaataaccaatactgtaaccatagccattaagccttgtgtaaaagcatgctcgccgccaaaaagcatccaaatagcaaaggttaatagggctatcagcatcaccaacggaacaaatattccggcaattttatctaccaatttttgtacaggcgctttagaaccttgggcatcctgaaccagcttgatgatttgcgccaataaggtatgctctcctaccttttctgctgtaaacttaaagctacctttttgatttatagtacccgcgaaaacgatatcgtctgcttgcttggctacagcaataggctctccgctaagcatgctctcgtctacaaaagaattgccttctgctaccctaccgtctacaggtatcttctcgccagaccttatcaaaattaaatctcctacctgtacctggctaataggcacttcttcctcacccctagcccctaaacgtataaccgttttaggttgtaaacccataagctttttgatggctgtagaggtgctagattttgccctgccttctaacaacttacccaacatgataaagacaataaccaccgccgcagcctcaaaataaacatgcggatgtaaacctctttgatgccaaaaatgtgggttataagtattaaatacgctgaaaatataagctatacctgtacttaaagccaccaaagaatccatattggctttgccatgtttagcctgtttgtaagcattgatgaaaaaacttcggccgtaaaagaataaaacaggtgtgcttaaaaccagcatcagctcattggcataaggcatatccatcaaaaacatccctatcaccactattggtgtggttaatatagccgctaaaataaaattatgctttaagctatggtaagcctgctgctgcacctcctcctgtttttcttgtgcattttcttcgtctataatgatatcataacccacgccttgtaaagctttctgaaaatcttgcggctttaccagctctgggttaaagcttagcttaactgattgactggcataatttacctcggcctgctttacaccttcttgtgctgcaagcatagtctctacacttaccgcacaacccgcacaagtcatccccattaccgggaagttttgggtttttattgttgttgccatcttttcctccttttcataacacaaatttactgtctttagtagctaaggtgttatacagttttaggaaagtgttatataatttttgtggtgggtggtttatgaaaaagttttgaaggaataaaaaagccccgaagatagtcgaggcgctaaatgttttcacaacggaataatccttattgtgatttgctttcaaaatcaaaggtataatttattttttaattacaaatacggaaaaccataaactgtaaaaaaaattatttatatatttatcctaaaaattaattaactactatgacaaaacatatacttggcctagatttaggcacaaattctattggttgggcaattatccaagttgacaataataataatgttccgattcaaataattgcaatggggtcacgaataattccgttagattcaaacgacagagaccaatttcaaaaaggtcaagcaatttctaaaaataaagatagaactacagctcgtactcagagaaagggctatgatagaaaacaactaaaaaaatctgatgattttaaatatagtctgaaaaagattttagagaaacttgacatcttccctactgaagaattaatgaaattacccactctcgatttatggaaactaagaagtgatgcggtttctaacattgaagatataactcccaaacaattaggtagaatactgtatatgctcaatcaaaaaaggggctacaaatcagcaagaagtgaagctaacgcagacaaaaaggatactgattatgtggcagaagtaaaaggacgatatactcagcttaaagataaaggtcaaactttaggacaatatttctacaaagaactatctgatgccaatcaaaacaatacttattatagagttaaagaaaaagtatatccaagagaagcttatatcgaagaatttgatgcaattattaatgttcaaaaatctaaacattcatttttaactgatgaagttattcactctttacgcaatgagatcatttattaccaacgtaaactaaaatcacaaaaaggcttagtgagcatttgtgaattcgaaggttttgaaactacctattttgacaagaaaacccaacaagataaaaccatttttactgggcccaaagttgcacctagaacatctccattatttcaattttgtaaaatctgggaagtagtcaataatatttctttaaaaactaaaaatcctgaaggcagtaaatataaatggagcgatagaataccaactattgaagaaaagcaaacaatagcaaattatctgcaagaaaatgaaaatctcagttttatagaattacttaaaatattacagctcaaaaaagaacaggtttatgccaataagcagattttaaaaggtattcaaggtaatacaaccttttctgctattcataaaatcattggtaatagtgagcatttaaaatttgacatcgaaacaatcccatcaaaacattttgctgttttagttgataaaaaaacaggtgaaattttagatgaaagagatagtttagagttaaattcagctttagaacaagaacctttttatcaattatggcatacaatttattctataaaagatttagatgaatgcaaaaaagccttaataaagcgctttaactttgaagaagaaattgcagaaaaactttctaagattgactttaacaagcaagcttttggtaataaatccaataaagccatgcgaaaaatgttgccttatttaatgttagggtacaaccagtcagaagctgaaagttttgctggttataatcgaagattaactaaagaagaaaaatcaaaaaatgtttcagacgaacctttacaattattagctaaaaatagcttgcgacaacccgtagtagaaaaaatccttaaccaaatgataaatgtagtaaatgcaattatcgagaaatatggaaaacccgaagaaattagagtagagcttgccagagaattaaagcaaagtaaagatgagcgtgaagacgctgataagcagaatggttttaataaaaaacttaatgaattagtagcaactaaacttactgagcttgggctaccaacaactaaacattatatacaaaaatataaattcatttttccagctaaagacaaaaactggaaagaagcacaagttgcaaatcaatgtatttattgtggcgatacatttaaccttacagaagctttaagtggggataactttgatgtagaccacattgtgccaaaagcattattgtttgatgattctcaagccaataaagtattggtgcatagaagttgtaactcaaccaaaactaataatacagcttacgactatattactaaaaaaggaagtcaggcgttaaacgattatgttgctagagtagatgattggtttaaacgaggaataatttcttatgggaaaatgcaacgtttaaaagtttcatttgaagaatatcaagaacgaaaaaaaattgggaaagaaactgaagccgataaaagaatatgggaaaactttattgataggcaattacgtgaaacggcttacattgctaaaaaagcaaaagaaattttagaaaaggtttgtcataatgtaactagcacagaaggaaatgttactgcaaaattacgacaactttggggctgggataatgtattaatgaatttacaattacctaaatataaagaactagagaaaaaaactaaacaaacatttacgcaattaaaagaatggacaagtgatcatggaaatcgtaaacatcaaaaagaagaaattataaattggactaaacgtgatgatcatcgtcaccatgcaattgatgctcttgtaattgcctgtacacaacaaggatttatccagcgaataaatacgctaagtagtagcgatgtaaaagatgagatgaaaaaagaattggaggaagacaaaacagtatacaacgaacgattaacattattagagaattatttattagaaaaaaagcctttctcaactgaagaaattgaaaaagaagcagataagattctcgtttccttcaaggctggtaaaaaagttgccacattaagcaaatataaagcaacaggtattaatgaaataaaaggagtacttgtgcctagaggtcctttacatgagcaatctgtttatggaaagattaaagttatagaaaaagataagcctttaaaatatttatttgaaaattccgataaaattgtgaatcctctcattaaacatttagtaaaaacaagactattagaaaatgaaaacaatgctcaagcagcccttgtaactttaaagaataaaccaattttacttaataacaaacaaacagaaattcttgaaaaggcatcttgctataatgaagcaacagtccttaaatacaaattgcaaagtttaaaggcgagtcaaatagatgatatagtagacgaaaaaataaaattcttaataaaagaacgcttatctaaatttggtaataaagaaaaagaagcatttaaagatatactttggtttaatgaaaaaaaacaaataccaatcacatcaattcgtttatttgcccgtccagacgcaaacaatctacaagttataaaaaagcatgaaaaaggaaaaaatatagggtttgtacttagtggaaacaaccaccatattgctatttatgaagataaaaacaataaattaattcaacatatttgtgatttttggcatgctgttgaaaggaaaagaaataatatacctgtcctcattgaggatacctcaacaatttggaatcatcttataaatgaagatttctcagaatcatttttgaataaattacctaacgacagtctaaaactaaaatttagcttgcaacaaaatgaaatgtttattctgggattacctaaagaacaatcagaagaagctataaaaagcaataataagtctctcttaagtaagcatttatatctagtttggagtattacagatggtgattactttttcagacatcatttggaaacaaaaaatacagaacttaaaaaaattgatggttcaaaagagagtaaaaggtatttgaggctaagtacaaaaagcttagtagatttaaatccaattaaagtgagattaaatcatttaggtgaaataacaaaaataggagaatagtaaaatggaaccacttgaaactggtcagtattaccacatctacaaccacgccaatggtgatgacaacctatttagagaagctaagaattatccttttttcttacagaagtatcatcagcatatcaatcctgttgccgagactatcgcttggtgtttgatgcctaatcattttcatctgttagttaaaataaaagatgaagtatcgttaaaacaagattttccaaagtttcaaactttggaaaatctaactagcgaagaaagacaactaagactttcttatttactatctaaacagttttctaattttttcagctcctactctcagtcgttcaacaaagtttatcaacgtagaggatctttatttttaaagaattttaaaagaaaattaatagatagcgaagcatatctttttcaattaatcatttacatacacaccaacccagttaaacatggctttacgtcaaatcttttagattgggagtggtcctcttactctactttttatcagaataatcctagcttatttgaccaggtatttgttaaagaaaataattatcatcaaatccatttagaaaaacttcaatattttaatgaataccataaaatagaagaacacattttaaacgcttaaataattaattatatgtctaaaatagccttaaaaaaagaactctctaaacttagtaaagagcaattgattagtcacatgattgacttatacgaaaacaataaggctttaaaagaattttataaccattttcttaatccacaaatgagaaagaactagctaaaaaatataaaaagataaaaagataattagaaaggagtttaacgtagaaaaacctatgaaaatcaccgagaaattctcagttgccaaaaaagctatttcagattttaaaagcttgcagccttcacctcagattttagccgatgtgatgttgtacctatctgaaagcgcttgtgaactaactcattgttacggtgatttttctgaacaattttatatttcggcttggaaaaatcacaaaatcgccttagaatttataaacgctcattgtttattaaaagaatttaaaccacgagccgaaaactgtttaaaatgggcttctaactgtggttatggcttttgagatgatattggctatgtttttcacaaataccataaagattaaaataaatatttaacgaggcaagttaaaagaatattcattatgatcaaacgaacgctttattttagcaatccagcttatctcaacttaaaagaccaacaattacaaatagatctcccccatttaaaaagtttaggagaaaaagagagtaaaaaacatatccctatagaagacataggcattgtaattttaggccatcaacaaattaccattacccatgcttgtatggctgctttattggccaataatgtagctttaattacttgtaaccatacgcaccatccagtaggtttgttattacctatagacggacaccatacacaaagcgaaaggtataaataccagattgaagcatcgcaacctttaaaaaaacaattatggcagcaaacagtgcaagctaagattttaaaccaagcagcagttttatttgaaagaggtattgcttgcgaaaatatgattcattgggctaaagcagtacgctctggagacccggataattatgaaggccgagcagcagcatattattggaaaaatgttttccctaaaaaattagacttctttaggggcagagacggcgacccacctaataatttactaaactatggttatgctattttaagagctattgtagccagagcattagtatcttctggtttattaccaaccctaggtatacaccataggaataaatataatgcctattgtttggccgatgatattatggagccttaccgaccttttatagataaaattgtgcttaaaattattgataatggcgagaatttcttggaattaaacacccccataaaatctcagttattaagcattgctagtgttgatgttagctttgagaaaggtactagccccttaatggttggtttacagtatactacagcttcattagctaaatgctatgagggcactttaagaaaaattaactaccctattataaaagattttgatgccaaaagaataggatacctaaaaaatattgatgacacacctataagttatgccgctgaaaaaaccacaaaatatggaaataaaaaaagtacagacgagcccgaattacctttttaggaaatgcgcttaaaccaatatcgcgttttgtggatattggtattttttgatttgcctacggagactaaaaaagaaaggcagatatatactcgctttagaaaagatatcatgcgagatggttttaccatgtttcaattttctatttatttacgacattgcagcagccgagaaaatgcggaagtacatataaaaagggtgaaaaacctactcccagctaaaggacatataggtattatgaccgttacggataagcaatttggaatgatggaattgttttacggtaaggaagaaaagaacctacctagcaccccacagcaattagaattattttaaagccagttaatagcaataaaaaaatgaacataaaaaaatccggaagataaactgaccggatttttttattcctgattttacatttaaactactgatttacaattttttaactagaggtatgttgttgtaaatatcagtagttcaaagaatgaaagcaaatcacaactcgaaattcattgcatctaatgactttattgttgttgtaaatatcagtagttcaaagaatgaaagcaaatcacaactattattagcaagaaggttaaatcgcttttgttgttgtaaatatcagtagttcaaagaatgaaagcaaatcacaacaaaagatatggtgctgaaaattcaaagagagttgttgtaaatatcagtagttcaaagaatgaaagcaaatcacaacgagctctcagagaaaatacagatttagaaggttgttgtaaatatcagtagttcaaagaatgaaagcaaatcacaactattgcgtcaaacaagtcacttccgctaagttgttgtaaatatcagtagttcaaagaatgaaagcaaatcacaactaacagcagcggcgaaagagcaaagcttaaagttgttgtaaatatcagtagttcaaagaatgaaagcaaatcacaacaatagtgttttcaatctttccattagattcgttgttgtaaatatcagtagttcaaagaatgaaagcaaatcacaacataaactaaatcaacttcaatatgctctacgttgttgtaaatatcagtagttcaaagaatgaaagcaaatcacaactgatgcttatgaggtgttttttggagatgtgttgttgtaaatatcagtagttcaaagaatgaaagcaaatcacaacgtaactttaaatatttccccagctaggttagttgttgtaaatatcagtagttcaaagaatgaaagcaaatcacaacgcctactgcatttttaagccaattaaattgttgttgtaaatatcagtagttcaaagaatgaaagcaaatcacaactgtaataaagtgctttttttagtgttttaggttgttgtaaatatcagtagttcaaagaatgaaagcaaatcacaacgtaaagatggagcctgcctacagcaataatgttgttgtaaatatcagtagttcaaagaatgaaagcaaatcacaaccataaggccacttagaacaaagtctgatgagttgttgtaaatatcagtagttcaaagaatgaaagcaaatcacaacatgcgataagtactaaggatgccattgccagttgttgtaaatatcagtagttcaaagaatgaaagcaaatcacaaccagtctgggttttgtctggtaccaaactccgttgttgtaaatatcagtagttcaaagaatgaaagcaaatcacaacgcctagtgcaccagtaacatcgctactattgttgttgtaaatatcagtagttcaaagaatgaaagcaaatcacaacacatccttaatctctggaaggttaggacttgttgttgtaaatatcagtagttcaaagaatgaaagcaaatcacaacttgcatgatgttttatttaatactttctacgttgttgtaaatatcagtagttcaaagaatgaaagcaaatcacaactgtcctagtaatttttgaacatatctgatagttgttgtaaatatcagtagttcaaagaatgaaagcaaatcacaactaaacccaccgcctttagattttgttacctgttgttgtaaatatcagtagttcaaagaatgaaagcaaatcacaactttaatcgctctaggtataggactagttgcgttgttgtaaatatcagtagttcaaagaatgaaagcaaatcacaactagttgtgccagatgcatttgctgctgatggttgttgtaaatatcagtagttcaaagaatgaaagcaaatcacaactttgataataatcccatgtctggattttgggttgttgtaaatatcagtagttcaaagaatgaaagcaaatcacaactatttcttgtgcatccatttcaataaagagttgttgtaaatatcagtagttcaaagaatgaaagcaaatcacaactaaccgagatttctacctttcgccttttaagttgttgtaaatatcagtagttcaaagaatgaaagcaaatcacaacaggtaatagtctactttgttgcctcgctctgttgttgtaaatatcagtagttcaaagaatgaaagcaaatcacaacttctttaatagcggttgtagatattgttttgttgttgtaaatatcagtagttcaaagaatgaaagcaaatcacaactagctaaatattctttctttgatagatttagttgttgtaaatatcagtagttcaaagaatgaaagcaaatcacaacagttcagaggatgcctatagacctgcttatgttgttgtaaatatcagtagttcaaagaatgaaagcaaatcacaactaccccctgaaatcatggagagatattatggttgttgtaaatatcagtagttcaaagaatgaaagcaaatcacaaccaaaaaagcattctatacatatctagaagagttgttgtaaatatcagtagttcaaagaatgaaagcaaatcacaacgcttacatcgcttgatatttctaaaacaaagttgttgtaaatatcagtagttcaaagaatgaaagcaaatcacaacttctattgtagaatgcgtttgtatatcaaagttgttgtaaatatcagtagttcaaagaatgaaagcaaatcacaactagtctttatgatttagaccctatgaaactgttgttgtaaatatcagtagttcaaagaatgaaagcaaatcacaacgtagtgttaatgatagcgctaactacattgttgttgtaaatatcagtagttcaaagaatgaaagcaaatcacaaccgaaatcttctgctgcaatattgccagcaggttgttgtaaatatcagtagttcaaagaatgaaagcaaatcacaacttaaagagggcgtgatgtttaacagtgttcgttgttgtaaatatcagtagttcaaagaatgaaagcaaatcacaacttgaaccaattagttcctttaacttccatagttgttgtaaatatcagtagttcaaagaatgaaagcaaatcacaactatgtagaagaagaaagcgaagatttctttgttgttgtaaatatcagtagttcaaagaatgaaagcaaatcacaaccccttctgagtgtccccctatggtcgcattgttgttgtaaatatcagtagttcaaagaatgaaagcaaatcacaactaagtttaagcaggtttagcgcctgctctcgttgttgtaaatatcagtagttcaaagaatgaaagcaaatcacaactgggtatgagtaagaatatcattaaacgctgttgttgtaaatatcagtagttcaaagaatgaaagcaaatcacaactatgtagaagaagaaagcgaagatttctttgttgttgtaaatatcagtagttcaaagaatgaaagcaaatcacaaccccttctgagtgtccccctatggtcgcattgttgttgtaaatatcagtagttcaaagaatgaaagcaaatcacaactaagtttaagcaggtttagcgcctgctctcgttgttgtaaatatcagtagttcaaagaatgaaagcaaatcacaacgtattaccactgttccgttgttacattccggttgttgtaaatatcagtagttcatattaaacattattataatccttagaatattatccatttaagtataattgtatatgaaagaagagttgctagccaagaacatcttatcagttatacaaggatacaggaatgaggatggtatttcattggatatagatcatattctggcttgggctaatcagttcggagatgatagtttatttgtgttgggtgaactcaaccacattatgcctaaaatatacgtttccaaagaacgggccatacaatatactgagcaacatttgagttggcttacaggcaaatatggctatcatagctttaatgagtttctaatggatacccattttttaagactacaaacggaaggtaaaagccaattagctattattgagttagtagcggaaataattcaaaagaaatatcaggtatcactggagcaatacattacctaccctaaacgtaactatgtttatttcgacgacgttttggcaacaggcagcacattaggcagacacattgttgattggcttaactcttctgatggggctggaaaaatgattgataggatattagcagataaatatagattatctatcaatttattttgtttgcatacttggggtaaatcgtttcaaacctatagattaaataaagaaattgatgaaaaggtggataaaaagattacctggatgcataactatttggtagaaaatcatgcaagatttccaaatcaagcctttaataatgcttttccaatccaaatgcagcctataaatatacaaagctacctctccaacttatctgcaacaaaatacgcaaactatgcttatagaaacgtaaatatgcctcaatttgaaaacttcttctcatctaaagagaaccgtataagatatgaaaatatcatactccaaaaagggttatatattattggaatgattaaaggcgagctaaaaccgaatattaggccattgggattaattaatccttcttataaaacatttggcttaggaactcactttgttacatggcgtaatattcctaataattgtccgttggtatattggtgggaagtaccgggtcatgattggattccattatttcctcgcaaagtggtttgataatatatttttattaaattgcatgagcgttatgaaaatcaacgataaaatttacgacataaaggaatccgtagtattcagtaaaactacaggtcagtttggtggtttgtctaatatggccgcaggatactctttatttgtgaatgaggttaatattgccaattcagaaatactttaccaatgctgtagatttccattatttcctaagctgcaacaagatattattgctattgagaacccaatggaagcaaagactattgccagaaaacatgataactattccagacaagactgggaagatataaaagtagatatgatgagatggtgcttgagagttaaattggtgcaaaactttgataagttctcaaaattattaaaagaaactgaaaataaagctattgtagaatattctgccaaagattctttttggggtgctatgccaactgaaaagggaaaactacagggaaaaaacgtattaggaagacttttaatggaactgcgtgaaacggttgtaaaacaaaacgacaagatagaaagcgtttctccattgacgattcctgcttttttattgtttaatttcccaatagaagctgtgcattcgacggaatacagtatagaggatttagataatgtttatgcttaataagtttctaagaaaaagatgaatgcctcttcatagacttttagcttcaactagtttaagtcttagcgcaattgacaaaagtggatggactgacttaaattattgtataactttttctgtttatttatccatttctatttaacgttttgtaggtcttagtgtgcctaatttattagcatcaataaccaaagcaacaatctaataatagcttcaatttttttgtattcacacttattttctaattaacgtgagttcggtttaagcagctaaaaggagttgtttatcgtgatcttcaaa

SEQ ID NO: 1742 - DNA, 20697 bp, synthetic construct
  source 1..20697: mol_type = other DNA
  misc_feature 1..20697: note = Synthetic
taaaaaatatattttttttaagtgttttttgtcaaaaatataaacttaatttcgttttggcacttttattgaatactgtgtgtctacataaaatattttatgcatcccataactaaacccatgaaaatctatacattccgcaatattttcagacaccctacataattccagtgcacagtactggattgtatgacgtttgttgattcaattcattttgccattctttaatttacagttacatacagtaattgtgactgtactccttatgccttataaaacctataatatattattatgaaaatttttactcagtttttttcaaatgtaaagtttgcggtatccgggatacctgtactattgggtgctgctcttgtggcaccgcaatacggctttgcgcaaaccagaattattgttaatccaggcctggaattcggtgtaaatgcaggagcattttcacagctggataccaacttcggttcaggcgctacgtttgatgcgggggctgaagtcacgtccccgtggtatacctctcatcctgtacagtccggcgtatgtgctcccggctcttccggtgcatgtcatcccgtagaagtctggggaacaggctataacaatgtacctgccgcacaggggactaattttgtagaactcaatgcctacactagctccatgatctaccagaatatgtatcttaccaacggggacgagattaattactacttcaggcaccgggcaagaggcaatgacgctgaacagtctgccatggttatcgaagatgaaaatgaagtcaatattgctacggtacataccacttcgctgccttccagcacaggatcctggtcgataaatcagggaacgtatgtatttaacggaactaccggtgtgtacagggtagggttcagggcaattaattctgccaatcccggcttcgggaatctgcttgatgatatccgggtatcgctgaaccctatcatcgatcttaatttttccaatgctcttgcctcatgtgaaggttcaagcaacggatatgtatttatgaggatcagcggcgcggtaatcgagcccactacggtagctctggaactggtagacccggctaacggtagcccgtttgtgagtgataatgatattgtgctcagcggtgtttctactattaacggtacgccttcagtttcccatgttccgggcaccagcatctatcttgtcaccgttccgccgggcaactatgacggcggtattaccccgggattttccagtccgaacaatgatatagacgggattgccattaatgttacctctgtaaatgacggagttgatgaacctaccgaaacattcaggtttgaaattaaagagcaggggaccaacggttctaccgataactttatgagtactacatctcctgtattcggtgatacatattatccttctaccaatgattattttatacagcgttgtatttgttatgatgatgccaatacttctgctccgggtattgattcaaagatggggattacccttcttggaagagcgggcagtaacggtggtaactggccgatgttaagaaaatcagcatataccgtactggaatccaataccaaaggatttgttattacacgaatgactacggtgcagatcaatgccattacagatccgcaggacggaatgatggtatatgatacgacctcaaaatgcatgaaaatctacgacggctatgcatggtactgctttaatacccctacatgtccataatctcagcaacaagacttcattaatctatcactcttacattaataatataaaatcaatatgaaaaaaataataacaacccttttaatagccggtatttcgggtgttcaggcacaggtaatcatcggtgatgcaatcggtaccgcagataccaagacttcggttctgcttgagtttgctgccaaccagaacaaaggaattatcctgccttatgtaaggacgatgcctgccagtcctgcagaaggtaccctggtgcttgatgccagtgacccgacaaaggcccgtgtaaaatatttcaacgggaactggatggacctgagtgcacaggatgctgatgttactacggcactggtaaaccagccggcagcagcacaggctgttgaagcaccgggagccagaacgatcatcggtgctttgtcaagcccggcagacggtgttctggtattggaatccactaccaaagcaatggtgcttcctactgtggaagatgtgcagaatatcattaatccttctccgggaatgatggtgtatatcaataaaagcggtgccaaacgcctcgcgatcttcaacggcagcaagtggtcttactggaggccgtaaacccaacagaaataccttaattattaatacatttataaacagacaaaatttaattacataagaaaaaattaatctttaaccccgtgttactacaatctcaacctgaaaggctcctgcaaaggagtctttcttttttttattgcctgatataacggctttgaaagctacaggcatcaaaatacggccggaaattaacaaaaaccttaaaaagcggattaatttcatgcaaatgctatattttttttcttcactgttaggctggaaccaccataaaacctatatttgcagcctaaattttaaaaaacaatgaaagaactcatcgaaaaaatcaacgcggaatttgaagctttcaccaacgaagcaaaccaacaggcagaaaaaggaaacaaggcagcagggacaagagcccgtaaatcagctttggaattgagcaaactgttcaaggatttcagaaaagtttctgttgaagaatctaaaaaataattattctcaaaaccggctttcttagccggtttttttattgttgtcaacattagatttgttatgcaggccaatgttgattttaaataaacaatgagcggcttaattgataagccgctcattgttttcaggtggtccggtatcaagtaaactcctgatttcggttattttactctcttttacaatataggttttgcagattttgttattcaggtgcatgctgaaattcatctgcgttccttttctccagcccatggcaactgtttttgaggtatattctgaaaagacgggattgaaattagccaggcataatacatttcttgcgagtgatttataaaaacccggatagttcccttcatcgtcaatcaccttcagcctgaatattttctttcccaaagctgttccgagataaaattcggttaccgctccggaaataataacagccggaactgaaaataaaacacttacaatgagaactttattgaatataaaatgaaaaatcagggtaaacacggccatatcaatccattttgcaaaaagcctctgtgtttcactgcctttaaaacccggattgtaaggcaggtaatattcgtaggcatgataaatcctctttccggatccgtcaaaatgaagagtcggcctgtgaatgattttccgttctttaatttcagatattttcacggcaaattttataaaatcatgctcagctgaatcctctttcttgcctcatccacctccgtcacctttacccggacatgctgatgcagtttcaccacttcattgacgtcggaaacaaacccttccttcagctgggaaatgtgtaccagtccactttccttaattcccaaatctacgaaacatccgaaagccgtaatgttgttcacaattcccggaagcaccattccggttttcaggtcggtgatcttttttacattcgggtcgaactcgaatatctttgcggcttttctgggatcgagtcccggtttttccagttctttcacaatatcctggatgcttaagattccgatagtttcggtaacgtacttttccgggcggatcatggcaattttctctttgttggcaatcagttcatgggttttaatgccgaggtcttttgccattttttccacgatgccgtacgcttcgggatggacggcagaattatccagagggttcacgggattactgatccttacaaaagcagcagcctgctgaaaggccttttcacccagtctcgggacttttttcagctgtttcctatcttcaaaagcaccgttttcagcacggtagtttacaatattttccgccattttttctccgattccggatacataactcaacagggatttgcttgccgtgttgaggttgatcccaacggcattgacacatttcatcacggtagtatccagttcgtttttaaggcgtgcctggtccacatcgtgctggtactgcccaacgccgatcgatttggcatcaatcttcaccagctctgcaagcggatctgcgagccttcttccgatggaaactgcgcctcgtacggttacatcataattcggaaattcatccctggcaattttactggcagaatatacagaagctccggcttctgacaccacgaatacctgcagcggcttgtcgaatgcaatttttttaatgaaaaactcggtttcccggcttgccgtcccgttcccgatggaaatcgcttcaatattataggcgttgaccatcgaacggattttcttcatggccattccgctttcgttttgcggggcgtgcggataaatggtttcattatgcagcaggtctcccttttcatccaggcatacgactttgcagccgctccggtagccgggatcaatggcgaggattcttttttcacccaggggcggtgccagcaaaagctgggaaaggttgtctgaaaagatttcaatggctttcttatctgctttttcttttgcttcctgcaaagtttcattggcaatggcaggttccagcaatcttttgtagctgtcttttacggctgaggcaatctgcccggcagtctcattattaccgattttgataattgccttttctataaattctatggcttcttctttactgatgccggtatttacttttacaaatccctctgactcagccctcagtaaagccagcagccggtgggagggcatcctgcctaagttttcttcccattcaaaatactgggcatatttctgggcttcctcttcatcctttctggcttttactgcttttgatgtgatgacggcttgccgctggaacatccgccggagatttttgcggacatacatattttcgttgatccattccgccataatatcccgtgcgccctgcaatgcttcttcttcagacgctacctgatcatttatatattttgctgccagaaacgtaagatccgaggctttctggctcatgatgatcctggccatcggttccagtcccttctctttggcagcatccgctttggttttcttctttttcttatagggcaggtagaggtcttcaatttcctgcatatcgaaactcgcttcaatccgctgcctgagttccggggtcagggcaccctgttcttccaccgacttaaggatcgcttctttccgtttcatcatatcttcaaactgcctgcttattttggcaatctgttcaatctgtacttcatccaggtttcctgtggcatccttccggtaccgggaaataaaagggatggtgcagtcttcggccagcagcttaagcgtagcattgatgcttttttcggagatgttaagagactgtttaatatagagggtagtgttcattttaaaatttaaaccgctaaaataatcaaattttaacggggcatatgcctgaatgtaccatctttttgttattttagccattgggctcagagaatagaggatatgatcatttcttgatgtatggtaaggagagcagggaataaagtttcctatttttggtgcccgtcggatgtcttatgagagatttccgcagactttaaacaaaaaataaactttttaaacaattatatcatatgaaaaaattaagtgttatggcattggtagctgttggtatgctggcagcatcttgtaacaaggataaatctgcagaaaatgcaaaaacagctcaggagcagactgtagcagaaagcaaaggcgaaaagctgatggtggatgcagcaacttctgtggtgaactggaaagcattccacaaagggggaatggcaccgcgttggggaacattaagcgtacagtcaggagacctgagcatcgaaggcggacaggttactgccggaaactttgtgatcgacatgaactccctgaaagtagacccggcttccgtaacggagaaagataaaaagcctgctgaccttgaagcccacttaaaaaaccctgattttttcgatacgacgaaaaacccgacttcagatttcaagattaccagcgtaaccgatcttacaggagcacctgcagatgcagtagccggcgccaacaaaacggttagcggaaaccttacgttatcaggaaaaacaatgaacgtaaccttccctgcaaaagtagaagttactgaaggagcagcttctatccaggctaagttcacggtaaacagagccgactggggaatcaaattcgggacttccgaagcagatcctgcagaatggatgatcagcaaagacatcgaaattgctgtagatgtaaaagccaagaaataatattattgttagataaatcttcaatggagccgccttattcgtagggtggcttttttgtgcttattatttattactgatgtagataataggatgtagaataaaaataaaaaggcgagttgccccgccttgaatgttttcacaacggaataatccttattgtgaattgctttcaaaattataattcaaatataggataatttttcattgccgccactgtgggtttccgtaatttttgtaataaagaatttttatacatttaagaattataaaaactgaaattatgaaaacggtattaggactggacctgggaacaaattctattggctgggcactgatagaacttgatgaaaacaatatcccaattcgtattgttgcgatggggtcacgaataattcctttatcaaccagcgataaagaggaatttcaaagaggtttgtcaatcacaaaaaatcaaagcagaacagtaagccgtacccagagaaaagggtatgaccgaaagcagttaaagaaaagttatttaaaaaagattttaaataaatacaatattttcccatcagatgaattgctaaaacttccaatgcttgatttgtggaagttaagaagcgattcagctaatcctaatgaaaatatttccgccgaacaattagggcgtattttatatatgctcaatcagaaaagaggatacaaatctgcaagaagtgaggctaatgccgataaaaaagatacggattatattcaagcagtaaaaggacgttatgctcaattaaaagatagaaaccagaccattggtcagtatttttatggagaattaaatgatgcaaatgaaaataattcttatttcagaattaaagaagaggtttatccgcgggaagcttatacagaagagtttgacaccattattaatgctcaaaaagataagcatgattttctgacggatgaagttattcatcaattaagaaatgaaatcatttattttcaaagaaaactgaaatcacaaaaaggattagtaagtatttgtgaatttgaaggatttgagaaaactgtttttgataaggaaaaaaataaagataaagtggtgtttgtaggaccaaaagttgcaccgaaaacttctcctttgtttcagctttgcaggatttgggaagttgtaaatacaatcacattaaaaataaagaaccctgaaggaagcaagtataaatggggtgaaaaaattccagacgtaaaggaaaaagaaattttagcggattatttatttaaaaatgaaagtttaagctttactaagcttcttgaaattttgaaattaaataaaaacaatgtttattttaataagcaaattttgaaaggtattaaaggaaatgaaacttattcaattctccatagtattttaggcgatagtgaacttttaaattttgatgtttctatcattccatcaaatcatacttcaatgttgatagataagaaaacaggtgaaatcctggaagaaagagctggtttagaattagatacttcattggaaaaagaaccgttaaatcaactgtggcacacaatctattccataaaagatttagatgaatgtaaaagtgcattaatcaaaaggtttggttttgatgatgaaactgccgataaattgtctcgtattgattttaacaaacaggctttcgggaataaatcgaacaaatcgatgcggaaaatcctgccttttctgatggaaggttatgattattctcaatcctgcagtttagccggttacaatcattctaattcttttacaaaagatgaaagagaacaacaaattactttagacaagttagaacttctccccaaaaatagtctcagacaacctattgtagagaaaattctgaatcagatgattaatgtagtcaacgcgatccttgaacgatacggaaagccttctgaaattagagttgagcttgcacgcgaacttaaacaaagtaaagacgagcgaaatgataccgatttacaaaattccaaaaataaaaaactcaatgaagaaattggaaaacgattggctgaactgggattgccactaaccaagcgatatattcagaaatataaatttattttcccatcgcttagtaaaaatctgaaagatgctcacgttaataatcaatgcatttattgtggggaaacatttaatctaacagaagctctaagcggtgatgcatttgatgttgaccatattgtaccaaaagctttattgtttgatgattctcagaccaacaaagttttggttcataggaaatgtaattctacaaaaaccaaccaaactgcatacgattacattgctacaaaaggagatgagcaagttagagtatattccgaacgagtagatgactggttcaaaagaggaattatctcttacagtaaaatgcaaaggctgaaagtttcgcataaagaatatcttgaaagaaaaaaactgggaaaagaaacagaaaccgataaaaaactttgggaaaactttatcgacagacaattgagagatacgcaatatatctcccgcaaatcaagagaaattttacagaaagtatgcaataatgtggctacaacagaaggtggagttacagcaaaacttcgtaatttatggggttgggacgatgttttgatgaaccttcaaatgcctaaatacaaagaattaggacaaaccgttgtcaaagaatggacaagcgaacatggaaaaagaaaacaccaaaaagaggagatcgaaaactggacaaaaagagatgaccaccgccatcatgccattgatgctttagtggttgcctgtacaaaacaaggtttcatacaacggataaatactctgaattcgagcgaaacgaaagatttgatgcaacaggaaattaaagaagccaagaaacttttaggagaaaattacaatgaaaaagaatttgagaataataatgagtcagtaaaaaaccataaagaaagattatctcaattagatgattatttgcgtttacagaaacctgttaaattcgatacaaaatatgtagaacaagaggctgataaggttttagtttcttttaaatcgggtaaaaaagtagccacaataactaaatttaaagctacaggaaaaaataaagatacaggagtaattgttccgagaggagcgttacatgaacaaaatgtatatggtaagataaaagttattgaaaaagataagtctttaaagtatttgtttgaaaattcagagaaaattgtaaatcctaaaattaaaaatatagttgaaataatactttcggaaaatgaaaataattcaaaaatggctttatcaacattaaagaaaaatcccattttcctgaatgaagaaaaaactgatttactagaaaaggcatcatgttacgaatatgttactgttagaaagtatcctttgaacacaataaaagcaagccaagcagatgatattgttgatgaaagagtgaaatttttagtgaaagaaagattgactcaatttggaaataaggaaaaagaagctttcaaggatacactttggtttaacgaagagaaacaaatcccaattataactgttcgtttgtttgcccgtccggatgctaataatttacaggcaattaaaaaagatgaaagcggcaaagaaataggttttgtagtgatggggaataatcatcacattgcaatatatgaagataaagatggcaaacttgtacagcacagttgtacgttttggcatgcagtagaaagaaaaaaatataatatttcaacggtcattaaaaattcatcggatgcttggaatcaatttctcgacaatgaacttccagaaccatttttaaataaattaccagctgataatcttaatttgaaatttagtctgcaacaaaatgaaatgtttattctgggattatcgcaagaagaatttgataaagctttaaaaagcaatgataaatctttattaagcaaacatttgtatttggtgtggagtatttctgaaaataattattggtttagacatcatttagaaactaaaaattctgatttaaagaagacgaatggagttaaggaaagtaaaagactttataatattagaagtttaggctcattattttctttaaatccaataaaaatcagattaaatcatttaggagaaattactaaaataggagaatattcatgatcacccgttccatctacatcggcaatcctgcctatctgaaaatcaaagacgagcagatgaaaatcctctgtccggaaaccagaaccgaaaaggggagtgttcccgtagaagatttgggactgctgatgctggaccatttccagattaccgtttcccaccagctgatccagaaaatgatgggaaacaatgtcgtggtgatcagctgtgatgcccaccatctgcctcacggcattatgctgccgctgtacgggcataccgaacattcggaccgggtaaaagaccagttggaagccagtgagccattaaagaagcaactctggaagcagaccatagaatgcaaaattgaaaaccagaaaaacgtactgatgaaactggggaattattatgaaccgatggttgaatatcagcggaatgttaaatcaggtgacattaccaatatggaaggcatcgcggcccagcactactggaaatacctgatcagtctggatttcctccgcgaacgtttcggagattcgcccaacccgtttttcaattttgggtattcggtcctcagaagtattgtggccagggctattgtggaaacgggactgttgcctgtcctggggatttttcacaaaaacaaatacaatccgtactgcctggcggatgacctgatggaaccgtaccgcccctttattgatctgctcgttatgcagtggctgagcatgcatcctgaaactgaggaattaagtaaagaattcaaggcgcatatcctgcagattgcaacgaaagatgtcaatattgacagtaaaacaaggccgctgatggtggccgtaaagatgaccgccagttcgctgtacaaatgttatacaggcgaaaagcgcctgatttcttatcctgaattattatgaacgccgaaaggtttaatgcataccgaattatgtgggtattagtattgtatgatctcccgactgaaaccaaggccaatatgaaagatgccagccgtttccgtaaggccctgattgatgacggattcaccttattccagttttcaatgtatgttcgtcactgcccgagccgtgaaaatgccgaggtccacattaaacgcgttaagtttatgctgcccaaagcagggaaggtagccattatgtgcattacggataagcagttcggggatattgaaatcttctttgccaggaataaagaagaaccgccgccaaccttccagcagctcgaattattctgaattttaaattctgaaaataaaaataaactactgaatttcagtagtttattttttgaggctgtgactaatcacgaagatagtaaattttgaaagcaattcacaacttaagcaaacttattactttgttatatctcgctgtgactaatcacgaagatagtaaattttgaaagcaattcacaactgggggttcgtaccacgatacagccaattcgctgtgactaatcacgaagatagtaaattttgaaagcaattcacaactatgttcgtacatgtaaaagtagcattatagctgtgactaatcacgaagatagtaaattttgaaagcaattcacaacatgctctcaacagctcctccaaaatgatcggctgtgactaatcacgaagatagtaaattttgaaagcaattcacaacttagatgttatataattggcaacttcgctagctgtgactaatcacgaagatagtaaattttgaaagcaattcacaacgtatcagaccgcacatccccggaaacagttgctgtgactaatcacgaagatagtaaattttgaaagcaattcacaacgaagaccacactgaccacttcaaagcgattgctgtgactaatcacgaagatagtaaattttgaaagcaattcacaacgaagtcaacgtattttccacataaaatttcgctgtgactaatcacgaagatagtaaattttgaaagcaattcacaacgctgctgtcacagcaccaattgaactactagctgtgactaatcacgaagatagtaaattttgaaagcaattcacaactctccgtaagtgttaccccggctgccggaagctgtgactaatcacgaagatagtaaattttgaaagcaattcacaactattcaggatgtaccaacgggaaagcctgtgctgtgactaatcacgaagatagtaaattttgaaagcaattcacaacaatacacgcgaacacgcggtggaaagactagctgtgactaatcacgaagatagtaaattttgaaagcaattcacaacactggcaggcttgttgcctagcccccttatgctgtgactaatcacgaagatagtaaattttgaaagcaattcacaacgtcacagacttaatccatgaagtagcattagctgtgactaatcacgaagatagtaaattttgaaagcaattcacaaccatagcagcaaacaatatctgcaattataggctgtgactaatcacgaagatagtaaattttgaaagcaattcacaactacctaaaacacaacattcccgtcagggcggctgtgactaatcacgaagatagtaaattttgaaatccggtagggtatagggttggaggattcggcgtagccaaagccattcacaacagtcggtagaacgtgaaatgaaaattttagcacagttaaagtgattaaataccataatttataactgcttaaaaataaatccccgacaatatcgccggggaagtaatttgaaatgtatggatatccggttttagcttatgggatctacgattgccatgcagagatggcccggtcccgcctgtgaaataggccggcatgctccgttgatacagcaccagtcatttccacattgtaaatcttccggacacatcgggtatcctcctaaaatattttttaactgctttttgtctaatgatcttagacctttaagatttgttttcatatgattgaatatttggttgttacaatattacaaatatttttataactcacaaccccgggaagctaatttatttatgtaaccaactttattatatggacttataagcagggcagggcagtcggagctttaataacgatctattcatcatgagagattaaattttaaactctgcggtaggaaatatagaatcccgcagaactgaaatgcccgcaacacaatgtaagactcaaaatcattcagattatgattatggaaagaatatggcaatgtctgatagctttactgaatagtaaaatatgtgaatcattcattgtttaagctttctttgtaccttaaacagttagatgatacttgataataagaaataattctaaataaggtaaatattaatactaacgatgaataaaagaaaaggcttaataatacacccttccttttacaatcttaacgatttcttcgctttgcagtttttttaaaatcctgatcacggtttcgatcctgaggcctgttaacgaagaaagttcttttctggtatagggaaccttaaaggaaaagcgctccgtctgatcctggttttctttaagatggttcagcacggtcagcagctggtgcgtggcgtcttctgaagtcaggctgtttaagaaaatataactgtaataggttctttccgcgcagcttcggagaaactgcagctgaaggtcaaaatcagattccagcagttttagcaggttgggacgttccagccgtaagatggtgcagtcttccgttgccacagcattaacgggatatcggtggtgtttgcagaataagaacacctccccaacagattcgccatgatcatgaatactctggatgaactctccgtctcccggcttgaaattggtaagctttatcttgcctttcttaatctgaaaataatacgctggtgcagcattttcttcaaaaagcaatcctgattgctgtagatgaataatttctgctccgtaagtaataagcaagtcttcttgtatggccataacttataattaactaatctcacaatagatgatattacttggaaacaccggtatctattgaatatactctaaaccaacagcaaatatacaatctaaatatttattcgattatgatttgaatgcgagaatagatttaactggtgaataatcggataatgtgccgaatgcagtgttgcaactatacataaaccaattatatgctttctacaactactgaaccatacaggcagatcttcagtgattatgtataataattgttttttttatagagaaagaaatcatcacatgcagacaggatttaccgttttctcagtagagaaatagctttcggaaaacacatataacagcccattgctgcatgggtttatcaaatatgatctatatcataattatggctgtactatatatctatctttggcaagccggatcgggaagtaaaatgctataatttaataataagaattcaataaatccaatctgttccggccttgtaaactattgcaattcttttatcaggccatagagtttttattactttttaatataacgctatgctgtcaattaatatgcaatgctgattttttgcctcataagctttataccagtaaaacagaaaagtaaaacaaacagaaactaacattatgtctatcacagaagaacttttgcagactgtagaagcaattgaagagcagtataatgccggcgattacatatttcgggagcatgctgtacctcagttttactatcagatcgttaccggtgaagtgaaactgaacaggtatacagaagatggtaaagaatttatacagaacatcatttcagacaggacctgtatcggcgaatcgatgcttattctcgggaaaccatatcctgtgaatgccgtcgccctttcaaaatgcattatccttaagatcaggagagagcagttctttcagttgctgcagcagcatccacatatttttacggatatttattctgcacttgcggatattacctttgagaaatcaacgttaatgcacaccgttaccagcaaaaatgctgaagaacggctggttgaaattatggaattaatgaaagaatctcacgagaataaagataaattctcactggaaatcccgcatacccggcagcagcttgcctcactgaccgggctttccctggaaacggcaataagggcaatcaagaagctggagaaaaataatatcctgatgataaaaggcaggaaaatattttattaaaccgcacgttttatctgatgccacttcaatacattttggcttcaggctgtaattttaaattaaatactaccgtaaaatgtgcagtgtacaataaataatatatcacgtttaatctgacttaaccgactattcaaaaaaatagattcagatctctgaagtataatgatgatatctggattcagattatttatcttatccgcaataattaccggcggggttttcaacaaataaattttaaccgtatttttatacaattcttgcgtgcatctgcaaatgggtggaccatcattacgggctgttaagcaatgattaaatgttataaatccgcacctcagtttctcctgcagatccgttgaaattatttttatcataaatacattctttgtctctaatacctgtaataaataccggtataaagagaagttgttttatagcttaatcgtttagataatagatatttataaatatttttattcattatgacaatgatcataggatagggattacgtattctctagctttgatgtaccaattaaaaataatgatatgaaacggttaataacagcagtccgtatcacaggatttacaatgatggattgtacaaaagaaatacggtctgtaggaccaatcaatgcgcggacaagtccagctatggattcagttagtatgaatcccggacaggttcaggcagatattatgtccggtcccggttcatctttcggggcagaaagcccgctgtcggtcatctcagtgtagcattctgattttcttcaggagagatattaaaatccataatctccgaatattacatgtcatttttatgacatgcaggtagtttcatgcttaaaaaagaaccaaacgcatagtccggcatccaacagggagtatgtacatcactttatattaataacaaaaaagtaaatgttatgaacaacagaaattcaaacaacaggaactcaggaagaaactcatcagatgatgaacagtcaatgcttgaagaagcgtatcagttaggctacgaacacggttacagtgatgccagtgaagatgaagagtatgatgacgatttttctgattacgaagattacttcgaggacggggattatgaagaagatgatgataattatgatgacggggattatgatgatgaagactacgatgatgatgaggactatgatgaggactatgatgatgacagcggtaacagccgtggccgcggaggttccggaaacggcagtcagcagcgtgacagccagggaagatttgcttcaggcgggcgtggttcaggcggatctcagtcgcgtggaagatcatcttcaggacagggaagaggcggcaattcaggaagaggatttgcatccatgagcagagctgaaagaacaaggattgccagaatgggagggcaggcttcccatggaggcggaagatcttcaggttcaggatcaggatctggaagaggacgtggctccaattccggttccggaggcaatagaggcggttcatcgtcaggaggaaatacctcaggaagaggatttgcatccatgagtaaagccgaaagaacaaggatcgccagaatgggagggcaggcttcccacggaggcggaagatcttcaggatcagggtccggcaacggatcagaatcaggacgtggttccaattccggttccggaggtaatagaggcggttcatcgtcaggaggagatacatcaggaagaggatttgcatccatgagcaaagccgaaagaacaagaatagccagaatgggagggcaggcttcccacggaggcggaagatcttcaggatccggcaggtccggattcggaggcagacgtaattcatagtttttaccattgcctcctgttacaggcaggaggcaatcttttttaatactctcaaaacaaatccattatggcgactaaaaccaaagaaaatagcacagcatctgcagccgcagaaaaaacgcaggcaggcgatgcagccacaaccgcaaatgaaatgaaaaatgccccgctgcataagttctttgtggatgctttaaaagatatctattatgttgaacacaaactgctggatgcgctccagaccatgcatgatgcggcaaccacggaagaactgaaagatgcttttgaagaccaccggctgcagacccaaaagcacatcagccgcttagacaaagtctttaaactgattgatcagacccccgagcagaaaccatgtgaagccatggatggcctgattaaagagggagaagaaatcatcaggactactgaggaaggatctgcaacccgcgatgccgcccttattattgctgcccagaaagtggaacattatgagatcgcagcctacggcgggcttgcccagcttgccatcaccatgggccacaacaaagccgcggaccttcttgaaaaaacactgcaggaagaagaagagacagattataatcttaccgagattgcggaaacccatattaattttgatgcccggcaggaagattaatcacatataaccatgagaactctacgataaaaggatgttgtattgattcatttgtcatctgtgcggcaatacataaggaggaaggaataaaaataaatgacatacagcatcccgctatcggcaacaatcagcggggaataacaaaccagaataaataaacatacaatgcaattcaataaggcacttctcgaagaaatcagcgaaaatttcatgaactgccatgaaacgatttcaatagctgagagcgtaaccgcaggacttctgcagctggccttttcggaattgaacaattcaaaactgttctataaaggcggcataaccgtgcatacccctgataaaatggtaaggctgcttaatatcgatacggcagaaataagagacagcaacggcgtgtccggtatggcggtcgacaaaatgggatgccatgcctcaaggattttcgacagcgaatggtgtattgccacctccggctactgcaggccggaaaggcaatcggcctacgagatttatgcctattattccatttcatataaagggactgccgtgttttcagacaagctggaatttgacagcaaaaaagattctatgctgatcaaatcctattatacggaaaagatcctgcaaaaattcctcggccagctgaagctttaccatatcctcaaaaatgaaatgaacggagagggctaggttgttgcacgctgtttttaaaagagaaaagataattaaataaaacaacgatataatttgaatatgagatttttactgctggtctttctgctgttattcagtaccggtaaatcccaggaactgaatgcttcccggattcttgagacggcaaaacatctatttgaaaatctggatcaggtcatggtttcgaaatacggctttgagagagtacatgatattgaagaaacagatcagaaagtctataccaacaacagcggtgaagccggtaaacttatggtagtcaccgtgatcagaaacagtaccggctgttcaaacgtaatcagcattgttgacgggtcacctgtccgtattgagggattaaagaaggatttgcccgctctcggctacatttattccggcaggaagaaaatgccggatggcggtataaccgtatcgcagtttgtcagggaaaataccaccatttccataacggaccaggtaacgggcaccggagcctaccaggttgtactggcctgtaaacgcaccctttaaataaatagataaataaatgagtatatagactgatcattgattgacctcaataaaaacatacctatggaaattttagcatggatgcttgtcgggcttatcgtcgggcttattgcaaaatccaccgtaaaagaatcatccggccggggctgggtgctttttgtcattctgggcgtggcgggagccatggtcagcggatctttagtgaatatggcaactgtggacagccgggaaaatctcctgggattcttaccggttactgctccggtttcaggcgctgtggcggtactgctgattttcggggtatccgacaggtaccggtaattggttaatgctgatttaattgtcctgttgctgcattttaatttacagttccagcaaggctatcatttaaataaaaaaacaccaaaacatacatcattatgagtgcaaaaaataacttaaaccttacccttaagatctggcggcagaaaaacaggaagacaaaagggcagttcgagacctataaaatttcagacgtctctacagattcgtcattcctggaaatgctggatgtcctcaacgccaggcttattgatgaagataaagaacccgtggcttttgatcatgactgccgggaaggcatctgcgggatgtgttccctctatatcaacggtagggcacacggcccggataccggtgtggccacctgccagcttcatatgcgtatgtttaccgataaccagaccattgtcatcgaaccgtggcgaagtgtcgcattcccggttattaaagatctcattgtagacagaagcgcttttgaccggattatggcagcgggcggatttatctcggtcaatacctcaggaaataccctggatgcgaatgcgatccctgtagacaaagaggcggcagaagcttccatggatgcggcatcctgtatcagctgcggggcctgcgtagccacctgcccgaatggtgcggccatgctttttgtaggggcaaaagtctctcacttcgctttgcttccgcagggccaggtagaaaggaagaggagggtgctcaatatggtcaaaaccatggatgaagaaggctttgggcactgttccgtcatcggggcatgcgaagtggag

SEQ ID NO: 1743 - DNA, 19248 bp, synthetic construct
  source 1..19248: mol_type = other DNA
  misc_feature 1..19248: note = Synthetic
gaaccgtgtgacaggtgaccaccatgcgccagatccagtccgaggaacttgtcacccggattcaatacggtcatcagcacagccatgttggcctgggcaccactgtgtggctggacgttggcccactcagctccgaaaagttctttcaggcgttcaatggccagggtttcactttcgtcaactacctggcaacctccgtagtaacgctttccgggaaggccttctgcatatttattggtcatgcagctgcccatagcattcattacctgttcgcttacaaagttttcggaagcaatcagttcaatgccgttgagctggcgtttgtgctctttttcaatcagttcgaaaattttctcgtctctcttcattgttttgtaaagttaggagtcttcgaaaagaccatatattactgttaatttttttccaaaggtaataattgattgccagattctttgtttttttgaacaagtgcgtttcaaaaaataaaaatctgaaaacaattatactacagactattctctactggctattctctactggctattctctaatttctactcatcagaaaagtgaatcaatacacgtcggtaaacagagaatatttttgatttggagacaaagcccaggtatcgtccctggtcggtaaccgggaggttccaggcgcctgtttcttcaaattttcgcattacctgatccatattttcgctggcttcaatgaatgccgggggaacggtcatgaagttttccactttcattttatcgtagagttcgttgttaaacatgatttctctgatgtcgtccaaaagaacgattcccaggagtttgccatcctcatgaacaacgggaaagaggtttctgcgtgctttagcgattatttttaccatctcgccaagcgacatgtcaggatttaccgttttaaaatcagtttcaataactttattgagacgcatgagcgtcaatacagctttgtctttatggtgggtcagcagttcacctttttttgccagacgttttgtgtatatggagtgtggctcaaaatacatgatggtcagataggatacggtggaggtgagaatcaatggtatgaacaaggcatatccgttggtgatttcggcaatgagaaaaattcctgtaagcggggcatgcataactccggccatcagggctgccattcctgcaagggtaaagtgtgagcttgggagactggcccagcccagatcttttaatagttttgatagaaggaagcctgcaattcctcctgtgaaaagagttggggcaaaaataccccccacaccgccactaccgttggttgcagctgtggcaactatcttaaaaatgattagcaaaaggagaaagccaagtatcaccaggttgttctctttcagggtataaaagaatgtgttctcaacaatcacatccgtgttgccactgagcaaagctgatatggttgtgtacccttctccgtatagcggcgggaaaaggaatatcagtaaactcaaaatcagacctcctgtcagtaagcgtgcaaacgggttttttattttgaggattttcccttcggcgtacatgcttccccaggtcatgtaaagtgacaaaagcccgccaataacacccagaactacataccagggcagattgttgagcacaaattgctcttcgaggtgaaatgcaaattcggctccttcacccaggaaaaaggtggcaatggtggtagcggtaacagatgcaatcagaagaggtaccaccgaagccattgtcagatccagcatcagcacttcgagggtgaataccattccggcgataggggccttgaaaatcccggctaccgcacctgcggctccggctccgaccagaagggtgatggttttttggttgaggtgaaacatccgtcccagtgatgaaccaatagaagctccggtcagtacaataggggactctgccccgactgatcccccaaatccgatggtaaaggtacttccgatgatggaagtgaatgagttgtgcggtttcagatatccgcctttgcgtgaaaatgcatgcaatattttcgtgacaccatgactgatgctgtctttaacgaaatatttggaaaaaataacggtaaggaaaattccgatcagcgggtacgccaggtagagccagttttcatgctccatggtaaatccttctgtcagaagctggtgggtgaaatgtatggtgttctttagtattacggccgccaaaccgctgcccaatccgatgacaaaagacaaaaatagtgtgaaatgtttttgtgaaacatttttgacccgccatataagaaagcgtcctaatagttttgaagctgtttccatgaggacttccccaaaaaattaattgtgtgtaaaaaaaaatgtagatgtcagaatctgagtgcttcaggcctttttttgcctgattttcatttaatagcggtgcaaatgtaggcctttaagtgatgattttcaaaaatggggtgttaaatagtgttggcgaggggagacagttgaggcatagagcatggagcaaagagcagagggcttgggtatatggtaagagggattctggcattaccaggtattttccaatctataagtgaagacggatattgttttaactctgctttttataggtggaccagccccggcgggcggcagtttggtagcaattttgttgcaatgaatggaaaagccccggcaggggtgataccttgattaaatggattatgaatggtattttggtgatttattggagtcctataggcagaggtttttagttggaaagcagatgggagaagatagaaggcagaatggtttaaaaataaaagccctctttgctgcgaaatggttggcaaagagggcttgttatatggtttggtgttatgcttatttagtgtttgtccataaattaccatttactgcgttacgcttgcccgaaaattactcatttactcaagtaaactgcgtattttcgggcttcgcaagccttgtaactggcactttcttgacaaacacatgaccagaaccaaattttgcttagtttatggacaggcactatttagcagggatgttttccagggtttctaccagaaaatcccagaatttctgaaccgtttccacatttactttctcatcaggagagtgcgggaaattaatggtaggaccgaaagagatcatgtcccagttggggtaggcatttcccagaatgccacactccagtccggcatggatggcttttatttcaggtgtttttccccacttgttcttatagactgtttgcatggttttgaggatctctgaatccatgttgggtttccatccgggatattgcccgtcgaaccatacatgtgcgcctgcaagcaagaagatgctttcgagtgtggattcaacgtcttctttggcggtatccacgctggagcggataagtgctttcacttccacctctttgttgtgcgatttcacaatggccaggttcagagaggtctccaccagtccgggcatttctgtgctcatgcggataactccgttgggacagccctgaatggcattaatcaggtcgtcctgggtcatctcatccattacgaaatgtggtttttcagtatcttccagtttaagggagagatcaggttctacatttttcagttcgttgatgaagatgtttttatatccttccacagtctgttccacatcctttagtttgctttcagggatagctatgatggcaaaagcctcacgtgggatggcattacgtaaactgccaccctcaatggtggaaagtcgaacctgctcatgggctaccagatgtttcagaagtctgaaaagtagtttgttggcatttccacgttccagcacaatatccattccggagtgcccccctttcaatcctgtaaggctgatttttttggctatgtagctttcggggaactcttcttccatgtaggtgaaaactgcgttggcatccgttcctccggcacatccaacgtacagttctccttcatcctcagagtccatattgataaggatatcgccctgaagaatcccgggctgcagggcgttggctcctgtcatgcccgtctcttcatcaatggtaaagagtgcttccacaggcccgtgcttgagattgttactggccagaactgcaagggcagcggccacaccaatcccattgtcggcccccagagttgttccattggcttttacccagccatcttcttcataagcttcgatgggatctttgtcgaagtcgtgttgcttgtcactgtttttctggggtaccatgtccaaatgaccctgcaataccacgccttttgaattttccatacccgaagtggcaggttttctgataatcacatttcctgctttatccttgatggtctccagacccaggcgtttgccttcctgttcaacaaaatctatggcttttccttcatttttagagggtctcggtatttgtgtcagcttgtggaaataggtccataccagctgaggttccagattggcgatgtttttgttcatttttttatctgtttaaaggccccctaaatccccccaggggggacccggaaaagggctttttattaataatttggcttttgtagctaaagtttagggttacgggttctgggttccgggttttgggttgagtgtctgagtgctctgttagttatctggccatgagggatttggatttttgaaaagaagtcaggctggctaattttctcttaacctaaactttaatcttaaccttaacctcaacctaaactaacagcacctttcattaagaaataggtcatcagctttcatgcgtctgtcagaccattgattcgactttttggaatctcttatctattgactacaaactaaaaactactgactacttctctattctccagcctcttttatcgatcactcctgtaccctgatattcaaaatcgctcccgttgccggatccatttgcacgctggtgttgggattgtcgagcagtgaaggaggcatcgtatgcaaagagccaaactgtcccaatagcacgttttcttctgtgagcagcttggttctgtcaatcactttcactgttgcttttccgggtttgcaataaatcatgccggtacgttctttggggttaacctggattttgttgttttcagtggcttcatggtttaccacttcgatgtaaacaggtgttcctgtcatatcgtcaatttgggtaaagcctttttgtccggagaaccggaaaagtacctgattggcagatgtggtgatgtccggggtgaaggtaaatgtttttattgttgtctgcgtttgttttttgcccttgaaaagagaaagatattgctcttccatacgatccagcccttcaagaattcttcggtaggaaccttcgtcgggaggcaggttttttacgtcaccctcgagtagccttcttctggtttcgcgaatgtcatatattgctgcagcgacctcttctgcggtagctgcactggatgttttgataagttgttcttcagtgaatggaatgtcgttgaagtttatttcatcaaccttcttcgaagaatcattggttggttctgatgttttatggaatcctttgtcgaaagaagagttaaagcccaaaagggtgccgtcaggggtgaggttaactgctgcaccggcagggataccttgtgctgcgatgctgaaactcttttcagggtcggggttaccagaggtgaaaatgactgcctcggttatttcccagtattccctgtcctcggtgatgatgtccgaaagattcaggtatcgttcggaatatctgtagtaaggaccccgtttctctgttactttttgggcagttacttttatgttaacaacggtggttggtaaatgatagattaatttccctgatgatgcagttgttgaagcatcggaaaaatcggccttggaaacaaccctgggtgcactgcaggcccctaaaaaaaagataagaacaagaatagaaaggttggttatttttttcatttttttttgattttgctttagcctggatgattgacttcgtttcattccaaactcaaagttacgaaaattaaacagctcaaaggctatgaaatcatatcgaatatgggcaacaacggttgactacctgcaatttttactccgaaacatctctgaaagcttcctgaaggtggtcaatgatgtcagaagctataaggcctctcattccattgcgggcagcaaggtcgcctgcaagtccgtgaatgtaaactgcggcacgtgctgcatccaaaggtgcaattccggaggcgagtagtcccagaatgattcctgtcaaggtatcaccgcttcctgcagttgccattccggggtttccagtgggattgaagctgactataccttcaggggaaatcacagccgtgaatgctcctttcaatatgaggacaacctggtgtcgcccggcgaattcgatggctttttgcaatcgcaggaattcattgtctgactctccggccagtcgctcaaattccttagggtgaggagtaagaatggcattcgtgggaaggagtcgcagcaattcgggatctgcacttaatatatttaatgcatccgcatcaaggaccatccttttttcaccgtctgcctctaatagctcccttagggctctttgggtgttcacgcgggttccaagccccgggcctatgccgattgcctgaaattgtttgagatccgggtgttcggtaaacattaggtcggatcgatccacactcatcatagcttccggaatggcggtttgtaaaatggagaccgcgctgtgtggaacgtgggttgtcaataatcctacccctgatttcaaacaggcccttgaagcaagcaatgccgcacccgttttgccgtagctgccggcaatgagcagggcatgccccatggttcctttgtgagcaaatcgatggggaggcggtaatatttttctgatctcttttggggtggcaatgctccagggagttgaggtttttgcaattttttgcctgctcaaaccaattgggagtacgctccagtcacccgtaaaatctctgttttcggggaacagaaacgccagtttgggcatctgaaatgtaagggtaaaggtagctttaacaatgtttcccctttgattattactgttgtcctcacaaaacaaccctgatggcacatcaatggaaataattttggtaaaggagctgttgatgtgggttacaattttggctgccttgtcattaagaggtcggttgagcccggatccaaacaagccgtcaatggccacagctttcggctccactgatgccggcaattcttcttttgataaatctgtgatgaagatttcgggaatttgttgtaggcgttccaggttgatttgggcatctggcgaaaggttctccctcctgtaaaggtacgttttaaccctatggcctttatttatcagcattctggcaatggcaagcgcatcgcctccgttatttccggggcctgcaaaaacgctgaatgcagaggttgggaaatgttctgagatccatcgataagcctggtgtgctgctctttccataaggttaatggaggcaatgggttcatgggtgatggtgtgattatccgtttccccggtttgttgtgatgtgagaatttttatccccataaaatttttttgttaaaatcaatttggaaccacttcggtcctgcatggtattttatatattcctgtacttcatattggttgctgaagctgaaatgtgacaggtttagctacaagaggtttatggtaatcgggtttaaaaatatcttgccggtttcattcataatatgagaaataacacgttaaacttagcttacaaaatgtatttttgtaattgatctgttttcgcgcgaatgatttctgtggcgaaagcatctctttttcagcttgttgggttggggagttgttctttatttccaatcttgataggctttaatgaaaaaaagacaaaccaaaacagcaaattgtttgcgtaaaaattaataattttcacacttagaaatatcgatagcctgccggattttattgtgctccggatgaagaatttatcgatgatcctaaaagttaacaaaaaatagaacgtaaaaacaaataaacctaaattttaaaaaagaaaagaatggacacaccatcacaaaaacatccccagggattatgggtgctgtttttcacagagatgtgggaacggtttagttattacgggatgcgtgcacttttggtactgtatcttacatcgactattgtaaacggtggatttgcttatgccgagaatcatgcattggaaatttacggaatattcactggtctggtctatttaacgccgattatcggaggtattctggcagacaggctcatggggcaacgaaaggccattattattggtggtataataatggctctggggcaggctgcactggcctattctgagtatgtggtcagttccggtatttcccttgctcctgatgcactgcaggagttacgtgagtattggttgtttatcggtcttggtcttttaattgtaggaaacgggttctttaaaccaaacatttctacgatggttggccgtttgtatgccgatggcgatcccaggaaagattcagcttttaccatcttttatatgggtatcaacctgggggcgtttctggcacctcttctggccggatggctgggcgaaagtgttggctgggcctggggatttggttctgtatctgttggtatggttttgggaactatctggttctggcttcagcaggagaaactcggaaccatcggttttggtcccaagcgcacctttcagaccgataccgcaaagctgaatggtcgcgactggcttcacattcttgcctgggctttgggaataattgcattcatttatctgtttgttaaaacctggtggactattcccgaagaggctactacctggattatccgcattgttgccattgtttctattactgcgattgcttacattattataaaaaacactaccggaaagaccgaatggagccgaatcggagccattttggtgttctgtttcttcaacatctttttctggtcaggttttgagcaggcaggtggtacattcaacctttttgcgcgtgactttaccgaccgtatgattggcagttttgaggttaaagccagctggtttcaatcagtaaatgccattatgattgttggtctggcacctgtcttttccatgttgtgggtgtggctgggacgtcgcaaccccaatactcctgtgaaatttggtctcgggcttgctctcttgtcacttggttttgtggtgatgtatgctgcagatagccgtgctaccggttccaacctggtaagccccatgtggctggtaatggtttatctgttgcacaccatgggtgaactttgtctcagtcctatcggattaagtatgatcagtaaactgtcccctccgaagattacctctttgatgatgggactttggtttgcttctactgccctggccaactatctggcgggtgcattaaggggaatccttgaaaattatctgcccgatatgaacttgttcctcttcctggtgatttcttccggttcggcagcattgctgttgttcctcatttctccatggttgaagaaaatgatgcggggcatcgattagataattgttgattgttgatatagtaaagcccggagatctgtgaaagcaggttttcgggcttttttattgagggtttcacttcaagtgaagccctcaaattgttaggtgattgtcttttttgaatagttggctcgaaaagttcaagttttttaataaatttaaagattctgtattaagcgtgttggatacgaaaaaggatataaaacagaaggcgagagcaccagaggtgtcccgccttaaatgttttcacaacggaataatccttattgtgaattgcttcaaaatgtagtacaagtttaaaaagaaattatttaaaatacaaaactaaaataataaccctgaaaactatttgagatgaaacgcattttaggacttgaccttggaacgaattctattggatgggcactggtagagaaagatgagaagaaaaaggagataatagggatggggagtagaattgttcctttatctccggatgataaagatgagttttcaaaaggaaatactatttccaaaaaccatcggcgaactgtaaagcgaactcaaagaaaactttatgaccggtatcaattaagacggaatgctttaattgaagaattgaagaataaaaatatgatgcctgatgaagatttaatccatgtatcaaaattcaggctttgggaattaagaagtaaagcagtggaaacaaagctgactttgcctgaaataggccggattttattgcatctaaaccaaaaaagaggttataaaagtgccagaagtgaagagaatcttgataagaaggatacagagtatgtagagaaagtaaaaaacaggcatgaggaattaagagatgcaggccttacaatagggcaatatcttttaaaggagttgaaaaaaagtgaaaattttaggacaaaagatcttgtttatcccagagaagcatatattgaggaatttgatagaattatttcgattcagaaggggtactaccctgaagagctttctgaagactttattcaacggataagaaatgaaattattttttatcaaagagctttaaaatcccaaaaggggctagtatccatctgcgaatttgaaggtttctggatggagaaggagggtaagaatctatacgttggccccaaagtggctcccaagagctccccgctttttcagattgaaaagatatgggaaaccattaacaatatccgtctcaaagacaaatatggtcaacctattgtgttagggataagggagaaagaaaaattatttaaggttttaaatattcctggtgccggaagcgaggattttgataatttttcaaaatacagcttagatcggaatggcaaattatcttattcgaagttattgaatctacttggtttatctaaggatgatgtttatgcaaataaacaacttgaaaacggtattcagggaaatattctccgacaaaaaattttgaattgttttaataatccggatgagttttctgaattacttcgttttgacatttcatttataaaaacagataagaaagttcatctttatgacagaaaaaccggtgaagtaattcatgaggaaaaagaatctattattgcaaataaagccgaagatatcgagaaagagccactttatagactatggcatgtactttattccattaaagacagagaggaatgtgagaacatattaaaaaagaaattcaatattcctcctgactcagctgaaaaactttctgcattagattttactttaatggcatttggaaataaatcggtgcgagcgattaggcggattttgccatatctggctgaggggtatgactactctgaatcatgcatgttagcaggatataatcattctaattcattgacaaaagatcaaaatagagatcgccaaatagctgaaaggcttagtttacttgaaaaaaatagtttgcgtcagccggttgtggaaaagattttgaatcagatgattaatttggtaaatgcagtaattgaggaatatggacatcccgatgaaatacgtattgaattggcccgggaattaaagcaaagtagacaagagcgatttgatgcagataaggcaatcaggaagattgaaagggataatcagtcaataagaaaggagttggtcgaaaactatgccttgcgtgcttccagaaataatgtcataaaatggcgcttatatcatgaaatgaataatcaaaagttgaatgcgatatgtgtttattgtggacaaccaataagttttaccgatgccattaaaggaaatgatgttgatattgagcatattattccgaaagcgaaattatttgatgattctcaaagtaataaaactttatctcatagatcatgtaaccggcaaaaagacaagcaaactgcctttgattatatgaaaactaaaaaggaggatgaatttcatgagtatattgagcgtgttaattatttgtataagaataggttgattggtaaggcaaaacgcgataaacttttaatgtcggaagataaaataccacaagattttattcagcgccaattgagagaatctcaatatatcgcacgcaaatctcgtgaaatacttatggaagtttgtcatgatgtttggacgacaagtggtactgtaacagcagaattacgtcatatttggggctgggatgatgttttgatgaatttgcagatgccaaaatacaagaaatatgatttaactgaagaaattgaatttgagaataacgggcaaaagcataaaaaagaaagaattactgactggaataaaagaaatgaccatagacatcatgctattgatgctttaacagtggcttgtactgaacaaggatttatccaaaggcttaatacgctcaattcgggcaagaccagaaacgaaatgcttcgtgcgattaatgagtttcaaaagaatgcttcagaggttgataacaaaagaagtgaatttgaaatagaaaaacgaaagttatatcaggattatctgtttgtaaataagccattttccacaaacgaagttgagcaggctgcatcgaaaatcatgatttcttttaagccaggtaaaaaagtagcaacatggggaaagaggaaggtaaaaagaaatggacgaaaagtaactgttcaatctgatattttagtaccaagaggagctttaagtgaagaacaagtttatggaaggattaaagtactgaaacgagaaaatccagttaaatttttatttcataatccccatttaattgtaaaggagagaatcaggaagaaagttcaaaagcgattaagtgagtatgatgacaatccagataaagctttgaaaagcctggaaaatgaacctatctacataaaagatgacattcttttggaatgggctagctgttacagtgaagaatacgtgtataagtataaagttgatgttgattttaagaaagctgacaaaatcattgatgatagagttagagaaatagtaaaacagcgtctttcagagttcgataataaccccaaagaagcgtttaaagatttggatggaaatcctatttggtttaatgaagagaaaaatattcctataaaatcagtgagatgttttacaggtttatcaagtatcgaacccttaaaaaagaatgcaaacaatgaagtgaccggatttgtaaagccgggaaataaccatcatatcgctctgtatttggatgaaaacggtaaactgcaggaacatatatgtacgttttggcatgcggttgaacgaaagaagtatgatattccggttataataaaaaatacggatgaaatttgggaaaaagttctgtctgaaggagaagattattttccggatgattttcttgagaaactaccggatataaaatggcaatttgttaccagccttcagcagaatgaaatgttccttctggggttgccagaagagaatgtaagacaaattaatgttaatcaaaaagacaactattcttttttgagtgattatttatatcgggtccagaagattacttcgggcgattatgttttcaggcatcatttagaaactcaaatagttgatacgacagattcgaagctttgtaaacgttggtatagagtgcaaagcttgaaggcttttgcaggtttgaatccggtaaaaattcgggttgatgttttggggcggatggtctggtatcaaaaatgtttctaaatggctttacttgatagtcagggcttcactccaagtgaaaccctgactaaagaaaaacctaacccaattgatctggaagaaggaaaattgtatcacatctacaatcagggcaataatcgtcagaaagtttttatgaacagggcaaactatttattttttctcaaaaaagttcgcaatcacattgtgcctcatgcttatattttggcctggtgtttaatgccaaaccactttcatttcatgatttatgttaataagattgagattgtcgtcggaaaaattagtgagggcttcacttcgagtgaacccctcactaaattacctcaaaaacgtactatgaatgagtccataggagtaatgataaaatactataccagagcaataaatatgcaagagcaaacttccggaagtctgtttagaaagaagtcaaaagctgaatgcttaaatccctcggatggtattactcctgcatttttcaattcaaactcagggacactgatgaatgtttgcaacttgacgaaaagaatatcctcaaatctgttttgattatattcattataaccctttgacttctaatttcgtatcaaatattacagaatgggaattttcttctgcccccgattattactcaaatagaatgggaaggttgataaataagaaaagagccagggagttcgggatttgttggtagaggttaacatccttttcttaccatcaatagtgagggcttcactcaaagtgaaaccctcactagttggactgggatgtcaatcaatacttctatctatgataaaaaagacactttattttggaaatcctgcctatctgagtttgcgtagcagccaacttgtgcttaatctgcctgatgccaacggaatggatgataaatcaggacgtaacaccattccaattgaagatatcggtgttgttgttttggatcacaggcagattactattactcatgctttgatagaaaagcttgtaagtaataattgtgcaattatcacctgtgatcagtcacacatgccgcaaggattgttaatgccgctttccggaaactctgttcagggagaaaggtttgctcatcaattatcctcttctgttcctctgagaaaacagctttggcagcaaacagttaaagccaagataaccaatcaagcaatcttgttgaaagacgtacggtcgaatgtaaatactgataatatgcatcactgggcttcctgcgttgcttccggagatagtgaaaatcatgaagccagagcagcagcatattactggggcaatatttttgatattgataactttaggaggggcagagaggagaatccgccaaataatttactgaattatggctacgccattttgagagccattgttgcacgttctttagttgcttccggactcttgcctacggtaggcattcatcatcacaatcgttataacgcctattgtcttgctgatgatattatggagccatatcgtccattcgtggataaggtggttttgaaaattattgattccggactggattattccgaattgagtaaggaagtgaaatggcatttgttgagtattccgcagacagatgtgttgattaatggaaaacgaagtcctttgatggtagcagtatcacagactaccgcctcactttatagttgttttgagggcagtagccgaagaatttcttatccgcaatttgaaaattgatatgaatcgccttaacgaatatagagttatgtgggttatggttctttttgatttgccgacagaaacgaaaaaagaccgtaagatatacagcactttccggaagaaaatgctgaatgacggttttgtgatgttccagttttctatttatatccgacattgtcccagccgggaaaatgcagaagtgcacatgaagagggtgaaaagttttttgcctcccaaagggaatgtggggattatgagaattacagacaaacagtttggtgatatggagctgttttacggaaaagaaattaccaaaaaggaaactccatatatgcagttggaattgttttaaaataaaaaagtccggcgaaccggacttttttattgaaactgacagctcattttttgattctaaattcgtgagtaatttgctgatgcatagtcgtttgtttcgaggtctgctgtcagcgctactgcaaagatacattttgaaagcaattcacaacaagccgtctcacaggactctccctggtaaggctgtcagcgctactgcaaagatacattttgaaagcaattcacaacctattacaagcgtgactggtacgacagaatgctgtcagcgctactgcaaagatacattttgaaagcaattcacaacgacagaggactttgttgatgaagatagcgggctgtcagcgctactgcaaagatacattttgaaagcaattcacaacggaggatgaaggcagctttttaattgaaatgctgtcagcgctactgcaaagatacattttgaaagcaattcacaacgacctggctcaataagatattcgacaacaagctgtcagcgctactgcaaagatacattttgaaagcaattcacaaccattaacaaccagattcccatccatgatgggctgtcagcgctactgcaaagatacattttgaaagcaattcacaaccaggctattacaggggttacgggaaaagaggctgtcagcgctactgcaaagatacattttgaaagcaattcacaacaagaacttacaggcaaccttaacgaagcaggctgtcagcgctactgcaaagatacattttgaaagcaattcacaactcagtcagagaaagactatttaagacggcagctgtcagcgctactgcaaagatacattttgaaagcaattcacaactacgcttgaacaacaggcagctaaagcgagctgtcagcgctactgcaaagatacattttgaaagcaattcacaaccgtaagtgtgccattgtcatataccagactgctgtcagcgctactgcaaagatacattttgaaagcaattcacaacccagaacttctccgacatcggaacggttgcgctgtcagcgctactgcaaagatacattttgaaagcaattcacaacggttacagtgcaattaaccggtgaaggtgagctgtcagcgctactgcaaagatacattttgaaagcaattcacaacaaaacctatctgtaaacctgttttattatgctgtcagcgctactgcaaagatacattttgaaagcaattcacaaccgaatatgtccccttttggaggtgtagtcggctgtcagcgctactgcaaagatacattttgaaagcaattcacaacggatgggtcttggctgccgtatcttgctgtgctgtcagcgctactgcaaagatacattttgaaagcaattcacaacaagcaaaaagctaaaataaaatagatgcaagctgtcagcgctactgcaaagatacattttgaaagcaattcacaacttgttgcttatcgttcttgaatagtgtccagctgtcagcgctactgcaaagatacattttgaaagcaattcacaaccgaatgggatgaagagaaaaaatcatttgagctgtcagcgctactgcaaagatacattttgaaagcaattcacaactgatgtgtgcggtgggaataagataatacgctgtcagcgctactgcaaagatacattttgaaagcaattcacaacaacgacatcgaacgtattgttttaaactatgctgtcagcgctactgcaaagatacattttgaaagcaattcacaacaaactctcctgggttattcattttctctttgctgtcagcgctactgcaaagatacattttgaaagcaattcacaaccacacaaggtagtcttgcctctaaaatagggctgtcagcgctactgcaaagatacattttgaaagcaattcacaacatgccgtagtgccggcaattacgacagtttgctgtcagcgctactgcaaagatacattttgaaagcaattcacaacaggtagtgtctgacattgtgacaaaaaaaggctgtcagcgctactgcaaagatacattttgaaagcaattcacaacccggaataccttttcatggttgtaatatcggctgtcagcgctactgcaaagatacattttgaaagcaattcacaacctgttgaaattatttccggcaatgtcaatggctgtcagcgctactgcaaagatacattttgaaagcaattcacaacgtttatgcccgaaggccttgccaacagaatgctgtcagcgctactgcaaagatacattttgaaagcaattcacaactaagtctgaccttgctttcgtcttcgtgtggctgtcagcgctactgcaaagatacattttgaaagcaattcacaactgcctttgtaggatctcttcgattatttcagctgtcagcgctactgcaaagatacattttgaaagcaattcacaactcttgtatgtaccaatagacttttgtccaggctgtcagcgctactgcaaagatacattttgaaagcaattcacaactaccctctacccctataattctcggagcatgctgtcagcgctactgcaaagatacattttgaaagcaattcacaaccgacctccctgagcggccactcatttattgctgtcagcgctactgcaaagatacattttgaaagcaattcacaacgtaacccattattcagctttcagaaaatgagctgtcagcgctactgcaaagatacattttgaaagcaattcacaaccaaaagccttgaccgattaaacgtgctactgctgtcagcgctactgcaaagatacattttgaaagcaattcacaactaaatggctgactgggcataagtgtaaggcgctgtcagcgctactgcaaagatacattttgaaagcaattcacaacaagaagatctaaacgccatgggtggcatgggctgtcagcgctactgcaaagatacattttgaaagcaattcacaactaccgctttcacgttatcggcaaccctaaggctgtcagcgctactgcaaagatacattttgaaagcaattcacaacaactgttcattaagtgataatatgtattgagctgtcagcgctactgcaaagatacattttgaaagcaattcacaacttttcttcctctgctttaattctggcttgtgctgtcagcgctactgcaaagatacattttgaaagcaattcacaacctacaccccggaagttgacagaataggttggctgtcagcgctactgcaaagatacattttgaaagcaattcacaacgcgagacgggagagatgcagcacgagaatagctgtcagcgctactacaaaggtatccgccccagcaaatacttattcctgaagcaaacttttgtcaataaattgcggcaaaagttctttgaaattttcggcaggtgtaatgtggat

SEQ ID NO: 1744 - DNA, 18746 bp, synthetic construct
  source 1..18746: mol_type = other DNA
  misc_feature 1..18746: note = Synthetic
  variation 16016..16017: note = n is a, c, g, or t
gagattgggatattgatgtttggcaattaaaaaaacaccttcaagtaaatcatgttcttccgatttattccatttgtccaagctttgtttcacaaagttgaattgaatattttgaataatattttcgattcgctcctgaaaaagttcgttcaacgaagattcccaagcatcttcgagtagcggaattatgtcagaaccaagtttaatcagtttactactaacctcattgaaaataaaatcatcagggtcatctaacaaaccaattaaagcttgaactggaatatgttgtttcattaaatattatacagtaattcggtctaaaactaatttaatcaattgcttaaccacaattttataatctttgctatattcttttcgcattcggttagcaataatcgcacataaggttacggcatcatgtcccaacattttacctaagccaaaaattgcagaactttccatttcgtagttggttatttttttaccatgccaatcgaaattttcaatcttcgaattaagattattatcttgtgtttgaagtctaataattctaccttgaggtccgtaaaatcctggtgaagcaatagttatcccctctcgaataccttccgataatttattatataatttttcagaagcatcaacagtatatggtgcggctaattgcttattccaacccacatattcagtaaatgctttttcaaattccaaatcacaaaatttgtctctatcggcataaaaatttaataagccatcgaatccaattgcttttttggtaatgatgtacgaatcaactggcatgtctggttgcaaagcaccagaagttccaattcttataaaatttaattttgtatgtttttcttttataactcttttttcaagatcgatatttaccaatgcatcaagctcattaataacaatatcgcaattgtcggtaccaattccggtagatgtaacggttattcgttttcctttgtaagtacctgtatgagttacaaattcacgatttgctgctttcacttcaattttatcgaagtaatcagagacagtatccactctaccagggtctccgactagaataattgtgtcggaaatttcattcggctttaaatgtaaatgaaatatgcttccatcactatttaaaattaattctgattctcctatttgtttcattgtcaattatgtttaaatttgcaaagtattttataataatcattcaaatctatttaaaaaaaatgaaaacagcaactaagaacatattagtacctcttgatttttcaaaacaatcgttaattgctcttgaacaatcgtataatttagctcgtttatcagactctgaaataacgcttttacatgtaattagagagaacaatgctattttcgggttattttctgaaaaagaaaaagaagatgttattataaaacttcagaacaaactcgaagaatttgctagaatcgcaacacaaaagtcaaatgttattgttcatactttaatagcaaaaggaaatgttgtagaacaaattcttgaaacagctgacacaatcaatgcaaaattcattgttatgggttctaataaacccgataatatgatgaaaaaagtgattggaactactgctcttaaagttattagagaagctaaatgtccggttatcagcattgaaggaaaacatcatcgcgatggatgcgagaatattattttgccattagatttaacaaaagaaactactcaaaaagttgcccacgcaatgaattttgccaaaatgtttaaatcgaaaatacatgccgtttctgttgttacaacaaaagatgattatttaattagcagactcgaacttcagttggaacaagtaaaaaaattcatcgagaaaaatgaaatcacttgcgaaaccaaaatgttgaaagtttcgggaagcaatgaacaaatatcaaataacattttagactacgctaacgacaaaaaaggagacttaattgtaattatgacacaacaagaaaatgaaattgtacaatattttgtcggctcacttgctaaagagattattcacaaatgtagaattcctgtaatgagtatcgtaccaaagaaaaaataaaatttcactctatcttttttaaaacaaaaagctcaaatttgctaacaaatttgagcttttttattttttttaaaatcaaatagaaattgattttaaaatccctttttcagtgattattcctgttatgtattttgcaggagttacatcaaaagccggattagaagcctcagataatggggaacatacaagtatattatggagttttccatgctcatcaattcctgattggtacaacacttcattttggctacgttcttcgattataatatcagttccagttttgcagtttatatcaaaggttgaacttggagcagctacgtaaaaagggatgttaaattcctttgcacaaatagccttttcaagtgttcctattttatttgcaacatcaccatttgcagcaattctatcagctccaacaataatcatatcaatcatacctttcgacataaaataggctgttgcattatcgggaattattttatgtgatactttttcgtttttaagttcccaagctgttaatctagcaccttgacctctagggcgagtttcatctacgtaaacaaatggatttttacctaatttatgtgccaaataaattggagaaattgctgttccgtagtcaacaaaagccaaccaaccggcattacaatgtgttccgattttcatatttggtttaatcaattcatttccatagattccaatttgttgacaagctctaatatcttcaattgcgactctttcagcttctatgatagcggcttctttcgaaattagagctgcattgtaaactcgcgaaataccataaaataaattttgagctgtaggacgggtattttcaattctttttctagcattttcgataaattgagtgtaatttttatcaggggcttcgatagccgcttgagccattgcatatccagctgttgctcctattgcccctgctcctcttacaatcatattttcaatcgctaaacaagtttgcagataagttttcgcttcataaattttgaattcgaaaggaagtaggttttgttcaataagaaaaaccgaagaaccactcatccaaacggttttataatttttacaatttactaacatttgtggcgtgagttttcaaatactttttccaatgtttcaaaaagaactgatgttttaataggctttgagacataagccgtaaaacctgcttgttcaatctttcttttttcttcagccattgcttgtgcagtttgagctacaatcggtatagtttgatttgtttttcttatttcatttagcgtatcataaccattcaatctaggaagtaaaatatccattaaaatcagatctagctttgtatcatgacaaatttcaattgcattatatccatcaacagctctaattatttcaacttttgtctttcccaaaatctctttcattagtatgaaatttatattatcgtcttcaacaactaatattttttttccgctccaatctgggataattgtcttttcgatattttggatattattttctatcgaattttcaataatattcggaatttcgaaataaaatgtagtgccttgttttataactgaacttaaccaaattttaccaccgagaagttctgctaaatttttactgattgcaagtcccaagcctgctccaccgtatgttctatgctgagactcatcgacctggcgaaaacgttcgaatattatttcttgttttgctacatgaatcccaattcctgtatcttttacaaaaaatttcagtgagttattattaactatttcgtacccaaactctattttcccacgatttgtaaattttaaagcattgctaagtaaattataaaatatttgagccaaacgtgtttggtcagtgtttacaaaaagaccttttgtagtgccgggcgaataaattatctctatttctgatttgttttgtctgttcttatcatctgaaaattgtttatgaatttcattcattaactgcgataataaaaattttgttttgttgatttttagttgtttcgcttcaattttagaaatgtcaatgatgtcatcaataattttggtcaaaacgttacaactgttacctatataagaaatatattcttttttttgttcttgctgtaaatcggtatctttgagtaattcggcaaaaccgagaattccattcatcggtgttcgaatctcgtgtgacatattctccaaaaacgtggatttaagtttgtccgactcttctgctctttcttttgcttcacgcagaatatcttccgactgaattcggtaaattgccaacgcaaaaatatcggctatttgttcgatattttcaatatcttcctttgtgtaatcacgatttgaatttgctaaaataatttgcccaattaattttgcttcgataaaaattggaaccgttaaaaaattgcgaatatcaagctcaatatcttgattttcgcaacttaaaaaaatcttattcgataggttattaaacgaagcctcgctattgtaaagattatcattgcaaatacatttttgctttgagtttttagagtgttgatttaatttaatttgtgtaaaattattattttcgtcagagttattaaaaacataagtaatgttattctctaattcgtgattaattaacgatataaaaccgaacttactttcagtaatattcgatgaattttcaaggatatagttagctattgaacttattgaaagcgaagaagaaagtaatttttttgaaataattgccaatgttttattaatcaatgcttgcttttgcaattttttctcataaagttttttgtgtgtaatatcgttaaaaatagttacaaattttccatgctgtggactatatgcaattacttccaaatacttatttaatagttgagaatactgttcgaatttttcacttgctcctgttttagatacttttccatatatttccatccaaaagtcttcaacttttccttgttgaatttcaataaaagtttttcctattatattttctcttttaaatcctaaaatatcttcaaaagctttgtttacttcaatatatcggcaatcaataggtttattttcagcatcaaaaattacatcatgatacgaaaaaccacttgataagtgttcaaataacaatcgatactctttattttgaatggttggagaaccagtattgctttttagctcttcgagcgttttttttaaatgcccaagttctttcagcaggtcttcaatatttatgttatcgttgtttatcataaagtgaaaccttattctttgtaacaataaaattcagtttacggttttaattactcgaagtttcaaaaaagtggtaaaaaggtatgagtttgccctttgaactataatttgttttaacaaattttgaaatgtagttgttgatttctttaaattcaattgcattgttttgatttacatcgtgctgatttgaaatgcactgtttcagcaattcagatattgaattcgttgtattactgaaacttaaaatcgaaaattgtattttcttgtcaaacaacttaacaaaaatatattttgccaactcctctggaagagtattttcatattctttcaaatcactagggcttccagtattgtttagtaaaaagaaaagattattgcttttttttgataatacgtctaataaggaatcaatttgataaacagatgtttcgaaatcttttaaaccagcatttggtaataaaaaatattgtttattcatgttttttaaaaaaatacctgtcagcgaaacaattataacatcgttgcttgaaataggttgttccaacatcttaaattttgtgtttaaagtagtaggtgttaaattttcaatttcaggaaatccataataacttacatttttaaacaaaacacccttttgcttgcttaattcggtctgaatatctaccgaatttgtttgtgaaaacattttgttcatttttttatcggtgtagcctattggatttatgtcaaagaagaataaattagatattttagcgtaattctgaagatttgaatacgtgataaaaaaaggtttcgagacataaaactcagcatgattatttttatctgcataaatttgtatttcgttttcgtcaggaaataaataaatatcaaaagtcaactctaaatatccatttcctaaatctttaacaattggagggttgggtttcttttcacttccatcgaacttgaaatgttctttcttgttgacataaactttgtagttttcgaaccccaaattttttacttgcaattttaatttgtaatctcgttcataaagttctaatccattttctaaatgcttcgaaattttaaatatactagtatcgttctcattaaacgaaagtgtcggtattggtctctttgtactcgaaatatttaaatcttcaacatcccaaacacgaatcgttttatcagcacttgcacttactaatatttttccattcgggctaaaagcaaccgatttaatagtaagttgatgtccggtaagagttctgatacaaattcccttttgaatatcccaaattttgattgaaaaatcgtttcctccacttgcaagatatttcccatcgggactgaatgaaactgaataaacaccatcggtatgtccgtttagtgtttttgcaagtttgtttgtttgcgtatcccacagtttgattatattatcatttcctcctgttgcaatgaattttccatcagggctgtaactcaacgcttctattggatatttatgtcccttgaacgaaaaaacttcgtaaccgttagatatatcgtgtattcttaaatataaatcgtatccaccgctggctagaaattttccgtcgggactgtaatcaatagcccttatacattgtgtatgtccttgtaaacgcataagttctaagcctgtgggttcgtaccaaataattatttccttatcccaaccagcacttgctataaattttccagtaggcgaatagcttgccgcacgtaatgatttttcgtgaccattaaaacgtcgaataacttctcctgtatttatgtcccaaattttaacgctctgatcccaacttccgctaactaaattttttccatcggggctaaatgaaatagaaacttcacctgagacattatcgtaaagtgtgcttaatagttcgcccttatttatatcccagattttaatttttttatcggcaccaacgctggctaatttttcgccatcaggactgaatgcaataccaagtacaggcttatcttgccactttaaaaatttctctttggtttgagaaaaaacagaaaaataaatcaagaaaaatataatctgaataaaaaatttcatattgtcccaaatagggcactaatttacctaaaaaaagcattaattaaacagaatatttgactaatttaaaaatacgataatacaatcgaacttgaaatgaaataagcagctaaacttgagaagaataactgcttatgattgaccaaaatatgtagattaaaagaggacttaatttaattcaatttctccaaatttgctatcaatagttatcttagctgtcgtatttatatcgggaccaaatttccctgaaattttttttccttcgccgtttttaactatattcaaattatttcctccatcaaattcaatttcgcaatattcaactgtggcatcgagattataagatatattttcattcaattccaagtcaattgttccatattcatttataatctttatttctttaaattcaggtgaaatttcttttacttcaaaatcgccgaattccatatcaagttctaatttgttgatgattttttgaacttctatatccacatatccggcattcaatacaagattgtttacagttcctattttgtaactatcgaatttcgagtcgcaaattaaagaacttacatttttaattttaacatctgaataactcgataaacttataattgccttacactcgtcgatggataagtctccaaaactcgtcaaaaattttgcccaagtacacgttccaattgaaacatttccgtatgaagccgaaattgtactcatcggttttgaatcatcaaacatcagtttattcgctctaaaatctccaaattggacatcaaaattcgatttcccgttgtgttcgtttatgaagatgtcgccaaatttattttgcacttttaatttcaagtaacggggtaaactgacggtgtagtttatttcaaaattttgttctcctgatttatttttattgcgtgattcttcaataattgtttcgatttttattaaactttcaagttcctcaattttaatgcttattttattgagaattgcgtcagccttttcttttttcaaatccttaacgattattaaaacttcaagattaactgagttcttttcccaatcaatgaaatcaatttttccaaatttattgtttatatcaagtaatgtttgttcgtttacaagaaactcttgttttactgttttgctaaaaatttcaccttcttcggaaaataagttgttcgtgctcgaaaatattacgagccaacataatagtattgttttataattcaatgctttcataatttttttgttttttagtttcaaccatttttaattttgataatatattgtcaattacatgtaatttggtttgatagtgcactattaaagcacttataattctttcgtcatttggatttgcttttagttctttttctaaatattgtttaacagtatccatttgatgaagttcgcttaacaatatttctttttccaactcgctttccaaaaaattcatgtttttgatacttgatattttgcttgcaattttcgatgtataatacacttcaacctcatttagttctgaattacatactatgaattgtgtttgtttctgctctggaatcagatgctcgtaagtccacaatgacgataatgctatcagaatcataattgatgcagcctttgcatagaaaaaaatatttcttttttttgtatttcttttttcgagaattttcgagaatctcgcaaaatgtttctctgacggttcttcactatcaaagagttcacgattattgtttattatattgtttaattctttcatttataaattaatttaatagctgaattaattttcgtttcgctcgcataaactgacttcgtgaagtcgcacttgttatgtttaaaatttgacttatttcttcgtggtcgtaaccttcaatcaggtttaagctaataataattctatacccattaggaagtgaattaattgcttttttaattttttcgacttgctgatttatttcaatttgattcgaaaactcatatgtctcatattcaacacactcatctgtatttatttcatcgaaggaactgaatatcttgttatttcgaagcgtgtcaatcgatttgttcactacaattttttttaaccaagcaccaaaacttacattgcctgagtaatattcgattttatcgaaagccgatagaaatgcttcttgcataatatcttcggcttcttgagtgctatttactatacgcaaacttgtattgtacatgcttttataatagagtttataaatctcgaattgggcttttttatcgccacttttacacttatcaataagtgtttgatgtatgttttgataattgttactcaattcaaatctatttttgatacaaagactctaaaaaaagataagtgctgcataaaagtaaaaaaaatatttccagatttgcttgccgagtatttacatatctaaaacatatcgcttttaaaaaatattttatacatttataaaataaaaaaagcgagtcttttgaacccgctttaaatgttttcacaacggaataatccttattgtgatttgcttcatttagtatgacaaatgtaattgaaaaatagataaaacaaaaatattatgaaaaagattttgggactcgatttaggtacaaacagtattggttgggcattggtttcggagaatgaaaacaaaaaagaaataattggaatgggaagtcgaataattccattaagttctgatgataaaactgaattttcttcaggaaatacaatctctaaaaatcaaaaaagaacagaaaaacgaggacaacgaagagggtatgatcgttatcaacttagaagagaagcgttaacggctgaactaaaaaagaataatatgctccccgatgaaaatttaataaaactaaagccattggaactttggggtttgagagaaaaagccgtaaatgaacaaattacacttaatgaatttggaagagttttatatcatttgaatcaaaaacgtggctataaaagtagccgaagcgatgctaatttagataaaaaagataccgattatgtaaaagaagtaaaaggcagatttgaagatattaacgaacaaggaattactattggtcaaaaattttatgctgaattacaaaaaaatgaatattacagaataaaacaacaagtttttccaagagaagcatacattaaagagtttgagaaaatttgtgaacaacaacaaatttattatccgtatattattacaaatgagtttgttcggcatttaaaagatgatgttatttattatcaacgaaaacttaaatcacaaaaaggattagtaagtatttgtgaatttgaaggattttatacaaaaacaaaagaaggaaaagaaatttttgcaggaccaaaagttgctcccaaaagttctccattatttcaagtttgtaaaatttgggaaacgattaatactattactttaaaaaataaaaaaggagaaatattttttatttcaattgaaaagaagaacgaaatatttgaatatttagacaacaacgaaaaactaactcaagtaagactttttgaaattttagaattagataaaaatgacggctggagtggtaataaacaaacagctaagggattacaaggcaatatcactaaagcgttaattttgaatgcgataaaatcttcaaaatttgacgaacaacatatacaatttaacttaacagttgatgatttagataaagaatgttatttagttgatagaaaaactggcgaaattcttgaaacaaaagttaagaaaacaatcaaaccaaatattgaagaacttccattgtataaattatggcatacaatttattcaatttcagatgatttggattgtgtgaatacactgattgaaaaatttaaaattaacaaagaaacggcagaaaatttggctaaaatagattttgtaaaatttggatttggaaataaatcagtaaaatcaatgagaaaaattcttccatatttaatggacggatatgtttatagtgatgcttgttcttttgctggttataatcattctaactctataactaatgatgaaaacttaaaaagaaaattacttaatgcaattcccaatctttctaaaaatagcttaaggcaacctgttgttgagaaaattcttaatcaaacaattaatcttgttaatgaaataattgatgagaaacgaggatggataacaagacaagaaaggttaaataataaatttgaaatccgcgttgaactttcgagagaactaaaacagagcaaagatgaaagaaatgatacatcaattgcaatggaagccaacaaaaaaattaatgaagaagttaccaacagattgaaagggctaaacataaggacaagcaaaaggaatattgaaaaatacaaatttatttttccaataagaactctttataataaagatggacggtttgataaaaaaagttttgaaaatgctcaagcatttaaacaatgtatatattgtggtgaaagttttagtataacagaggcaattaatggcgataattttgatgttgaccatattattcctaaatctttgttatttgacgattcccaaacaaatcgtgttttagttcatcgcaaatgtaatgctgacgataaaaaaaataaaacggcttatgattttataagagcaaaaggggatgaagaattaaataagtatctagaaagattagaaaattggtataaaaaaggaattttatcatattcaaaacttgaacgattaaaggtttctaacgaagattatgttgatagaaaaagaaaaggaaaagaaacggattccgataaaaaactttgggaaaattttaccgaacgtcaattacgggaaacacaatatatttcaagaaaatcaaaagaaattttagagcaagtttgttataatgtttggagtacaagtggaagtgtaaccgaacatttgagaagaatttggggttgggacgatgttttaatgaatttacaattgtcaaaatatcgtgatttatcagatatgatttatacagacgaatgggaaacaaatgatggtcagattcacaaaaaagagaaaataaaaaattggagcaaacgagatgatcatcgacaccatgccattgatgcactggctattgcttgtactcaacaaggatttgttcaacgaataaatacgttaagttctcagcaaaacagagatgaaatgtatgcagaaattgagaagcaaggcaaagaatttaaagaaaaattaaatttgcttgacaaatatttgatactccaaaaaccttttacaactaatcaaattgaaaaaaatgcgtctgaaatattagtttcattcaaagccggaaaaagagttgctacaataggtaaaagaaaagtaaaaaagaatggaaaaaaagaagtggtgcaaacaggaattattataccacgtggtcaattaagcgaagaaagtgtttatggaaaagttaaaacaattgctacagatttaaaaacaaataaaatcataaaatatactccaaaatatttgtttgaaaattcacatttaatattcaatccaaaaattaaagaattggttgaaaaacgattaacaagatttgaaaatgattccaaaaaagcaatttcatcattaaaaaatgaaccaatttatttggatgaaaataaaacaatagttttacagtatggaacttgttttagagatgaaattgttattaaatatccacttggaactggacaaggtatgttatttaatggtaaggaaaatgagttaacagcaaacaaagtattagagtcaatagtagataaaggagtaagagataaaattaaagcaagaatttttattaatggaacttttattggtacaaaagaagctttcaaagatttagaaaaaaatccagttttgcataatgatgagaaaagaattccaataaaatctgttagatgtttaacaggtcttagtgctgttgcttcaataaaaaaagacgaaaatggaaaagaaattggttttgtaaaaccaggaaataaccatcacattgctatttatattgatgaaaatggaaaaaaacaagaacatagttgttcattttggcatgcagttgaacgaaaaaaatatggaatacctgtaattattaaaaaccccaaagatatatgggataaaatattactgaacaaaaatgaatatccaaacagctttcttgaaaaaatcccaaatgataaatggttgtttaatatgagtttacaacaaaatgaaatgtttattttagaaatgaaagatgatgattttgaaaaagcaataaaagaaaatgataaaaaaacgataaatcaatatttatatttagtttggtcaattgcagaaaatgattactggtttagacatcacttggaaacaaaaaatagtgaattgaaaaaaattgagggagcagtacaatcaaaacgatattatagaaaaagccttgtagctcttgaaaaattaaatcctaaaaaaattagaataaataatcttggagaaataacttcaattggcgaatattaacataaaatcgagaaaatgaaaaattatacttgcaaactagaagaagataaattttatcatatctacaatcgtgggaataataaagacaaattattttattcgaatgcgaattatgaatattttttacgcaagtatgacgaatatttatcggattttgtagaaacttatgctttttgtttgttgccaaatcattttcattttttggtgcgtattaagaatgtttctaaacttactgaatcgatgatatcgctcaaagcgatatcatcgataaaagaagaagtaatattatcgacagaagaacgctttcgtcgtttatttattacctattcacaagcaataaacaagcaacaaaatcgacatggaagtttgttcgaaaaaccctttaggcgaatcgaaataagcaatacaaaatatttagcgaatttggttttttatattcatgcaaatccaacattacacggtattgataaggattttagaatgtatgcatggagtagctatcatcgaattttgattagcaaaccgagcaaattacagaaagcagaagttattgaatggtttagcgataaagaaaactatgtagcttttcattcacaaaaaattgaaatcgaaaaaattaagcaattgttattggagtagttattaataaattagcgataccacctttttaaaaggtggtatcgcttaaaacaagactaattatgataaaacgaactctttattttggaaacgatgcttatttgcacactaaaatcgaacaattagttattgagtttgccgataaagaaaaacccccggttacagttccaattgaagatattggaattgtaattttagatgcaaatagattaacaatttcgcaacatttgattagcaaattattgcacaacaatgttgcgttaattacttgcgacgaaaagcatcttccgcaaggattgatgttaaatttagtaggaaacacgctacaatcagaaaaatttcaagcacaaataagtgcatcagaacccttgaaaaaaaatctttggcaacaaaccataaaatctaaaattcaaaatcaagcaaatttgttgaaagaacttggtttcgataccgaaaatatgaaatattgggaacaaagtgtaaaatctggcgatactgataattacgaagcccgagcggctgcattttattggaaaagcgtatttgtcgattatattcaagattttaaacgtggtcgatttgaggacgccccaaacaatttgctcaattatggatatgctattttaagagccatagtagctcgaaatttagttgcttcgggtttgttgccaactttaggcatacatcatcacaataaatataatgcttattgtttagccgatgatattatggaaccataccgaccttatgttgacggcattgttttgcaaataattagaaatcaattaaatacgattgaattaactaccgaaattaaaaaatatttattagaaattccggttatagatgttatgattgatgggcaaaaaagcccattaatgattgccgttcaacgaacaacggcaagtctttcggcttgttttgaaggaaaaagcaaaaaattactttatcctgtatatgaataattttgaacgattaaatcaataccgaattatgtgggtaatggtgttattcgatttaccaaccgaaactaaaaaagagcgaaaaatttattcgcagtttcggaaagaattaatgaaagatggttttactatgtttcaattttcgatttatgtacgttgttgtccaagtagagaaaatgccgaagttcacacaaaaagagtaaaaaatattttgcctgaaaaaggaatgattggaatattaagcataactgataaacagtttggaatgatggagatattttacggacaaaaagttcaaaaaccaaatgtagaaacacaacaattgagtttgttttaatagcgatgccacctctttataaggtggcatcgcttaaaaatgaaaaaaggcagtcataaccgcctttttacgttgaaaatagctagaatttttaatgtcaatattgcaattaagttactgtatatcagttaatagtctattgctgtactatttccaatatttcaaagannctaaatgaaagcaaatcacaacaattgaaatagatacgtgtttaactagtgaactatttccaatatttcaaagatactaaatgaaagcaaatcacaactgttaaaggtgtatcacacggaactagaacactatttccaatatttcaaagatactaaatgaaagcaaatcacaaccgttaaggtctattatatttgcgactggttactatttccaatatttcaaagatactaaatgaaagcaaatcacaacagcaatccatgcgggagcatatcgtacattactatttccaatatttcaaagatactaaatgaaagcaaatcacaactcttcgtcaaggctgtacgaatttagcaatactatttccaatatttcaaagatactaaatgaaagcaaatcacaacacaaaaacgattttgcttgcaaagggtgcgactatttccaatatttcaaagatactaaatgaaagcaaatcacaactatatttttaatcgctccttggtatttataactatttccaatatttcaaagatactaaatgaaagcaaatcacaactatgaatgaatgcattcataaaaatttttaactatttccaatatttcaaagatactaaatgaaagcaaatcacaacatcaagtgagtcatttgtaaaaaaagcattactatttccaatatttcaaagatactaaatgaaagcaaatcacaactaataaaaaccgttttatattaccaccgttactatttccaatatttcaaagatactaaatgaaagcaaatcacaactgattatattttgaatcattcaaaattattactatttccaatatttcaaagatactaaatgaaagcaaatcacaacttatacgattgacgaaactattgccaaagactatttccaatatttcaaagatactaaatgaaagcaaatcacaaccaaccacttctagtgcaaacgatgatgtatactatttccaatatttcaaagatactaaatgaaagcaaatcacaactatcaaagtatgtttcaaaaaacgaaattactatttccaatatttcaaagatactaaatgaaagcaaatcacaactacccgaacactttaacgattctgaaaggactatttccaatatttcaaagatactaaatgaaagcaaatcacaaccagcacttgcaataaacatcaatagtgctaactatttccaatatttcaaagatactaaatgaaagcaaatcacaacagaggcttgcgaaatatgcggaatttatgaactatttccaatatttcaaagatactaaatgaaagcaaatcacaacagctacttgaataatagcaaccgcaaccgcactatttccaatatttcaaagatactaaatgaaagcaaatcacaactagttcgacaaaactaaacattattttttaaactatttccaatatttcaaagatactaaatgaaagcaaatcacaacactgaaaaggtacacgaacacggaaataaactatttccaatatttcaaagatactaaatgaaagcaaatcacaactggttatctgtacactcatttattgaactcactatttccaatatttcaaagatactaaatgaaagcaaatcacaacaggaaaccgccttttcaatggattgcttccactatttccaatatttcaaagatactaaatgaaagcaaatcacaaccgacaaattgagtgtatgtacaatggtgaaactatttccaatatttcaaagatactaaatgaaagcaaatcacaactaataactttaattattgaactttttaagtactatttccaatatttcaaagatactaaatgaaagcaaatcacaaccggaaataaatgggattttgacatattgttactatttccaatatttcaaagatactaaatgaaagcaaatcacaacttacgctatgaaatggaatttaaacccaaaactatttccaatatttcaaagatactaaatgaaagcaaatcacaacttacgaaaaggtatttgctacggtggacggactatttccaatatttcaaagatactaaatgaaagcaaatcacaacttacgactattgagaaacggatattatattactatttccaatatttcaaagatactaaatgaaagcaaatcacaactatgtgcatcttatacagctagaaaggtttactatttccaatatttcaaagatactaaatgaaagcaaatcacaacaaattaacgatgggtcaagcaatacaattactatttccaatatttcaaagatactaaatgaaagcaaatcacaacagtccaaaccgctattccacgcttttcgtactatttccaatatttcaaagatactaaatgaaagcaaatcacaaccgtagttgaaaagaaaatcaattcgtttgaactatttccaatatttcaaagatactaaatgaaagcaaatcacaactgaccgaatcgttttcaatccatacttggtactatttccaatatttcaaagatactaaatgaaagcaaatcacaacagttgttcgtttgtgttttagttccattttactatttccaatatttcaaagatactaaatgaaagcaaatcacaactagccgttaattgaccaatcaatattgctaactatttccaatatttcaaagatactaaatgaaagcaaatcacaacgaaagaaacagaattaacaacgctgtcagcactatttccaatatttcaaaga

SEQ ID NO: 1745 - DNA, 18168 bp, synthetic construct
  misc_feature 1..18168: note = Synthetic
  source 1..18168: mol_type = other DNA
tgttttggtagataaaggggataaaggtgtaagggaaatattttttaattatgaatttttaatttttaattagatggtgaattgtaggggtaatcccttgttgttgcaaatagttgaacattttttttaccacagattgtacagttttttttgtggcatattttaatggttaatggtaaattataaatgattaaaaaaataaaaaatctgtgtacatctacaaatcagagttcatttgagtatattcgctaaacctgtctcgccgtggcggagcggaacaggtcagtggaaaaaaaatatgaaccgagcgatagagagctcattaaccgaaggtaaataaatatgatttatgagttgaaaatttcttttatacctttaagaccctttatacccttatacccttatacctttcaaacttcttagaccttcattcacaaaaaaacaccgccgttcaaatcataaacaataaatttgtatttttacaaaaaatatagactatggcatattccagcttatctcaatatatacaaatacttcgtgattgtggagaattaatagaaattaccgaatttgtaaatcctcatttagaaattaccgaaattgccgacagattctcgaaacaagaaggcacaaaaaacaaagcaatactttgcaccaacaccggtaccggatttccattattcatcaatggatttggctctgaaactcgcatcaacaaagcattaggcacgaagcacctcgacgaacccaaagaacgaatacaatcgttatttagcaaagcaactgctccaaaacaatccatactcgaagcattaaaaatgctcccgctcctttccgaattacaatcgtggatgcctaaatacaaaaaaggtaaaggtgcctgtcaagaggtaatagaatccaatgttgacctatcaaaactccctattcttaactgctggcctcacgatggcggaaaatttattaccctacctatggtcataaccaaacaccccgaaacaggtattcgtaatgttggtatgtaccgcatgcaggtaatagacaacactactacagctatgcattggcatttacacaaaacaggagcaaatcactacaatgcgtataaacaattggggacacgtatgcctgtagctgttgctttaggtggcgaccccgctcatacgtttgcggcaaccgcccccctacccgaaaatattgacgagtatatgctttccggttttttacgaaaaaaacatgtagaattggtcaaatgtattacgtgcgatttgcacgtccctgccgatgctgatatagtactcgaaggctacgtagatattaccgaagacttatttctcgaaggaccgtttggagaccataccggcttttactctctgcccgatttgtaccccaaatttcatataacctgtataacgcacaaaaaaaatgcaatttaccctacaactattgtaggcataccacctatggaagacgcatggatagggaaagcgactgaacgcatatttcttgcaccaataaaattattgcttgtacccgaattacttgactattggatgccatttgagggagttgcacataatttagtaatagcacgcattcaaaaaaaatatgccggacaagctcaaaaagttatgagtaccctatggggagcgggacaaatgatgtttaataaaacacttattgtaatagacgaacacaccgaaatgaatcccgaagcaatatgtaatgcattgcttcaccattgcaatatcaatcgcgacattcacattcattccggaccactcgatgtacttgaccacgcagctccgcatacaggttttggcagtaaaattggattcgacgcaactcaaaaattggattcagaatgcgataccgatgctacactgtacgattcgttgtataccataatcccatgtaatatccacgacacaaaagaacaagcatgtgcacaatcaacaaacatttcaaaattctacatactgtgcgatgctactttagacaaaaccgacacaactacaattgtatggcatgtcctcaataatatacatccacaaatcgattgcactcttgaaaaaattaatactaccaatgtatttgtaatagatggcagaacaaaaccccaaacaaaaacaactcgcgattggcctactccggtaataatggactcaaaaacaattgcaaaagtagatgaacggtggcaatcgttacaaataggagaatttattccatctccatcgaaaaaatatacagccttggcacaaacaaattcggcatggtactatagtcattcacaatcaaatacatagaacatgacaggcacacttataaacgcaggagcaatcatagtaggcggcaccataggactgctagcacattccaaattacctgcaaaaattacaaaaatttccttccaagcgataggcatctttaccatgtttgttggaattcaaatggcattaaaatcaaacaattatgtattgatagtgtttagtctgcttttaggtgccataataggagaactgttcgattttgagcaaaaactgcaacgattaagtaaaaaatttactaagaaaaattccgactcaagcgaacaatttacccaagcagtaattaccacatttatattgtattgcatgggatcaatggctatattgggagctatagaagacggtttgggttacaaaccaaatttactcatagcaaaatctattctcgacggattttcatccatagcacttgctgccgcatttggaccgggtgtaatagtatcggtaattccgctcattttattccaaggcggtattacattaggtgcatcatacataaccaatgtagtaggcgaacctatcatactagaactctcagctgttggtggcttattattaatcggattatcactctctatactcgaaattaaaaaaatacatgtaaccaatatgctgccggcattaattatagtgcttgtagcaggatttataatgacgaaatacgggattgggatgtagagaaacatttgaaaatttattaaaaaaaccaataatgtctgatacaactacaaaaaaaaaatgtaaatttgtattacatatattcatctcataaaaataataaaatcattagtttaacctgaatatctaaaaattatttaaaagctaaaaattatgaaaaaagcacttttatttttttttattgcacaactcttgttttcatgtaaaaaagaagaaatagttgttataaaaaaaataaactttaatcctaatattacatatggaactattaaagatattgataataatttatacaagactgtagtaattggttcacaaacttggatggcagaaaatttaagaacaacaaaatacaatgatggtattgatattccttatatatcaaatgacaatgaatgggggaatatagaaaatggtgcattttgcacatattacaatactgataataaagatacaatagaaatatatgggagattatataattggcatgctgtaaaaacaaataaattatgccctataggatggcatgtcccaaatgaaaatgattggcaagagttagcaaactatttaggtgatgaatttacatgtggtggaaaattgaaagaaagaaatacagatcattggatttatccaaatatatcagcaacaaatgaaagcggatttacagctttacctgctggcgaaagaagtgtgttaattaatcgtgagactaatgaaaaacaaattttttattattttgctggggaacacggttcattttggtcatcttctccaatagattatgaagaaccatttggtccagtaacagatacactatttgctcattcaagtacattattaagtgacacaattgaagaatgggataaatatttattattaacctatagttctcttaatacaggtttaagtattaggtgtttaaaagattaaagacattaaataacatcacttattaaaatagttttttttatcataaaggctgttttttctaaaaactctttgtcacttgcgtgacaaatgaacatttcaaaaaactgctactttttatagcattaatagattataattcgctcggcaattctcctacaacacatgttatgcccctctatctcaccatcattcgttgcgacgtataaatatcgccatatcgaatatataccacatatattttatttccggcaaccggaataagcacttgaaactgcgaagtcatttcagaaaaatcgctcaattcatagtgcacatttccctgcatatcgcacactataatatttgataccggacgttgctctgtatctatttgaatataaatagctccttgtagtggtttacaatccaacggttttatttcttgagtttgtttttggggcaacaatacttctattacatgcgattcggtaaaatctccattcatatctacttgtcgcaatacataatagagtattgaagtttcggcaaacaacacctcatctaaatattcgtaatacgaaaattcagcagaattcccttgagacataatagtatcaataggagtaaaatctataccattgagcgaacggtgcacaacaaaataatgattattaacttcctgagccgtaacccaatgcaattctacccgtaattcgtcgaataatcgagcccaaaaagtaaccaattctataggtaaatgcaaattctcataatttatttcggatagcaccgaacctaatgtccaatattcgctattggaagcatttgcattatcaaattgcacccattttgaattatcattcactgtccacggtgttgtagctttatcccaagccgaggaaccgttagaatttgctaaagtcatagattcagttcgttcatcagaatccacacccggaaaatcatcgtaactgtaatgtaaccttcgttgaggattccctccgcttacaactgtatgtttccaataaaaatattgaatgatacctccgggcaaattattgtaattaatattatcgtgctgaaccggtgtttcgtacaaaaactgcacttggtttatattgtcggaattgccattttgtaatcccaccccaaaaggacgacaaaatcctttatttccaacaggaaaggtatacacacccgaatttttgggaatatttcgttgcactatgccatctatatgcgacgaatcggaacaaggaatatcggcttgaatttgtttactgtttagatatacaatacttgcatcgtacatatataaaataccgtgagtcaacaccaatacaataccatcggcaggcacaccatcgtctaaatcaatactatgataagatatagctccttgtttacgatttattaccaatttttttaatttttctatattggcaggaaactcaaaaggagcaacctcatcaccacccaacaattgcaactcggtatttgtattactcgacatattattacgttgcaaaccacctaaattcccatatattgcaatggtattgcttcctaatataagcgaaccgtttgttatagttatattacgaacagatacagatgtattaagagtaattgtatgacctgaaagaatttctatatcggcagtagaagaatttggaactacattaccttcccaagttgagggattgttccaattgcccgatgatttgctctggtattgagctattgcgagtgttgttgcaactgagaggaatatggtaattactagtttcattgagcatatatgtaaaagtgattattcccatattgtatttcatttcaatattttatacggttaatactttaggcaagttttagaatatgtttcttatttatataaaattcgaaaaaaaccttcgcaacgccacaaaatgtcttttgctcaattaaaaaataccacaaaacaatctgtgttaattggttacggcggaataggtctgtgatgaaaatacaatcatctatgggcaaccacaagggattgcccatacaattcaccatctaattaaaaaatatccgcccctacaccatataccataaaccgtataccgtataccaataaaccgataaaccccttttttaaactttctcccatttttttgtaataaaataattttgttttagtctacaacatactacatttgcataggaatagaataaaaaaaataaacaatatgccggttaatatacccgatacccttccggcagcggaggtattgaaaaacgaaaatatatttgtaatgcatcaaagtcgtgcaatatcgcaagacatccgtccattacgcattggtattttaaacttaatgccactgaaagaaactacagaaacacatttaattcgcatgttgtcgaacacaccactgcaagttgaaattgtgttactgtatacaaaaactcatactcctaaaaatacatcattagaacatttagaatcgttttatcaatcgtttgatgaaattgcatacaaaaatctcgacggacttataataacgggagctcctatagaacatttacctttcgaagatgtaatatactggaacgaattaacttcaattttagaatgggcagataaacacgtaacctcaactctccatatttgttggggagcacaagctgcattgtattaccaatacggaattcaaaaatatcaattaccacaaaaattgtttggtatttttaaacataccgtatgcaacaaaaaagagccgttagtacacggattcgacgatgaatttttagcaccacactcacgccatacctatactcgccgcgaagatattttggcacaacccgaattggaacttataagcgaatcggaacaagcaggagtgtacatagtaacatcgaaaaacaaaaaacacgtatacgtaaccggacattccgaatacgacccgcttaccttacgcgacgaatacatacgtgacaaacaaaaaggattagacatagctatgccggtaaattattttcccgaaaacaatccggatgctatgccaataaaccgatggaaaagtcatggcaacttattgttcagcaattggttaaattattatgtatatcaagaaacaccgtttgacattatataacattctcgaatttgcagtataaaacatatatactatgacacatacattacgtattggattaattcaactttcaattacagaatctgttgaacagaacaaaaaaaacatacaacaacatatagaacactgtgccaaacaaggtgcacagttagttgttttgcaagaattacacaatacggtatatttttgtcaaaccgaagaagtatgcaattttgaccttgccgaaaccattcccggaccgtcaaccgagttttacggatctattgcacaacgcaatggaattgtattggtaacatcgctgttcgaaaaacgagcagcaggcatttaccacaatactgccgttgtatttgaaaacgatggaactattgcaggtaaatatcgcaaaatgcatattcccgatgaccccgcatattacgaaaaattttattttacccccggcgatttaggatttacccctatacaaacatcggtaggatgccttggcgtgcttatttgctgggaccaatggtaccccgaagcagcacgaatcatggcaatgcacggagcacaaattttactatatcctactgctattggatgggaaagcaccgacactaacgaagaaaaacaacgtcaacaacaagcctggatactatcgcaacgagcacatgcagttgctaatggaattccggtagttgctgtaaacagagttggcaccgaaacagacccaagtggtgttaccaatggtattcaattttggggacatagttttgtagccggtccgcaaggagaaatattagcacaagcaagcgacacgcaatctgaaactatagtaatagatatagacatgcaacgtagcgaacacgttcgccgtatatggccatttttccgcgaccgtagaatagatgcatatgctgatattgtgaaacgatatgcgaaatagtaatctacacatagaattggcaaccaaaatagattgtaatttacttacagatattgcatttgctgccaaaagacattggaactaccccgaagaatattataacatttggactaaagaattaactattactccccaatatttagaacaagcacaagtatacaaaggaactataacaaatcaaacagtaggtttttattctcttgtagatataaaacaagatacttatttcgatacaatatttataaatcaaggaatgtggctggaacatatttttatacttccccaatttcatctacaaggaattggtacatatatgataaaacatgtaaaacatatttgttcacttaaacaaataccatatgtttatatatttgttgacccgaatgctcttggtttctacacatctataggagctcaatttgttcgcaattccgattcgagcattcccaatagaactattcctatttacaaattactcatagattaataatgaaattagcacttacctacccttgtgttatgggtatctgtaatataacccccgactcattttacgacggaggaaaacactccactacaacaaaagcattgcatcatatagaaaatatggttacacaaggtgctgccattatagatattggagcatactcatcacgtccgggagctatagatatatcaattgatgaagaattttatcgcttgcaaccaataatagttgaagttcacaaacattttccagatattctaatttctatagacacatttagaagcgaaattgtaacacgcgtataccacaccataggcaacatactggtaaacgatatatcgggaggcttgttagataccgcaatgcttccaacttgtggaacacttaacgtaccctacatttgcatgcacatgcaaggtactccgcaaactatgcacatatcgccacagtacaagaatataacacaagaaatatatacatttttcgaaacacaattaatagaagcacagaagcatggcgtaccatctgtaattatcgatccggggtttggatttggaaaaaccatagaacacaattttgaactccttcgtacattagacacatatacatcgttggatgttcctattttagttggactttcgcgtaaatctatgatatacaaaacactaaacaccacccccgaacaatcattaccgggaactatagcccttaacactctcgcattaagcaaaggagcatctatacttcgtgtacacgatgtggcagaagcggtagatgttgttactctttataaaaaatatggagcatgtattaattccgataccctatgacacaaaaaaaacctaaacaaagaattaatatagtgtattcaaccaatccaaattttgaatacgaaaacaacgaagaatgcgaagaagaaacacttgcaccgcaacaacaagatttacgagttatgctcgatcgcaaacaacgagcgggaaaatctgttactattgttaccggatttattggatcaacacacgatttagaacaattaggaaaaacactaaaatcgaaatgcggtgttggaggtacggtaaaaaacaatgaaattttgatacaaggcgatttttgcgaaaaaatcatacacatactccatcaacaaggctataaagcaaaacgaagcggggggtgagtatacaacctactagtatagtattaataggctcataacatcttatacaacttataccatacattccactatcaaaaatctttcattctatcctcaaaaattgacataaaaaaaggcgagttgccccgccttgaatgttttattcgtgatttgtcaatttttataatatggtactcatgaaacatttggataaaaaaaagccccgtattgaaagacgaggcggcttaaatgttttcacaacggaataatccttattgtgatttggttcattttgtacaacaaaactataaaaaaatacccacacaaacaaatactatattattttttttcatgattttaaaaccttaaacaaaaacaacattacacatgaaaaaaatattgggattggatttgggtagtgcatcaattgggtgggcacttattaatgaaaaagaagaaaacaataaaacaacttcttcaattatcgcacttgggagtagaattattccatatgaaggaactgaaggaaaagattttgcaaagggaacaggtgaaagtagaaattctttaagaacacaagctcgaacaacccgaaagggttatgaccgatatcaattacgaaggaaatatcttgaagatattctcattaaaaacaatatgatgccaaccgacgaattaaaaaaactacctaaaatggaattatgggctttacgagcaaaagctgtaactcaagaaatttcattgcaagaattaggaagattattattgtggctcaatcaaaaaagaggttataaaagtagtagaagtgatgcaaacaaggataaaaaagatactgcgtatgtagcagaagttaaaagcagacatgaaattataaaagaacaaaatataactattgggcagtatttttacaatgaattagtaaaagacaacttttataaagtaaaagaaaatatttttccaagagaagcttatattgaggagtttgatgcaatatggaaatgtcaagaaagatttcatcaagttttgaataactgtccgtctgaatctcttgctcgatttggaaaaagcatgtttccaagtacaaaccaagaacatttaagaaatgaaataattaaaatgggattgtataatcttattaaaaatttcattatttacaatcaacgtccactaaaatcacaaaaaggattagtttctgtttgtgaatttgaaggttttaccgttaaaaaaggagaaaaggaatatttcgtaggtcctaaagtcgcaccgaaaagttcacccctctttcaaattgtcaaaatttgggagattatcaataatataaaaatcaacaacagaaaaggcgaagaaataattataacaaccgaacaaaaaaaagcaatttttgaacatcttgataataatgaaaaattaactccaacagatttaattaaaattcttggacttaaaaaagatgattgttatataaataaacaacttgcaaaaggactaaatggaaatgtcactaaaaatgctattaaacaatatttgggtaaagattatgataaccttttaacttttgaattacatactgtaatagaagaaggtgaagtatatttatatagtaaaaaaactggtgaagtattgaatgcaaaacaaaaaatgcatattgcaccaaatgtagagaaagaacctttgtatcaattatggcatacaatctattcaatttctgaccaagaagaatgcagtaatgcgttacaaaccaaatttaagattgatactgacactgcaaataaactcgcttctattgattttacaaaacacgcatttggtaacaaatctgcaaaagttatacgtaaaattcttccatatttaatggaaggcgatggatattctgaagctatgtgttatgcaggatatgaccactctaattcattcacaaaagaacaaaacttagatagaaaactattagattcattaaaaccaattgcaaaaaactcgctacgacaacccattgttgaaaaaattctaaaccaaatggttaatgttgtaaatgctattattgaaaagtacggaaaacctgatgaaattagaattgaacttgcaagagaattaaagcaaagtaaagaagaacgaaatgatgcagataaaagcatgagtaaacgacaacgtgaaaatgaaacaattattaaaagattagaggagtatggtttacgggcaactcgtaataatatcatcaaatggcgtttatatgaagaaattgacaatgaagataaaaaattaaatgcaatgtgtatttattgtggtcagccaatttctttaacacaagcaatacaaggtactgacgtagatattgaacatattataccaaaatcaaaattatttgatgattcgcaaagcaataaaacattagcacatcgccattgtaataggaataaaaatgatatgaccgcatatgattttatgaaaagtaaacctgatgaagaattacaaaaatacattgaacgagttaatttactatattctaatcacataattaacaaagcaaagcgaaataagcttttaatgacagaaagtaaaattccagataattttatagaccgtcaattacgcgaaagccaatatatagcaaaaaaagctagagaaatattacaaactatttgtcattctgtttggacaacaagtggaaccgtgacatcagaacttcgccatttatggggttgggacgatgtcacgatgaatctgcaattcccaaaatacaaagctataccggaaatgaccgaaattaaagaatgggaaagcgaccatggtaaaaataaacataaaaaagaagttataaaagattggagcaaacgtgatgaccatagacaccacgctgttgatgcacttacaattgcatgcacaaaacaaggttttattcaacgatttaacaccttaaactcaaataaaactcgcgaagacatgtctcatattgttgatgaatgttcagtagaatacaaagaaaaaatgtcgttactcgaaaaatatatagtatctcaacaacctatttctgtttctgaagtacaaaaggctgtaggcaatattcttatatcttttaaatcaggtaaaaaagtggcagttcccggaacacgaaaaatcggcaaacggggtaataaaagggtagtacaaacagggattattgtacctcgtgggtcgcttcacgaagatggtgtttatggctcgataaaacaatatcaaaaggattctaatgcaaatgaagttaggtttacaaataacattgtcaaaaagtataaactcggtattggagcacaaggattcgtctttaccggtaaagaaacttatgaagtaaaagaaaaactaaacaaaaaaacaaatattattgaatcagttacgactgataaaataaaaaacactcttgattctattgtcgataaagggattagaaatgctgttttaaaaaggttaaacagaggatttgaaaaagataagacatataaagatgatgtaaagaaagcattagaaaatttaaaaaatctcgataaagaccctatttatctaaacgaagaaaagaaaataccaataaaaacagttcgctgcttcaccggactttcggcagttgttcctgtaaaaaaagatgaacaaggaaatgatattggttttgtaaaaccaggcaacaatcaccatatagccatatatatagataaagacggtaataaacaagaatatgtttgtacattttggcatgctgtagaacgaaaaaaatatggtataccagtaattataaataatacgaatgaagtttgggataaaattttgctacaagcagatgggacataccccaatagttttttagaaaaactaccaaaaccaaacctttctcttgaattaagtatgcaacaaaatcaaatgtttattcttggaatgaataaagaagaaattgaactatctatttctaataatgattataaagcaattagtgataaattatatagggtgcaaaaaatgtctattattccaagtagtggtcaattagatttaacttttaggcatcatcttgaaacacaattatctgatgataataattcaaaaatttgtaaaagatttattaaagctcaaagtttaaattcattatttaatttacaaccatataaagtttcaattgattgtttaggtaatattgttgatgtaaaggaaaaataaactcaaagccccaactaaattaaggtaaaaacctattcacgggatgactttacgtcaccccgtgaataaaaaaaaacaaaaaagcaatgtcgaaagctaaactaaaaaaagaattacaagccttgtccaaagagcaattgatagaacatgtactcgatatgtacgaaaaacacaaggcagtaaaagaattttacaatttcttcctaaatgccagtcctgcaaacgagcatgcatgtgccgaaaaatataagaaaatcgttcgcaaagaatttaacctcatacatccgatgaatgcaggcatgaaattttcggtagcaaaacgagcaattgccgatttcaaaaatctgcaaccttctgcacattcccttgccgatattatgctctatctacccgaatgtgcctgtgattttacctatcaatttggcgatatgactgaacaattttacataggagcttgtaataattttcaagctgcccttttgtttatggcaaaacatcacattctcaacgactttaaactacgatcgttacaatgtgtagaatgggcatcggtatgcggctatggctttgcagatgaaatagcatctatttataatgaattttacgactaaatttgtctacttactaataaacaattcagatagaccgtatggcacaacaacaaaaattatcagcaaaacaatacattaaaacaaaggcacgaagtttacctatagatatttgttattgtaataccaattggaaactcattggtatggctactataattgttagtcgtatacacaaaacaggaactcgcacctttggagtatatcttgttgacacgctcgaacgtggcgttatcgatagcatgtatcattttaatgcattacaaggtatttttgaagaaatcgtagaagatattcgagaaaatttaccatttgaacagatagactatgttactgcacataatataatatttggagcagtagcgtttgccgatgaaaatggtattgctccgtgtaaagaattcaaagaaattacacaatatattttagaagacgacgaaaacgaagacattgaaattattgaatttgattttgggtatatacaagaatcaaaaaaagaacaacaggaaacaataagcaatgtaacatttcaatttaagattcaacttaaaaacatttcagcccctacagtgtggcgaagaatagaagtacccgcacactatacattcgaagattttcatgatatcattcaagcttcttttctatgggaagattatcatttgtttatgttttgtcctcaaggctttggttcgcatccaagtataggtataccaacggaagatgataatttgatagacattgacgctgattctataccattgagtgatgtatttatcaaagaaaaacaaacctatacctatatctatgattttggcgacgattggatacataccattacgctcgaaaaaattcataacaaaactatagattacccaatatgtactgctggtaagggaggctgtccgcccgaagattgtggtggaccatggggatatcaacgattaaaagaaattcttgcaaaccccaaagacccggaatataaagaaacaagaaaatggttaggcttgaagaaaaatgacacataccccatagacgaatgcgatacggaacttataaattccatgttaaaagattattttgaatagatacggaacatttttgaaactgtttagatattgtttttaatttaaatttttggagattttgagcttcagataaataaaaattgacaagaatagtttttctatttgaggagatttttatgaaatatgaagttcaaaggaacaaaaattaattaaacaatgaaatggaaccagtttcttagttttcctttttatatttgcatagcaacactaacacattacttacaatgcatttcgaaacaggaatcgtatatcatatctataatcaagggaataatagacaaaaactatttttcaaccgcgataattacttatttttcctacaaaaaatacgaacacagcttaccccacatgccgatttgttagcatggtgtcttatgcctaatcattttcatataatgctatatgtacatacgttggaagttattccacaaaactcaaatactcacggggtgactcaaagtcaccccgtgagtaaaccccgaaacttgaataattcaatagccattatgctccgttcttatactcgagcaatacacaaacaagaaaaatcaagtggcaacttatttcgagaagcaaccaaagccatccccctcaatcaaatacacggcattaccccggcatatttcaacacgcagtttggcacgaaaattaatgcaacaactccccaagaagaatatctgaatatttgtttcaactatatacacaacaatccggtaaaagctcaattggtacgacacgcaacagattgggagttttcgtcggctcaagattacgcaggcttgcgtaatggtacattaattcaaaaacagaaagctcgtgaagttggtttagtttggtaaaccttactcacggggtgactcaaagtcaccccgtgagtaattaaactatactactatgataaaacgaactctttacttcggaaatcctgcgtacctcagtaccaagcaagaacaattagtaattaacctacccgatgcacaaggcttcgacaacaaatcgggtttaaacactattcccatagaagatataggtgtggtaattctcgacaaccagcaaattacaatcacccatggtgtaatagaaaaattgttggcaaacaatgctgccgtaattacgtgcaatagcacccaccaccctaccggattattgctcaatttagacggcaataccatacaacaagagcgttgggaaaatcaattaggtgcaagcgagcctctcaaaaaacaattgtggcaacaaacaattcaagcaaaaatcagaaatcaagctgcggtgttggcacaacaaggaattgacgtacaaaatatgaaacattggattcaacaagtacaaagtggcgatgcagtaaaccacgaagcacgggcagcagcatactattgggcacacgttttccccaagcaactccagtttaaacgcggacgcgaagaagctccaccaaacaatgttctaaattacggctatgcaattttgcgtgctattaccgcccgttcgttagttgcatcgggcatgttgcctacccttggcattcatcatcacaaccgttacaattcctattgccttgccgatgatattatggaaccatatcgcccgtatgttgacaaggtagtactccaattaatacaacaaggcgaggactacacgcaattgagcaaaccaataaagacagaactgttgcaaattcccaccatagatgttacaattgaagggcgcaaaagtccgcttatgatagcattgcaacaaactacagcaagtttggcaaagtgctttgacaaaagcttgagaaaaataagttatccggaattataatatactcacggggtgacttaaagtcaccccgtgagtatacataaaacgaacaactatgcattcacgatttaacgcctatagaattatgtgggtaatggtatattttgatttgccaaccgagactaaaaaggaacggaaggaagcggctttgtttcgcaaaaatttaatgaaagatggatttaccatgtttcagtatagcatatatgtgcggcattgccccagtaaagaaaatgccgaagttcacataaaacgcataaaaaacttgctgcccgaaaccgggcatgtatgcattatgtacattaccgacaaacaatttggcgacatagaaatatttagggcaaacaaaccggcagaagccccggtgctgcatcaacaattgtcgttgttttagtttagtcggagcgcgactttgagtcgtactccgactattcatctgatgactttaagtcatctgatgaataaaaactaaaaaagcgaaaccgatacatcgacttcgctttttacctataaacaaccttattttttaatcctaattttcaacataatcaacaaacaatcaaaatcttatcgcatggtctgttgtttatactatgtcaaagatacaaaatgaaaccaaatcacaactaactctctaaaattgtcctatgttcatcagttgtttatactatgtcaaagatacaaaatgaaaccaaatcacaaccacattgaggttcaaatattccactttcatgttgtttatactatgtcaaagatacaaaatgaaaccaaatcacaacctacatcattggcttttatttcaacgccagttgtttatactatgtcaaagatacaaaatgaaaccaaatcacaacccacttattatcataaaatttaagagtta

SEQ ID NO: 1746 - DNA, 17041 bp, synthetic construct
  source 1..17041: mol_type = other DNA
  misc_feature 1..17041: note = Synthetic
ttccggcctacaaaaaaatgcgtttccccgaactcgatatgatggtctttgttcatttgtacggtgcgcagtacaacaaaaagcgaatcaccgtacatttcaattttgggacgctgatgtgccgaatgagcatcttccacggccagatcatgaagaccaaactgctcctgtacctgcgaaagggtttcttctgatggctcatgcaatccgatccatacaaactggccttcatctttcagcactttatgcacttccgaaagttccacatcggccgtgcggcggcctccggcatatgcggcgcagttaattatctgtttcataaaatcaaaagttagtacaaattttaaattatccggcagaatgcacttgctgatgccttcgcaatacaaaaaacggattgtccggtaaaagtataaaccggaaaaaagcgcctccgccttcaaacagtccggtgttacctatcagataatagaaagcttgcctaagtttgtgttatgaaaaaactgctgctgcccggtttgcttctttgctgcagggcgattagtgcgcaaaatgattttagtacagacagtgcctttcttatccgccttaaccagactatagatcattacgttattgaaaaaaatattcccgcccttgatagcctgtacgcatacgattttgtcttcagccacggaacgggattgattgagggaaaagaaggctggatgaaaacggttcggtcggttaataatatatcacggcttcacgattccgtaaatgttgaattgcatcccggtaccggaatcgtcagaggaaaattatccgtgaaaagaaaagcaaatacgcctggcgaacccgatgtaacgtattggataaaatacattcgtgtatatgcccggcgaaacggaaactggcagctcatctctcatattaccactcatgaatttcatatgtttattaattaacttaccgccccgggcggttaataattctgttataggttatgcctcttactaatcgttttcggaaggcgtgcagatgactgctcatgagtttttcaatgaaaaataaaattataagataatttaccagtaataaacttatacaaacaggtatggataattcaaaagatctgcgactggctgtactcatagatgcggataatattcctcatcgcctcatcagcggaattcttgaagaggtggccaaatacggcatacctacattcaaacgcatttatggcgattggacaaaaccccatatcggcggatggaaagctgtactgctggatcatgccattacaccggtacagcaatacagctatacgacggggaaaaatgcaaccgattcggccatgatcattgacgcaatggatattttatacacaggccgggtagatggtttttgcctggtaagcagcgacagtgattttaccaggctggccacaagactgagagaagccggcatgaaagtatttggaatgggcgagcaaaaaacaccggcggcattccgggctgcctgcgataaatttatttacattgaaatactggaccaggatgaagctccatccgagcaaaagagaaaaccggtaaaaaaagaaaaatcaattattaaaacagacaaaaatcttgttcaccttttatcagcaagcatcaacgacatcgctgatgagaacggctgggcctatcttggcgaactcggaaatcttctattaaagaaaagacccgactttgacccgcgcaactacgggttcgaaaaactgttgccgctcattaaaagcctgcctgaatttgaaattgatgaacgtgaaaccggaaaacgaaacgtacgacttgtttacgtacgaaaccggtaaaagaatcgaccaggtttatgcctgtaatgccggcagttccttacatttgatagaccaaagcctgcacctcaatgaaaaattcccgggatatcataatcaatttttgccccaccggcatggtgcctacccgaagacacactccctttgtaccaatatcgcctgacgaaataattgaagaagtacacaaagcatttgaaacaggtattactattgcccatctgcatgcccgggaagaagatggcaccccttcgtggagaaaaaatatttaccgtactatttttgaaggcgtacgcaaatactgccctggcctggtaatatgcggcagcacatcgggccgcacctttcatgagttcgagaaacgttctgccgtaatagaactgcagccggatatgtgttcacttaccctcggctctctcaattttatgaaacaggcctccgtcagcgatcccggaatgattgcctccctggcagaaaaaatgcaggaatacggagtacatcccgaactggaatgttttgatctgggcatgatcaactatggaaagtacctcgccgcaaaaggggttattcaccctccgttttactggaatctgttattcggaaatatagccgggctacaagccagcctgccccagttgggcgccgcagtcaatgaactggggccggatcagcactttgtatcgctggcaggtttaggaaaagatcagttaatgataaatgccattgcaatagctgccggctatggtgtgcgggtcggtattgaagacaatatttggtacgacgaaggacgaacgataaaagcaagcaatatagccctgctgcagcgtatccatgccctgttgaaaattcatgaaaaaaattatatgaaaccagaatcctttggcaaacttggattttacaatgcacaaaatatttattctgggttatagcgaatcgtttatttctttactgctggaaacgttaaaagtcaacggcatcgtaaaagacatcgtcatcgtgaagaacaccgaagtaaaggagcaatatcccttccgtccggctgttacttcggttgaaatcatcaattccgcccagtggagacacgtcacttccagcgatcgttttgttttcggcgtaggctctccttcggttaaaagaaaagtttttgaatcgtttcgtgaaagccatggtataacgaaagaaaattttctcagcgtccgccatccttttaatgtcaccgcttcttccgcattgatcggtaaaggctgctattgcgagccgtctgtaattctttctcctttttccagtatcggcttcggcgttaccatcaaccgcggcgttaccatcggccatcatacagtaataaaagattttgccaccatttatccgggcactcacattgccggtcattgtgtaattgaagaaggggttcatatcggcatgggtacttcggtatttaacaatgtaaaaatcggagccggttcggtaattggcggaggcagcaccgttaccgaagacattcccggaggagtaaccgcctggggcagcccctgtaaaatcattaagtcggccgatcatgccggatgaccgttcacctgtagtttctgtctgtattcagacctatcagcacgctgcattcattgctcagtgtattgaaagcgtattgcagcagcaaacggatttttcttttgaaataattataggcgaagatgattctaccgacggaacaagagacatctgcatcagatacagtcagaaatatcccggcatcatccgcctttttttgcgaagcgaaaaagacaaaatttatatcaatggcgaaaaaaccggccggtataatatgataaacaacctgaaagccgcccgtggaaaatacatcgctctgctggatggcgatgattactggcccgacccccataaaatgcaaaaacaagttgaccaccttgctgcaaatcccggttacagcatctgttattgcgatttctataccctgaagaacgataaactttaccgtcattcatccctaaagaaaaaattatttcagccaaagcctgctgatcttgcgcatcattgttttatacagccctgcacctgcatgtttcgtaatccggggtttgattccatccccgatcactattggaaactgccggtgctggattattgtctgtttctggaagccgccggccgcggaaaaattttttatataaagaaatacatggctgtgtaccggcaccatcccacagggttctggataggagccggtaaagaaaaaaatttaatccggctattgaattttcttgatataatgattccccattcgcaaggtattatccaaaaaaaattaaaacagcagcggataagaagaataaaacaactgatgcggtggtatatccgcacaaaacagcatgaaaaactttacagtctaaaagaaaaactggaaatgccgtcatcggccgtcaaaataaaaaatataaacggctacatccgcctgaatcaaatacgttatgctttcaaaaagattataactctaaaaaaaggccgacggacagaatagtattaaaaaagagttttcacgggattttttctttcgttaaaccgttagtccggccaatgactttcggccaaaattcggtaacttttccattcacaggcaacccgccatgcccgccttccgatttcttaaccgtaaaacaaccacattgctttctgctgaagaactgaagtatcatatcagaggatgtacaaacaacagcagggagagccacaaaaaaatctacagctctttctatgggtatgccatggctatctgtcaccggtatgcagcaagccaggaagatgcaatggaaatactgaatgatggttttctgaaaatttttaaagaagttaaaaattttaccccggcttatgaagacgtgataagttcctttaaaggatggctgcggaagatcatgatctatacagctatcgatcatttcaggaaaaatcagaaacatcagctgaacagtgatcttgattcgatagtgtatcagcttccggcacggaacgaaaccgccctggaccggctttcgcacgaagaaatcatacgctgcatccagttactgacacccgcttaccgaacggttttgaacttgtttattattgaaggtttcagtcatgaggaaatagcagaacaactcggcatcgccattggtacatcaaaatcaaacctggcaaaggcccgaagacaattgcaaaaaatattatttaagcaaagcgaaattgaaataaacagaaatgtcatttgacgaattcgataaactgattcgggatgcagccgataatcatcatcccccctacagcgaaggcgggtggaagcaaatgaagaagctgctcgacaaacatcttcccgaaaagagagacggccgaaggtttgcattcttcctgctgctgtttcttttgctttcgggcggactttatactgcattgaaatacctgcctggaatcaacaagaaaacggccgttcatcaaaatgccggggcacctgaaaaatccctcattgatgaaaatgccgaaaataatattgctccggaaagaaaagtatccgatgaaatcaataaacccggccttgcatcgccggaaaaagaaaaaaataatttaattcctgcagacaataatgccgggaaaaacataagaaatgaaaatacgatgaagaaaaatgacgccgcaaaagatccgtcatccgtttccgtactatcatccgatgacaaactgcaaaaagacagacgcattacccgctccaaaaaaataaaaaccaatcttgttgcagaagcaaatgaagaaacggcacccgatcctttcagcagccaggaaaataattacgaaccgaaaaaggaagataccgcctttataaccagccctgaaaaaactgaatccgaaaaaaatattcctgttgaaaaagaatcacgctcaaaccagaaagaatccgaaaaagcaaaacccgaagaaacttcatctgctgccgatacaattctcaaaaaagaagaacgtacggaaaaagcgaaaatcaaaaaaggaggattcagaaattttttcttcaccctttctgcgggtccggatgtaagcgctgttcggattgatcccggcaaagttcaggctgcttacggtgtgggtatcgggtatgcatttacagaaagattttctctgcgaacaggcttttattcggcccgaaaagtatatactgcgcagggaagtgactataaggcctcccaaactttcctgaactactatcccaatttaaaatctgtggatgccgattgcagggtgtttgaaatacctgttcttattgattatgtgttcgatccccaaaaaagccaaacctggtttgccgctgcaggcctttctaccctgctgatgaaaaaagaaacttatggctatcactaccgttatacaggcagttcttactacacgtataaagagtggacgatacaaaatgaaaataaacatttatttactgtactcagtatttccggcgggtatgctgcccggttcaataaattgttttcgctgagggcagaaccttatataaaagtggcgctgagcggaatcggccatggaaaaataaacctcaacagcgggggtgttattttctcagccatcattaaaccatttgactactgaaaatccggcataaagaaaatatctgttatctgaaattcgttttaatatcactcttgtatgaaaacaaaacactcctgtatcatttttgcatttttacttctcttcagtattgtaatgattatttcctgcagtaagaatggaggaggaaccaataataactgcgcaggcgttaccataacggtaagcggcactaccaccaacacatcgggcgcaggcgctaccgatggcagtatttctgcttcggcctcggggggctccgggtttacattcaggctgaacaatggttcgtttcaatcgtccggaaattttaccaatctggccgccggcacctataccgtcactgccaaagactcccggggctgcaccggctcggcccagtttaccgttaatgtaagcgatccctgcagttccgttagttttaccgtaagtgcggcgccgtcttcgggttctccgtgcccgccgctgaatggcagcgttaccatttctacctctggaggaggcagcggttttacttataatcttaacgggtctgcttttcagtcatcgcctacctttactaatctgcttcccggaaattatactgcaggcgccagagaaagcggaggctgcataaaaacggttccggttaccgttggcacacttccggccggccctttattcactgctgtaaaatcggtcatcacagccaattgtgccatcagcggatgccataacggaacacagccgcccaattttaccaacgactgtactattgttgccaatgcaacgcttatcaaacaaagagccgtagacggaaatccttcctttatgccccccaccgggccgctgtcgcaggccgacagagataaaatcactgcgtgggtaaacgccggcggaaggtatacagattgattttttgtacccggctattatgctgctgtcggcatttgttgcgttgcactcttgtacttctattccgcttctcagcatttgctgctgcagtatgtaagcaagatgaagtatatgcaaagcacattgccaacagcaggttcaggcattcactacaatttcttttgtcagggtataaccatcttttacatttccggttaccacagccatttgttctgccaggctgtcctgaaaaataccgtctcccgcatttgaagtatcggctttaccgcgtgcagcataaagagacgaggtggtatacacctcgttcgatatatgttcaggaaatgccacttgtgttaccagcagcgattttcccgaactgtcttttatttccagatgaatatgcggcgcccggccgctgtaccagcccggatagatggaaacaaaagatacttttccgcccacatccgttgtttgtcttccgcgcagaaaatgagcagcgctaaaatcggaccgctgcatagaatgattgccgtattctgaataatttccatctttatcgcagtgccatatgtctaccagtgcacctgccagcggtttgcaatcattgtttttattgagaatggtaagatggatcagcaaggcaatgccctgcctgtcccttgtgatattagcctgcaccagttctgctggtgttttggtaggaaaaggcccccgcgtttcgcggggcgaaagattgcagtcagcatcttgcggtgtgccggtgttttttttcttattacccaacagagcagaaagggtaaacaatgagcccagacccagcagcccgctttgcagaaattttttccgttgcataatttcaggcattaacaataaataaactcagggaagcgaaccggtaaagttatggaagaacacaacacgttgtgttaaataagcgatttcagcttttccaccaccgtatctatttcttcttttgtattatgcctgctgaaagaaaaccgaaccgccacgcggttggggtcgttgctgatggcacgaatgacatgcgatccctggtcggctccgctggtgcaggcgctgccgccggaagcacagatattgttgatgtcgagattgaacaacagcatttccgatttctcggtttttggaaacgacacattcagcaccgtatataagcttcttccgttataatcgccgttgaagcgaactgccggcaaatgcttcatcagttgttcggccatatacgatttcagcgactgtatataagcgctgtctttttcataattttcggtagccagttccagcgctttggcaaaacctacaataccataaaggttttcggtaccggcccgcatatttctttcctgccctccgccgaaaataaacggcttgatctttacattttcatttacatacaaaatcccaacgcccttcggtccatgaaatttatgccccgcggcagaaatgaaatgaaccggagtattgcgaagatcgatggggtaatgccccaccgtttgtacacaatcggagtgaaagatggcgttgtattttttacaaagattgcccaccgcatctatgtcgagcaaattaccaatttcgttattagcgtgcatcaggcttaccaggcatctttcttcatgcgcggccagttgttcttccagatccttgagatcaacatggccgctggaaagaatttttacaaaactgctggttaccccatccatacgatcgtaatgctctaccgtatgcagcaccgcatgatgctcgataggagaagtgatgatgtgccggcaacccaggtcgcgaagggaagctgcgatggccgtattgttgctttcggtaccgccgctggtaaaaaatatttcagccggatgggcatttaaaattttcgctaccttttttcttgcattttctattgccagccgtgtttctctgccataagaatatatcgaagaagggttgccaaaatgagtggtcatatagggcagcatagcgtccagcacttgcttatcgagtgctgtagtggcggcattatcaaagtagatgcggttcatatgctgtacccaaaagcggtatttggaattttaaaaccgggtgcaaagataagtacaggaagggttatttgcgaatacagccgggtttatatcaatgtcagtatataagcccgtttgttctatactaaactcatatatcaaagagattaatccttgagaagaaagcatataattgattaaaataatctaactttagcagtactcctttaccctttattaaacggcactgttctgataagtacaaacagaaacggcatacccgtaaactcaaaccttacaaaaacaggatgttgttatttcagatcagcaaacaattaagctgtgattgtggaatgtccggttttataaaacaattatcggttgccaggctgaaggtaccgaccaaagaaatctttgggcgatatgcaaagctttacctgctctcttgtttttgggggaaccgttttacaagggcatccggcttacaaagaacagcagccagaaagaagaattgtaatagaaaccccgggggttaaaaatctaaattttagagttgaaagacaaaatagaacaatgagataatgtgaaataaaaaagcccccgataaacgacgagggcggcgttaatgatttctcaacggaaaaatccttattgtgatttgcttcgttgtaaagttagaacttttattaaaaaaaatatcatggataaaaaaattcttggacttgatcttggcgtttcctcaataggctgggcattaatctgtgaaggagagaacaacagatcaatcctgggtttaggaagccgtataattccattaaatacagatgagaaagaggaattcagtaccggcaacgcaatttccaaaaaccaaaaaagaacactaaaaagaacccagcggaagggatatgaccgttaccagttgagaagaaaaaaactcgttgagttgcttacagaattccgaatgatgccggagaaagaacttatgaacatcagctcactcggcttgtatggtttaagaaataaggctgtaaaagaaaaggtggaattaaaagagctaggcagaatattctatcatcttaatcaaaaacggggatataaaagtagccggagtgatgcaaacctggataaaaaagatacggaatatgtggcagcagtaaaaagcagacatcagcaaataaaagaagccggatttaccattggtcaatatttctataacaaattacttgatgacaaatactaccggataaaagagcaggtttttccaagagaggcctatatcgaggaatttgacgcaatttgtacccaacaaaaaaaataccatcctgtccttacagacgaagtaattcacaaactaagaaatgaaataatttattatcagcgaaaactgaagtcacagaaagaactcttaagcatttgcgagttcgaaggacaagagcgaaacgatgaaaaagggaatatcatttttacagggccaaaggtagcacccagaagctctccgctctttcaattctgccgtatttgggaaacagtaaacaatatttcgcttaaggttaaaaatcccgaagggtcaaaatacaaatgggcagactttattccttcccttgagcaaaagaacgagatagttaagtatttaaatacgcatgccacattaagcaatgcagagttattgaaaatactgaacctgaaaaaggaaaatgtatatttaaataaacagcttgtcaaaggcattaagggcaacagcacctacacagaaattgacgctgtactaagcaataaaaaactactccaatttactgttaccacaaaagaattgccatccaaagcctatttaacagataaaaaaaccggcgaaatgttaatggaaacttcgggatgtgtagtggatgcaagcattgaaaaagagccattttatcagttgtggcataccatttactccattaaagacatggatgagtgcaagagagctttaatgacgaggtttgatattccggaagatgaagccgaagcattagcgaaaattgattttaccaaacagtcattcggtgataaatcagcaaaggcaattcgcaaaatccttccgtatttgatgcagggccatcattatgctgatgcatgcagcttagcaggttacaatcacagcaacagtttgacaaaagaagaacagcaaaaacgaaacacaggcgatttgctggaaaatcttcctaagaacagcctccgtcagccggttgcggagaagattctcaaccagatgataaaccttgttaatgccataattgataaatatggaaagcctgacgaaatcagggtggaactggcaagggaactgaagcaaagtaaggatgaaagaaatgaagctgataaacaaaactcgctgaacaaaaagctgaatgaagaaattgcaaaacgattaagggaactcggattaccggaaactaagcgctttattcaaaagtacaaattcatatttcctgctaaagataaaaagtggaatgaagcacaggctattaatcagtgcatctactgcggcgaaacatttaacctcactgaagcccttgccggcgataattttgatgtagaccatatcataccacaggccttgttgtttgacgactcccaaaccaataaagttctggttcacagaaaatgtaataaagacaaaacaaacacaactgcttatgactatatcgcttcaaagggcgatcaggctttggccgactatatagctcgtgtggatgattggttttcgagaggcgtaatctccttcagtaaaatgcaaagattaaaaacctcttacaacgattatctcgaaagaaaaaaacagaaaaaagaaacacaggccgataaaagactctgggaaaactttattgacaggcaactcagggagtcggcctatatatcccggaaagcaagacagatattaaaaaaagtatgcaatcaggttcacactaccgaaggtacagttacggctaagctgcggcagctctggggctgggaagatgtgttacttcaattacaattacccaaatacaaagaactgcagctaacggaaataaaggaatggcaaagcgaccatggcaagagaaagcatcaaaaagaagaaataaaagaatggagcaaaagagacgaccaccgacaccacgccctggatgcgttgacgattgcctgtaccaaacaagggtttattcaaagaataaataccctgaatgccagtgatgtcagaaacgaaatgaataaagaagtagaaggcgccagcttagagtacaatgacagattaaccctgctggaaaaatatcttttgctgcaacggccttttacaaccgatcaggtaaaagaagaactggcaaaggttttaatatcctttaaacccggcaaaaaagtagccagttcaggtagccggaaaatgaaagtaaacggcaaaaaacaggtggttcaaaaaaatattattgtaccaagagggcctttaagcgaagaaagtgtatacgggaaaattaaaatcaccgagccccataaaccggttaaatatctttttgaaaatccgcatctgattttcaagccatacattaaagaaaaagtggagcaacgactggctgaatataacggtgatgtaaaaaaagcaatcgcatcgttgaaaaaaacaccactgtacctagataatgaaaatacaaaaatactggagtatggaacttgctataaggaggaagtggttatcaagtatccggtcgcttcccttaaagtaaaagatattgaatttattgttgatagaaaagtgagagaggttattacacaacggctggaacaattcgataataaagaaaaagaagcttttaaaaatctggaagaaaatcccatatggtataacaaagaaaaaaagatccccataaaaactgtccgctgctttaccaggctggctgctgtagagccggtaaaaaaagaccccgacggaaatatcattggttttgtaaaacccggaaacaatcatcatattgccatttatacggatgagcatggaaaaaaacaggagcacctttgctcattctggcatgccgtggagcgaaagaaatacaggcttcctgtgatcattaaaaatcccaaagaggtttgggataaaatactttcgcaaaaagagaactacccggatagttttctggaaaaactgcccggagataaatggatctatgaagtaagcctgcagcaaaatgaaatgttcatattgggtatgaccagggaagacttcgaaaaggcaataaaagaaaataacaaggcagaattaagtaggtatttgtatagggttcaaaagttaactgtgattggtaaggggcaaattaatatctggttcagacatcatttagaaactgaattaaatgactctggcgctgcaaaaatcagcaggaggtacatcaacattcaaagtattggagcatttctaaaagaaaatcctatgaaaataaaagtggaccggctgggtgatatttctcctgttaaaaaatgataatcttaaaaaaaagtttataaattgttgcatgcattaaaatcatattgcagcaatgaggcaatgaacaacttgtccatctgttatatttgaattaaaccattctatataactaagcggaccatctgtattgaaaattccgccatcccgaaatgccgagaaaaacacaaatccgcatccaagatataaagcaaaaaatcacacattgtgtgttatacattttgtgttacacattttgtgtaatttttctaccttcgtggtttatgaaaaaaaccggcaacccatttataacctccggctatgaaggcccgcaatatttttgcgaccggcaaaaagaaacatccctgctgttatccaacataaggaacaatatcaacaccaccctgttcgccatacgcaggctgggcaaaacagggctggtacggcatgtgtttgaacaacttgcccgcaacaaaaaaatgacctgcatctatgttgatattctcgctaccagcagcctgaaggaattcaccagccagcttgccacagccatttacaaacggtttccggagaaaaaaggaattggtcagaagttttttgacatcatccgcctgctgcgaccggtgataagctatgacccgcttacaggcaatccggaactgagccttgacctggggcagcccaaacagtatgaaaaaacgattcagcaattattttctttccttgacaaccaatccataaaagtgattattgccattgacgaatttcagcaaatcctcagctacccggaaaaaaatacagaagcactgttgcgtacctatatgcagccgctgaaaaacacccgttttatattctgtggcagtaatcaaaaaatgatgaacgagattttcaacagcgctaaacgccccttttacggaagctgcagcaatatccatcttgacctgataagcgctgcggaatacagccggtttatacaaacacagttcaaccggcataaaagaaagatcaatgaagaaagcattgatttcattctccatttcacgcaaagacatacttattatacccaggtgctgtgcaaccaggtatttgcaacagacagcagaaatatttccattgaaaccgtgcatgccgcctgtgcagctatactggcacaaaatgagaatacatattatcagtacaaaaacctgctcactgaagcgcaatggacattgcttaaagctattgcaaaagaagaaaaattaaaaaaacctcacgctttaaactttataagaaagcaccaattgggcacaccttcgctgatcgcaagaggaattgaatcgctgctggcaaaagaaatgatttattatgaggccggcgtacccgaaccttactactcggtatatgacaaatttttaatgcggtggctgcaaaaaacgttttgaactttacacagcacagaaaccgttgatgtgatttctcccggttttacctcttttagcttctgcactattgttttcttatccatattgaaacaaaaattacccgctgaaataacatcattccgcctaaagggaattaattctataaatggtgtataaaaaaataaaccggaattcctgtcgtttaaataaaaccattaaaacatccatatcccatgattaagcggaccatctgtattgaaaaccccgcccatctcaaatgccgcaacgaccagctggtggtaagcttcaacggcataaaaggcatggaagcagtacctgaaaaaaccgcacccatcgaagatatcggcatacttgtattggagcaccagcaaatcaccatttctcattacctgctcgaccggctgctgcagaacaacgcagccctcgtaacctgcaatgctacccaccatccctccggtatgttgctgaacctggatggcaacaccgtacaatcagaacgcttcagggcacagatagaagccagcgaaccgctgaaaaaacaactgtggcagcaaaccgtaaaagcaaagatctttaaccaggccaaactgctgggtaaatacaacataccggctgaaatgctgaaaacctacagccagaccgtacgcagcggcgacgcagataataatgaagcaaaagctgcggcctattactggaaaaatctgtttccacccgcctggatgttttaccggaaaagagatggtgcccctccgaacaaccttttaaattatggctatgccatactgcgggcctgtgtggcaagggcattggtcggctcaggacttttacctacccttggcatttttcaccgcagccggtataatgcattttgcctggccgatgatataatggaaccctaccggccttttgtagatgccgtagtgaggagtattattgataaaacctcgcatgtggaaacgctgacacaggaattcaaggtgcagttgctgaagatacccgccacagatgtattgctggaagatgaaacaagtccattgctggtggccgtgcagcgtacagccgcttcgctggccagatgttttttgggcgaagaaaaaaaactgctctatccaaccttgccatgaatccggttccgaaataccttgctccggccccgggcggggcatccggaggaagctttgaccgcttaaacgcttaccgcattatgtgggtacttgtattttttgacctgcctaccgaaacagccaaagaccggaaaatatatgcccggttcagaaaaagattgatcaacgatggctttgccatgttccagttttcaatttacctccgccattgtgccagcgctgaaaacgcccaggtacatataaaaagggtaaaggcgggactcccggaaaaaggacatgtagtcatcatgaccattaccgataagcaattcgggatgattgaagtattccaggggaaagatccggcctctgcggccgaagtgcctcaacaacttgaactgttttaaaaacctggcgaggcaccatctctaaaattcaggtatacgagaaaaaaaattgctccgggatgatcattccggagcaaaaatcttcagtttttttagcctgactaccttttcaaaacattgaaattaagggcttttgccatattctgttgttatcaaagatcgtcagaactgaaattgaaagcaaatcacaactttaccaggcgaagcgatacaacggcgttgagttgttatcaaagatcgtcagaactgaaattgaaagcaaatcac

SEQ ID NO: 1747 - DNA, 16909 bp, synthetic construct
  misc_feature 1..16909: note = Synthetic
  source 1..16909: mol_type = other DNA
ttatttcaatacgacgaggaggaaatgcaaaataacaattcacaaaaagaagaaaatgagcaggagagcagcagctagtctctgtatttcaatctaaaaaaattttacccaattttctgaacgctaaattcaaattttaagaatatggacttaacaaatgatattttacccttggatttgccattagcaaattcatcaataattaaagtaataggtgtaggcggcggtggtggaaatgctgtaaaccatatgtactcacagggaattgccgatgttacatttgttctttgcaacaccgacattcaagacttggaaggttcttcggtgcctataaaagtacaacttggaaaagaatcaacagaaggattaggcgcaggaggaaagcctgaggtagctgccaaagccgccgaagaatcagtggaagaaattaaaaacatgcttgctgacaacaccaagatggtctttatcaccgccggaatgggtggtggaacaggcacaggtgcctcccccgtaattgcaaaaacagctagcgaaatgggcatccttactgtaggaattgtaactattccttttgcttttgaaggaaaaccaaaaattacacaagccttgaaaggtgtggcacgtctaagccaacatgtggacgcactgctaattatcaacaacgaaaaactgaaacttatctatccggacttggaactttccaatgcttttgctaaagctgatgatatattaagcaatgcagcaagagctattgccgaaattattacagttccgggctatatcaacattgactttgctgatgtaaacacaattatgcgaggcggaaaagtggcgattatgaataccggatatgcagaaggcgaaaatcgaattagcaaagccattgatgatgcactgaattcaccgttgcttaataccaacgatgtacatggcgccagcaaagtccttctcagtctctactgctctacacaaaaccagattaaaatggaggagatttctcaaatccacgactttatggcggaagtaggcgaagatgtaaccgtgatttggggtgctagttttgatgacacactgggtgataaggtaaaaataacccttattgccaccggatttgatgtaaaagacatccccggtatgcctgaagatttattggaagaagaattgccaagcacagaagttgcagaaggagaagatagttatgaggctgaaaatatgtcgtctgtgatgaaacaagcagaaaccaaaaaagcaaacgacgaaaaaatagaaaaagccatgagtgcattctacggcgactcggtaaagacgcagaaacccgtagaaaatacggaggcggagacgtttatggaaactatcccgtttgaaattgaagaagaaacaaccgaagaagaagatattcccactattgacattgatgatttggaagatgatgagtatctcaataaaatgaaaaaagaaccggcgtggaaaagaaaattactaagaaaatagaggaaacacaatatggaaaaactatttgaacaaataaacaatgacatcaaagcagcaatgcttgcacgagaaaagatagctttggaagcactccgaagtataaagaaagagtttttggaagctaaaaccgccaaaggtagcgacggcactttgaaagatgagcaagctatcaagatcatgcaaaaaatggttaagcagcgtaaagaaactgctataatctacaccgaacaaaatagaccggaactggctgaaaaagaattggcagaagcagaagtgattgaaaagtacctgcctaaacaacttgacgctgctgagttagaaataattctaagcgaactaatcgcagaacttggtgcttcaggtccacaagacatgggaaaagtaatgggtgctgctaccaaaaaactggcaggtaaagctgatggacgaatgatttcagagatagttaaaactattttgaacaaataaaataagtttgattttctatctaaaaatcaactcatataaaaaaggataagactgtggacagcttatccttttttattgcttccttttaccaaaaaactttgattaccttttctttaatagtaccttctcttgatttttttcgactacaatataaaatatctttcgcagttcatcgaaatccgtaggtgcaaaaaccacttcacgcatattcagcacgtagtccgttactattttcccatcttgtacagctattgtatattgaaaatcaaaagcaccagaacttagcttctcttgcgcaggttgcagatgttgtataagttcataattttcaggaatttcaatttccgaatgaatatggatagacttaggcacatcaaactcaactggtaaagtccttccttcttctaactgctccttaaataagaaactgctaaacagaagcggattaaacgaaatattctcgcctgactgctgcaactgaatagaaaatccaaagttttccgttactttatcactcaagttatccaaatgattggcaagttgataatcagatatttgacctaacttttcagcttcgtttctcaagtttgacgttttgttgcgatgaatattttccctaaaaaacatagccgacaagttaccatacacctgttccaactgaccttttatgcgaccattttcatccagacgtccgataatatttacatgtgtatctgccgaatttatatcagtgaggtttacatttccattgctctgaccctcggaaagcataaatgaacgtgcaagcgttcgtccgttatcagtcatcaagtcagacggcaacatgtttaatccaccgtactctgccgaaccgtccaaataatatttttctccatcgctagtgtgtacgcagataatataagttttaattcgctcataggttggaaatgacgcagggaaacgcccttctgaacgcaaattgacaagtataggataaacgtaaaatttatttctatacaaagctcgcatcaacacagcattaatctgcgaattgcttcccacacctttattaacagcctcttgcggctcatcataaagcgaataaacgccattccacttgatttttttctttacaaaacgatagatagcctcaattttctcgcgttcagatttaatcggttttagcaaggctttcagttctttgccataaaacatggaaccataattattcttattaaattgcgactccacactcactcgattctccacatcttcccacttgtccgcataaggtacataccccatatagcgagtagcaagcagttccgagcgcacaccgggcgtataatctttcatacaccatattctatccactttcttaaaagccggaatatcctgcgccacataaagaatccgtctcgcattccgtccggcaaactcgctttggcttacatccgtaaaaccgggatgttccgtttcggcatgtgttttaatctcgaacggacctttaatttcctgatttaccacaaaagcatcgtaatagaatgtttcataaatagaaaacattgtaggaatatccgactgaaattcccaattcaaattggcgtactccatagaagttacccgcttaaacttatactccaacacgccgcccactttcgcattagggattgtaaactgaacttgcgacagcgtatcattcattctcacgatacgaacatcctcttttttcagtttatttctcactatttcaccattctgcaaaacataagaccaagcctccaccccttcgataagttcctctctataaggcgaatggatattataaaagggaatttccaccgttgcttgggaaagtccgccggatttaagaattttcactttacgctgaaattccgtttccagcacataaggaatcatgtcgtaatatctgttttgagcaaaacctcgcgaaggaatttcaggtgttttaagtctttttcgtaaggtgtatttcttagacgaaatggtacgataagcgtattccgagataataaccgcatcagcagtagtatctttggcaaaaacattggcttccaactcagccatacttacttcgcctagcttatacgcatatttctgtgcagagattatccctaccgaaaaaataaaaagcaaaaggaacaaatatcttgtatataaggaaattttaaagttagtcatattttttattgaaattatcttgattttttctaaaacagcaaattagtccgtttttttagtaaaataaaaaaagaatcaatcccgccacaaaaactttcagaacgtaagtgctctatgtttttttagacacaaaaagtaaagaatagtttattctgcaataagtcttttttcttaaaaaagcacaaaaaagaggttatcatgaccgacaacctctttatctaaatttttctatcagaaagcttatactaaagcaatgtaaagatctttatcatcttctctgaagcttactttaccttcacgtgctaaccaacccaaagcaacttgaacgtctctttgagtaagtttagtaacttttgcaagagctttaaattccatttcaccgttttccaatgcagtccatactaaacctgcattcgtaccaattttttcgataaacataattattcgtttttgtgtataaaattaataaatgtttcaaaatcagccacaaaagtagtaaaaatatatgttataaaacatattttccttgactttaacttattttttaataattttaacatttccaacttgcgctttttgttgaatttccacttttttcgaccattttttagccaaacttttcatgccatttcaagaactgctgagcgtgtgcttcatcgtatttactaagcttttcgacgattcggtctattttaagctcccgatctaacttcgattttgagaaaaatttatcggcataacaaataatttgctcttcgatactcacgggacacatttctcgatgcggcacaggcaaatttcttttttcaatccactcaatgctcaatcccgttccggtatgtcgctcacacacaagggcatgacgcggatagccttcgttttccacaatctcagaacctaaatagccatgctcaatatatctatgttttccgaaacactcaacttcgggtgcatccgtcaaaaaaattcctatatcatgtagcatagcggcttcggctataaactgcctgtcagcaccaaactcaggatgcttatccaccacttccaatgctttatcgcgtacttggcaactgtgttttaccaaaattctgtatagttttgattttttattgtaatatttttcaataatttctaatgggttcatcttactttgtttcagcgtaaaaagacagaaaaccgaaggatttttacaacctgaatttcctgtttctaattttaaaacgtacttttgtaacactaaaagagagtgcaaagatataaaatctgactgagaatagaaaacagcagaaaggcacaaaaagttcaagcatgaagtatatagacgtcatactgccattgcctttgggtaatcgatttacctaccttgtccccgatgagtggcaggacgaggcgcgtattggtatgcgtgtagttgtcccttttgggaaaaagaagatgtacacaggcattatttgcctgattcacagcaacaaacctgaactttatgaagtcaaagaaattatctgcctactcgacccctaccccattttgcgacatccacaactaaagttttgggaatggattagctcctactaccaagcttatatcggcgatgtatatcaagctgccattcccgccggactgaaattggaaagtgaaacaagagttcgcctaaatgctcaatttgaagatgagattagccttactgaaagagagcataaagttatggatgctttaaaggatggcaaaatctttaacctttccgaactgagcaatgccacggaaatcaacaatattatgcctaccatcaagcttttgattgaaaaagacttgatagaaataagcgaagaaattactgaaaaataccgtccgaaaacggaaagctatattcagctaagcgagtttgccgcttcggaagaaaatctgcgtgagattttcgatcaactttccagagcaaaaaagcagttggatattttgatgaaatacattgagctatccaagtgccttaccaaaaacacgctaatagaggtttcaagaaaagagcttttggaacaatccggctgttctgactctgtgctccgtgccttgatagataaaaacatccttgaagtttatcagaaagagattggcaggctggatacatcgcacgtaaaaacggaagcaaaacatccgttaaatgagtttcagcaagtggctttgcaagaaatttacaaagaatttgcaagtaaaaacaccgttttgctgcacggcgtaacttccagcggcaaaacggaaatctatatccatctgatagagcagacgctgaaagaaaaaaagcaagttctctatttagtgcctgaaattgcgcttaccacgcagttaacctctcgtctgaaacggattttcggaaataagctggcggtctatcactctcgtttttcggatgccgaacgagtggaaatttggaataatctattgctagacaacggttatgaaattgtaatcggtgcacgttcggcgattttcactcctttcagacagttgggattggtgatagtggacgaagagcacgaaacaagctacaagcaatttgaccctgctccacgctatcatgctcggaatgccgccatcgtattggcatctatgcacggcgcaaaaacattgctcggttcagccactccggctattgaaacctattttaatgccaaaaccgataaatacggctacgttgagcttaatcagcgttaccaagaattggaactgccggaagtgctggtggtggatatcaaagaagcttatcgtaaaaagcagatgaagggacatttttcgccattacttttggaaaaaatcaaaactgctctcgaccgctacgaacaggttattctatttcaaaacagacgcggatacgctccttacatcgagtgcaaagcctgctcgtatattcctaaatgcaaaaactgtgatgtgtcgctgaccgtacataagtatttgaacaagctaacctgccattactgcggatttacggaaaccattccacagatttgtccggtttgcaacacgccaaatctcgagaacaaaggttttggaacggaacagatagaacaggaaattgaggaactgtttccacaagcgaaagtggcacgcatagacttggacaccacgcgcagcaaaaaatcctacgaaaaaataatcaccgattttgaaagcggcaagataaacatactcgttggcacacagatggtaaccaaaggactggactttgagcgggtgagtttggtggggattttgaatgccgataatatgctgaacttccctgattttcgtgcacacgaacgagcttatcaactgatggcacaagtaagtggtcgtgccggaagaaaaaacaaacgaggtaccgtagtacttcaaacccgaaatccggaacatcctattatcggacaggtaattcgcaacgactatgctgccatgtaccagacacaatgtgccgaacgacaactatttcattatccaccttacacccgactgatagaaattaccctgcggcacagagacttcaaaattgtggaaaaagcagcacaaacacttgcaaatgaaatgcggaaattcttcggcaagcgtgtattgggaccgaatataccacccatttcccgtattcagaatttatatatcaaaaacattttgctgaaagtagaaatttctgcttccagcgagtatgccaaagaaaatctgctggaaatgattaacttgctgctagccgaagcgccttttaagtcggtaagagtgagtttggatgtagacccgtattagtcagcagagtggagaatggagagtggagagtggagtgtgcagtaaaatagtaagcagtttatagtaacagtccgcagtttgttgtttttgaataacgtatttcaggtattgacatctgacatctgacacccgacagtcaacatctgtcaaaaaaatctgcgcaaatccgtctaatcaacgtaatctgtgttctactatctatttttccttccttttttttacttttctcagctatttgttttatctttgcacacttaaaccgaacttttaaatccaatttaaagttcacaaggcaaagtacattacattttgtcaaaagataaaaacgcagatattttgcttttttcgctcacgaaatttaattaaactatctacaaaaatatactaaaatgcaagaaatcaaattttttagtggcgagaatatcccactcgaactgcacaaaacccgcatcgtgcaaaaacttcacttggttcccattgaacgtagattggaagctctttatgagggtggtttcaacacattccgcctaaccaccaaagacgttttcctggatatgctgaccgacagcggcaccaacgccatgagcgacgagcaactttcggctatgatgcgtgctgatgatgcttatgcaggttcgcaaagttttatgcgtctgcaaaaagccgttgaagatgtattgggtaaaaaatattacctacccgtacaccaaggtcgtgcagctgaaaatattctcgctaaagcttacgtgaaaagcggcagcttaattccgatgaactatcactttaccacttccatggcgcatattaccgagcatggcggtaaaattgttgagttgctttacgatgaagcttacgtaatcaattccgagcatccttttaaaggaaatatgaatatcgaaaagttggaagaaattatccgcttaaacactccaaaaaacatcccatttatccgcatggaagcttctaccaacttgattggcggacaaccattttcggtgaaaaacttacgtgatgtacgtgctttggctgacaaatacggcattagactggtactagatgctagtttgttaggcgaaaatgcttatttagtgctaaaaagagaagaggaattcaaaaacagtagcttaggcgaaatcatcaaaacaatgaccgacctagctgatattgtttatttctcggctcgtaagttaagttcttctcgcggtggtggtatctgtaccaacgacatcggtatttacagagaaatggaagctcttataccactttacgaaggtttcttgacttacggtggtatctctgtacgtgaaatagaaagcatggcagttggactttacgaaacgcttgacgaaacagtgatttgccaaagtccgaactatatcgaatacctggtaaatgcattggataaaaaaggtgttccggtaattaaacccgccggagtactgggtgcgcatattgatgcgatgcagatttgttcgcatattccacaatcacaatatccggcaggctcattggctgctgcgctataccttatttccggtattcgtggtatggagcgtggttcggtatctaatcagcgtgatgagtacggcaacgaaacttatgccgatatggaattggttcgtctggctattccccgccgtgtgtttacgctatcgcaaattaagtacgtagaagaccgtgtacactggctatacctaaatcgtgaattggtaggtggcttgaaattcgtttacgaacctccggtgcttcgcttctttatgggtggtttggaaccaataaacgactggccacaaaaactgatggcgaaatttaaagaagattttggtgatagcttataattagctaatccatctaaatagaaaatccccgcacgagtgagtgtggggatttttttgtattattaacagacaacctctgaacaaaaaaaatgccccgcagataggcgaggcactaaatgttttcacaacggaataatccttattgtgaattgcttcaatatttgtatgacaaatgtaatggaaatatttcaacttaaaaagttttttaagttaaaatttgtttttacctttggaaaaacaatataacatatagcaccatgaaaacaattttaggattagatttaggttcagcttctattggatgggcactaatcaacgagaataataacaaaacatccattatagatttaggttgtagaataattccttatgaaggcacagaaggaaaagattttgcaaaaggaacaggtgaaagtaaaaatgctcttcgtacaaaagctagaacagcaagaagaggctacgatagatatcaattaagaagaaaatatttggttaatgctttagtaaaggttaatatgtatccagatgaagcattaagaaacttacctaaaaatgagttatgggcacttcgaagtaaagcagttcactctcaaataacgcttaaagaattagggcgattgttgctgtggttaaatcaaaaacgcggttataaaagtagtcgtagcgatgcaaacttaggaaaaaaagatacagaatatgtttccttggtaaaaagcagacatgaaaagataaaagaacttaatctgacaattggacaattcttttacaatgaattatccaaaaacccttattttagagtgaaagacaacatttttcctcgagaagcatacattgaagagtttgacacaatctgtaatactcaaaagtctttttaccctgatgtactaactgaaaattttatttcaagattacgaaatgaaattatttactatcaacgtcctttgaagtctcaaaaaggattggtttcagtatgtgaatttgaaggattttggaaagttgggcaagatggaaaagaatattttgttggcccaaaggtagcacctaaaagttccccgatttatcagctgtctaaaatgtgggaaaacattaataacattaaaattgggacaagaaatggtcaaaatattgaacttacaatcgagcaaaaacaagcaatctttcatcatttagacaacaatgaaaaactaacagtaacagatttactgaaaattttacatttaaacagaaaggactgtttcattaacaaacaaatagagaaaggaattctcggcaatattaccaaacatgccattcaacaatgtttcgataaaacagaagaatacaaccaccttttatctttaaacttaaacattattgaaaccgaaagacaaggttacttaattgataaaaaaacaggcgagattttaaatgaaaaacctattcgctacattgattctaacattgaaaaagaacctttttatcaattgtggcacacaatatactctattcaagatacacaagagtgtagcagtgccttacagacaagatttaacattgagcctgacgttgcagataaactagcaaaaattgatttcaacaaacaaggttttggtaataaatctactaaggttattcgtaagatattgccgtacttgatggaaggcaacaaatataacgaagcaatgagctatgtgggatatgaacattcaaactctttgacaaaagatgaaaacttgaaacgtaaattattagacttattaaaacctattgaaaaaaactcacttcgtcagccagttgtagaaaagattctcaaccaaatggtaaatgtggtaaatgtaattattgaaaaacatagcgaaaaagatgaaaatggcaatataattaaatattttaaatttgatgagataagagttgagttagctcgcgaacttaaacaaagtaaggaagaacgcaatgagacagacaaagctatgagtaaacgacagcgtgaaaacgaaaacatagcaaaacgcttagctgaatatggtctcagagcaacacggaacaacattatcaaatggagattgtatgaagaaatcaataatgaagaaaagaaactaaatgctatttgtatttattgtggtcagcctatttctttaactgaggctataaaaggggacaatattgacattgaacacattattcctaaatcaaaactttttgatgattcacaaagcaacaaaacactcgctcatcgtcattgcaatgcgactaaaagtgacagaacttcatatgactttatgaaaagtaaacctgccgaagtgtttgaggcttatgttgaacgtgtaaattccctgtattctaatttcattatcaataaagctaagcgtgataagctattgatgccggaagaaaaaataccctacaattttatagaccgacaattgcgtgaaagccaatatatagcacgaaaatcaagagaaattcttcaaacaatttgtcataatgtgtgggctacaagtggctctgttactgctgaactcagacacttatgggggtgggatgatgttactatgaatcttcaatttgataaatacaaggaacttggactgactgaaattgtagaatgggaaagtgagcatggtaaaaacaagcatcaaaaagaagttatttcaggttggagcaaacgtgatgaccatcgccatcatgctgtcgatgctcttactattgcctgcaccaaacaaggctatatacaacgtttcaacactttgaatgctgaaaaaaccagagaagacatgaagagtgctattgaagaacgttctgttgtttttaatgagaaacgctcattattagaaaaatatattattagtgagcagcctataactgtttcggaagttgaaaatgccgtgtcaaatattttagtttcctttaagccgggcaaaaaggttgcctcgacaggaaaacgcaaaatcggaaaacgtgggaataaaaaagttgttcaaacaggtattattatcccacgtggagctttacatgaagaaagtgtatatggtaaaataaaaacaatagatgagaagaaacctattaaatacatttttgaaaattctcatttaatcttgaagccatatatcaagcaattagttgaagatagaattgaaaaacataatggagatgttaaaaaagcaattgcctcattgaaaaaagaaccaatttttcttgacgacaataatgaggtagaattgaaatacgcatcgtgctacaaatctgaatatgttattaaatatcccgtagatacaagcttcaacaaaacagacaaagttgttgacaaaaagataaaggctattttactgcaaagattaaacaagtttgacaacaaacataaagaggcctttaaagatgtgcttttagaggacaaactaataataccttggtatgaagatgaaggcttagaacgtcctataaaaacagtccgctgctttaccggattatccgctgttattccgataaaaaaagataaaaatggccaagatattagttttgtaaaacctggtaacaaccatcatattgctatttatacggatagagatggaaataaaatagagcatgtttgcacattttggcatgcagttgaacgtaaaaaatacggaattcctattgttattaaggattcatcagaagtatgggataaaatacaaatgctaccagagaattcttttccagaaagttttcttgaaaaacttccggaggtccatttaagactggaattaagtatgcaacaaaatgaaatgtttgttttaggaatgaaaaaagaagaaattaatacagcaattgcctctaatgataaaacagcaataagcgacaacttatatagagtacaaaagttatctgaaaaaaactatatgtttaggcatcatttagagacgcaaataattgatgatgaaaactctaaaacaagtaaaagatacattaatgttcgaagtttaggagcattgttcaatttaaatccatataaaattaaaattaacatactcggcgatattcaaacagaagaaatatgattaaaaaagcactctactttggtaacccagcatatctaagtctgcgaaataagcaattggttattcaattacccgaagttgttaaaaacgagacattgcctgaaagttttaaagcaaatgccgtaaaaactattcctgtggaagatattggcgtggttattttggataataagcagataactattacacacggactgattgaggctttgcttgaaaacaactgtgctttaatcacttgcaatagttctcgaatgcctgtaggcttaatgttaccacttgcaggaaacaccacgcaaacagaacggttcagagaccaaatagatgcatctgttccacttaaaaagcaactttggcaacaaaccgttcaggctaaaatccaaaatcaggcttatgtgttggaaaacaaatcgaaagctgtggtaaaaaacatgcttgtttgggcaaatgatgtaaaaagcggtgacccagacaattacgaagcacgtgcggcagtctattattggaataatatttttcctgatatacaaggctttgtgcgtggtagagagggtgaaccgcctaacaatttgctgaattacggatacgccatccttcgggcagttatggctcgtgcgttggtagccagcggacttttgcctacgttgggcattcatcatcgcaataagtacaatgcttattgtcttgctgatgatattatggagccttatcgtccttttgtggataagttggtgtttgaaattatggaaagcggaatagatatttccgaattaacgcaagagctgaaagcgaaactgcttactattcctgttctcgatgtggtgattaacaatcaacgaagtccgttaatgattgctgttggacaaaccactgcatcactatataagtgtttttctggagaaatccgaaagatcaaatatccatcttttgaataatcagcttcactttatgtaagttgtagtaataattatggaaaggtttagcgaatatagaattatgtgggtatttgtatttttcgatttgccgaccgaaaccaagaaagaccgaaagatctacgcggactttcggaaaaaattgattgaaaacggcttcactatgtttcaattttccatctatttacgacattgtgccagtagagaaaatgccgatgtacatataaaaagagtaaaaagctaccttccacccgcaggacaagtcggcatcctctgcattaccgacaaacaatttggaaatatggagttgtttgtcggtaaaaaagagaaagaagtcaaaacaccctatcaacaattggaattgttttagcataaaaaatcccgcctttcgagcgggatttttcacatccgaacaacgatttttttatttctaatattccttataacttgttgtgttttaatgaaatgttgacatcctgttgttcagaatatcaaagatacaaataattgaaagcaattcacaactaagtacactgaacccgcattgctaccaacgttgttcagaatatcaaagatacaaataattgaaagcaattcacaacacgcttgtaaaagtaggtgtggaagtggctgttgttcagaatatcaaagatacaaataattgaaagcaattcacaacgcaccgtcttgtttctatacttaatgaatgttgttcagaatatcaaagatacaaataattgaaagcaattcacaacggttattcggaattcaaaacagatgtattgttgttcagaatatcaaagatacaaataattgaaagcaattcacaacgctgcgaagttgaaggttacaaccacaccagttgttcagaatatcaaagatacaaataattgaaagcaattcacaacaccggttatctactactcacagcactaccggttgttcagaatatcaaagatacaaataattgaaagcaattcacaactgttcagcggcttcgctctcaaatggtacagttgttcagaatatcaaagatacaaataattgaaagcaattcacaacttggaaacctttgggcaagtctttggcaagttgttcagaatatcaaagatacaaataattgaaagcaattcacaaccacaacgcgattgtccttttttctcttaatgttgttcagaatatcaaagatacaaataattgaaagcaattcacaaccggcttccatatccttttcattcaacccaagttgttcagaatatcaaagatacaaataattgaaagcaattcacaacaaatatggttggtgtccatacacaaccggggttgttcagaatatcaaagatacaaataattgaaagcaattcacaacgaaaacatctttcgtttcttgcccaagtagttgttcagaatatcaaagatacaaataattgaaagcaattcacaacaaaggttgcaagggtttcacttgccattcagttgttcagaatatcaaagatacaaataattgaaagcaattcacaacaaatcacatcaaagcacttatcgccctgaagttgttcagaatatcaaagatacaaataattgaaagcaattcacaacattgttgcgatatggctttgaatccgttatgttgttcagaatatcaaagatacaaataattgaaagcaattcacaacgtcaaaggctcggtgataacggcaagggttgttgttcagaatatcaaagatacaaataattgaaagcaattcacaaccacgacaaggtggtggacaaggaaaactttgttgttcagaatatcaaagatacaaataattgaaagcaattcacaactttcaagtcgcttgggttcatcgtgtgcaagttgttcagaatatcaaagatacaaataattgaaagcaattcacaacggcggtgtcgttggtggattcaccgccgcgttgttcagaatatcaaagatacaaataattgaaagcaattcacaacggcgtgattgtcgttgatggcgaagaaatcgttgttcagaatatcaaagatacaaataattgaaagcaattcacaacgaacactacagagccctaaacaaaaaaatagttgttcagaatatcaaagatacaaataattgaaagcaattcacaacatctttgacaggcacacaaaaataaaaatagttgttcagaatatcaaagatacaaataattgaaagcaattcacaacatttttt

SEQ ID NO: 1748 - DNA, 16791 bp, synthetic construct
  misc_feature 1..16791: note = Synthetic
  source 1..16791: mol_type = other DNA
atcgggtgtatggcagagaggttaaaagaggagctattggaaaatggcgtggttactcttgttgctggaccagactcatatagagatctacccaaattaatcaacaacctttctgagtctaacaaacagattaacaccattttatcggaagaagaaacctatgccgatattagtccagtgcgtatggacaaaaatggagtatcggcatttatatccataatgagagggtgtaataactactgcacctattgtgttgtaccatatgttagagggagagagagaagccgcgatcccaaaacaataattaacgaagctaaagtactttttgaaaatggatatagagagattactctattagggcaaaatgtaaactcttatagctgggataataatcaattttcattttggatgctattggaggagattgctaaaatagacccgctattaagggtacgcttctccacctctcacccaaaagatatggacaatgcagtaatagatacagtagcaaaatatcctaatatctgtaaacacattcaccttccggtacaatctggcagtaatgctgtattaaaaagaatgagtagaaaatatacccgagagagttatctagagagagttgagtatattaaaaaagtgattccggagtgcagtataagtaccgatattattgctggtttttgtggagagaatgagcaagatcatatggatactctctctataatgaaggaggttgggtactataccgcatttatgtttcaatattctcaaaggccaaatacaatggctgcaaagaatctagaagatgatgtgacaccacaagataaaaacagacgattgaatgagattatctctttgcaaaatgaactctctttacttagtaatcagaatgatgtaggaaaagtttttgaggttttaattgaggggacatcaaaaagatcggataaagagctatttggaaggacttcacaaaacaaggtatgtgttttcccggccaatgaacaaaaggttggagagtatgtttctgttaaagttctttcttgttcatcggcaactttaaaaggagaaatagtaaaatagattttaatataataattatgacaaaaattgtaacgcactacattggagatctaaaaacagaggctgaacacattcagtctgggagcaaacttattacagatgcccctatagataataatggtaagggagaaaagttctctccaacagatctttttgcaacctctcttggctcttgtatgctaactattatgggaattgctgcaaatacgcacaattttgatattacaggtactcgcattgagacccaaaaggttatggctgctaatcctagaagggtagctgaacttatattagatatctatcttcctagaaacgactattcggcaaaagagatgagacttattgagtctgcaattaaaagttgccctgttgcaaatagtttgcatccagatattattaagacaattaattaccattttccacaataaaaattagggcgactaaaattaaagttgccctatctttatttatgctctatttttgagcttttatactctatatctgctagtagaataaaaacctattggttccaataccagcagctctagaattaacctccataccattctttcctacaaccttcataaccgagtttgaggtaaaactaacctctgcagtaaagatatttccagtttttggactaactccaagaccatagaattgagtacctttatagaactcagttactgcaccagatagaatatccactgcataaatagttgactctactggcatatagttattatcataaacagtattaaacgtatataccttatctccatctcccgaaatatatccgctcataaaatctactggcacagatacaattttctcaacagttaatgcctctggactaatctgaacaacacctactcctgggaatgaaacccacaaattagccatcttatcaaatgcaaaatgttttgcagcagctccaccttctaatgatattgttgacaataatgtaaaattatcggcaaatgtctcatacaccttaacaccctcttttgtagcaacaaaaatttttgatccgtatgacactataccctctacatctgttccaacatcaaacttcttaatgtatttaagatccatggcatcatatacagatatataagatttattaaactcccaaaatccaaactcatttacaatataatctgttccccaatttgttaccaaaactctaccattagttacaatagtgttcctaggattactaacatgttgtgttattggagtaaaggccgatttcatatttctaggatctactataacaatcttattaggattattacataccaacatagcatgaccagaaggtgcaacacttgccgacacaatagatgctccaatagagaatccatttgcatcttcaaatgctctatttttcatttcaccggtattctcattatatagtgagatactaccagactgttccgagaagttaccctcgttaataactataaccttaccttcaaatattggaaatggttctggattgtcacttttgttgcatgagctcaaaagagcagaaatggcaacagcaagaaaaataaaaaatctatttgctttcatattttaaaaattaaaaattgtattttagattgatttgccagtttgtaccaggcattgcataaaacttaatattctgataatttttgttaaatatatttttaacaatcaaagctatattaaaatctccgaaattggaaactattgagtatctaactcccgaatccaccaaaatatatgaatctaatctatcataaatatccattgttgttctctctccggtatatgatccattaataaacagctctgttttctctctttttacagacaagccagttgttaaccgatgtcttggctggtaggccaactgtttaccaactgctgggtcgtgctgccacaatgctttaattgtttttacatctacatagttataattggcataacccttaataagatactccgcaaacttataatcggcagagaggccaaactcaataccttttgacacaacatgaggaatattttgaggcctccaaacctgcccagcaggaaaccatctaatccaattatctacactgcttctatatagagttataaaggagtttactgcacccctactatgatataacgaaaaatctaaaccaccctctgcagttaccgatgactcatttttgagatatttatgtactccgccccaatacctatcgttgagtgttggtaccttaacactcttggaaagagaagatcttaacgacaaagagtagttgaagctattatgtaaaaatagagttgcgcccaaagagggcattaatggtatagagctatttgttattgaaccacctcttacaccaccagagaatataactgcattattaaaagctccatatctcattagaagatagatcgagctccttttttcattaacatcactcatatatgaatccacggttggtacaatagattcatatgagacacctgtttttgcagtaagtccactaatcgaatactggatatttgcatttgctttatatctagaggactctattacatcctctttatacctctctttatcatgagaataagatattgccatggagtataaaaagctagatttaccaccatcaccagaactctggccactatatgtcaaagatgttcttaggttattatcatatatagaggcataactctctggtctatcattggaagatacggatggctgtatctctctgtcaaaatctagataccatatattaaacgagatgtttccactctctccagctctgtagttgacctcttgcaaaagcccccaattggagtattgtgcattattttgcctctcttttggagcatttggtttggtattatttataaaactaaaattattttccgatcctgaatagtacaaactagacctactctcaattttactatttgagtaacggaccgtagagcctccaaaataggttgaatagctacccatagataaaaaagcatcaccactccacccctctctccactttggctgggtagagagctgtatactaccaccaatactaccattaccatataatgcagatccaccaccaacatgaatatccatattgtcaaaaaaatagagcggcacatgtgaaagatcggcctgacccattgtgggaacagatagatccatcccattccaaacaattgatgtatgagaagatgaggtaccccttatggagataaaagagcccatacctcttccgtactcctttatatatattgggctgctctcttttagatagtccgatagagtttgcgctttgctattagataactccaactcagaaacagactgcacctttgtacctgtcataaatgatctgttttttaaaggggctgccgaaaatgagatgaccacaagagaatctaatctactactttttaaagtatctgattgactatactcaccagtttggtccagaggtattgtagtagcagttacccctacactacaacaaaatgtaaaaaaaagaaaaacagtaatattgtacaaatgcctaaacatctctccctatctcccgaaagttcgattaattaataatatgtataagcaggttttctgacttagtctttacatttgcaccttcccgcataagcagtggttagaacgcaaataacccaaacgggcagacattacagcagcgggtactgttctcgatttgcacgagattcccttctcttataactgtgcaaaggtagataatttatcaaacaaaaataatctgcacgcaaaatattgtaataaaaaaaaaattaactacttttgcactccaagtttaccaactgcccggatggcggaatcggtagacgcgctggtctcaaacaccagtagccgcaaggctgtgccggttcgaccccggctccgggtactctaaaaatggctaacagttgaaaaaataacttgttagccattttttatttaaatgatccaagtatttatagaactatttggggtggaattatcaacgattgaatgaagtttttgcacagactctctgatagttacacttatttagcaaactcctgttttaaccaaagcttcataacagggtcagctaactgcacctgcttgttctcggtctctatcagctcttttttaataagtgctcgcttaatggtgctcacatttgccgaagagctaagctgatatttctgtaaaatctccgcagaggtaaattcactatgaactccatcaacaagggcacgaaggaaattcatttgataggcagaaagattttctgtctgtttctcaaatagtggcgtgttttggtcaattaaatcttggtgtgcctctgcaaaatcctgttcagttgcggtgtgctgtgtgtgaatccataatagccatgctaactgctgaacataagatgagtgattgtcaactgctacgcaaacccgctcggctaactctttggagatatgtttgcccgtactttcaaaacgttcacagatatatgaaatccaatcggcagtcgatatttttggtaagtatatagagtccccgaatttgtaaaacggcaggctcttcttctcgaaaagttcattcatcaggtgctttttgctgccaaacaggcagtacgacaccgactgctgaagttgccataccgaacgtaaacgtttctgaaaatattttgaatctttaaactcagctatttgttgaaattcatcaatgcagataacaatccgcaccccttttttctgtgcaatcttttcgggcaattgcagaatttcatcaatatcatcactcttttggttcaactccaatgatatagaaaaatcggacattgggtctgaacccattgtgaattttagacttatccgtgaaaggaaaattttgctgttttctattatctcatcaaattttgaagaggtctgtttcaaaactgccgatgcaaaagcgtcataaaattctctgtcggttcggcacgagaatatatccaaatatacaattttcagtttgtcggattgagccattttgcaaactttcttcaccaatgaggttttgccccatctacgaggagatataagcaccgtatttactccgtgcgtgaaattcgagagcagacgagttgtctccttttctctatctgtgaagttgtcgccagaagtagctactccgaatataaaaggcttgttttccataatgctaatctattacatctgttctagcacaaatataagtaataactttattagtaacaacattattagtaatatgattgttagtcatttttgcttttagtattttttcacggaaagcatcgtattcttgctgcccctagcttataactcttttacaaactctgcgaaacgcaataccttctctgcatttgccttattaaataacagatgttcgaaatcacgatatttcttctttaaatcggtggtctcggtcgtttctgttaatgccgctttaagttcttctttattgtggatacctcttttttcagccaaataaaaatagtcaggttcaacttgccccaacagaaacatagcatcgtaaaaatctcgtcctttttgacgtgttaagagggcggacaacttcatcgcacaaagagtcgaatcaggaggcacggggaaaggaaagaagaatccagtacgtttgatattaactacttgcggtttataatcatattcttggtcttggctctcaactttcacaagaaacctctcttctctatatcctgatagacccaattcaaaaagcaactccgggaaatagagattgcgacgatatgctttgagcttatcgtttgcattgtcgcgagtctcgacacgaagtccagagcgtagcaaaaaggtcagaatctcatcggtcatcttcacaaactcctcctgtgagaagtttttgcagtcgaagtctaaatcctccgaaaatctatctatcccctttacaagcctcaggtttgttcctccgataaagacaactttctgaatatatggcgatgttgacaaaaagtcgagtatcataagttgaatatactctttgaccatatatttctgaaaggtggtatttgctctaagtacggcagggaagtacccttttatctgttctaattctatcatattccgtaagtttttttcattagttcaattcgctttgcaagaaccttatttccgaatcgagctgtatattcatcaagtctttttatgtcgagatcgtttgttaaatagtcttcatccaaccgcaactcctccatttcctcttgggtattataaaacggatagagatatagcaagtcaagcaatgccttttctgggtgagcaaattggattattcgattaccaaatggctttaactcatatccaaacatcaactcaggcttgattgtcttgtacgtatatactccaaagtcgttctgaaactctgcggttttgagtgatgacacccctgtaatttgagtaatagcctcgggaattactccataaaaagccagtgtggtgtggagacttatatacgatggcttatatattcgattagaaacgtatagtgcaaaatcagattgctccttcatctcaggaaatgcataatacccttgacgcaacttcaccaacaacccctgacgtgtccatcgtgttaagttatttggattaaagtatgggtattgcgccataatctgatatgtggcaatacatccaacttctataaaattatttctaaattcaatataattcattttgtttctattattctacaaatatgatgaattttggaaacaaaacaaaaaatcctaattctactagaaatgctttataaatgtcccactcttgagttctgcaaaggcgtggtttagctcttctcgggtgttcattacaattgggcctccccagcatccttggcgactctttgggcatctcctgatgtggggatgccaggggaaaccttttatgtagtcatctgggtcctgagagtcgaaaccgtccagcaaatacaaaatttatattgtcctgaatctactttgattcaatcttcttttttgtattgattataattacaccatttttaccatcatcgccatatttttctatagctttagcatcttttaatacagatatattatctatggttttagggtccatctcatttaaattaaagtcgctctccacaactttaactccatcaacaataattaatggcctatttttactagaagcacccttgtctgccactcttaacctaatagtcccctgattcatatcatctatcttagaagcaaattttttggtggtaataattaaaactccatccttaccatcaacaccaaaagtttcaagtgctgcagttcctttcaaaacacgcatttttgcaatatcgtctggattaattttatctatctctaattgagaaactcttttcccatccaaaataattgttttaactttaccatcggtttgaagtgtgtcctttactgttaccttggtctgtgctgttgcgtaaagtgagaatcccattatagggataatgtaaagcgccttcaaggctcttttccaatttgaatttgattttaacatcatagtaatacggtttttaagtgtactgtgactaaagctattggcaactgagtagccgctcttgccgatagcttttttaattaataaatattgatattgttttgcattaatgccatttttaagcacattgttatctgcctcatattcatgaagcgctctaatatcttgtttaagcatccatattattggattaaaccactgaaaaagagagattatatctataaacaataggtcccaggaatgcctcatttttatatgagccctctcatgagcaataattggagcatagtcttgagcattataatcggccttagggataactatgtagctcatccaactaaaaggggagatatctttgctgctaatatagatctcctcattttgacatactaccctctcactcctttttattatagccaaaacgctgtatgtagagaagataattctacttaaaactattaataatcccactataaaaatggagataaaaatgtaatccaaccccaaatctctattaacaacggcatctatatttacaggatctgcaaccccactaccctcttgagcaggaagagtgataaccctctctatagtaaatacacacaatggtagaataaatgagagcccggtggtaacaagcagaactacacggttaaacctatgaaaagtctctttacttaacaatagtctatagaaaatatagaacactgttaatagagctgctccctttatcagatatattaagaaatctgccatgactctattgtttatttgacccctctatttgatttataagctctttaagctcatctacagaaatcttctcctcttttaccaaggccgatactgcactcatatatgagttattaaaatagctctttattacaccagcaagagttcccttatgatactcctctttggagattatggggtggtattgatgtgagtttccgtaaactttatgagataaaaatccattactctccaaaatacgaaccattgtagaaactgtattaaaatggggcttgggttgattatacaggtttaagacctctttgacaaacattgctccatgttcccaaaaaaggttcattatctcctcctctttacgtgtaagttttttcattgctaatacatttttaacaaatgtaactattttttttagttaagcaacttttatttttagtttgagtgggggaagaaagaaaaaaggcgagagatacctcccaccttaaatgttttcacaacggaataatccttattgtgattcgcttcaaaattgtaatacaaatataataaaataattacgtattaaacaaaaaattgctaattttaacaatcgaaacttaaagatatgaaaaataagatattaggtctagaccttggctcagcatccataggatgggcacttgtctctgaagattcagagaatgaatctgaaaaaacaacaattattgatatggggagtcgcataattccatacgacggaaccgaagggcaggattttgtcaaaggtactggagaaagcaaaaactctattcgtactagctacagaagggcacgcaggaattacgacagataccaaatgagacgagaagccttagtaaaaatactctcccaaaacaatatgatgccagatgagagactcaaaactcttcagaaacttgatctttggaatctaagggcaagagcggctattgaacaaataagccttccagaattggggagaatattattattattaaatcaaaagagaggatataaaagttcccgagcagatgtaaatatagataaaaaagataccgaatatgtggcaacagtcaaaagccgccatgatacaataaaggagctaaactacacaataggacaatatttccatgaaaagctagcacaagacgaattcttccgaattaaagaaaacgtatttcctcgagaagcttatatagaagaattcaatcaaatatgttatatacagcaacaattccactctatgctatctaacgagcttatttctaaaataagagacgaaataatttattatcaaagaccattaaaatctcaaaagggcttagtcgctacatgcgaattcgaaggttttaccgtcactaaagatggtaaagaatattttactggcccaaaagtagctcataaatcatctccactgtttcaagtctcaaaaatatgggaaagcataaataaccttcgtataaaaaccaaacatggagacaaaataatcttttctgaagaagaaagaaaaaaaatttttgaacacctagacaataatgaaaaactaactttcaaaaatctttgcataattctaggtaaaaaagaagatgaattatacgcagatcgcaaattatacaaaactggtctccaaggcaatgtaacaaaattcatctttaataaaatactaaaagataatcctataaaggagagcctattcaaaatggattataaaataatcgaagactatgatcatcaaacttacctaatttgtcgtaaaacaggtgaaataatacctaatagcgaacacaataaacaatacattgatcaatctatcgaatttgaacctctctatcgactttggcacacaatctattccatttctgatgttgaggtttgtacaaaaacacttataaagaactttggcctagaccaagaatctgctttaaaacttgcaaatatagacttgaacaagtatggatacagcaataaatctgtaaaagtgttaagaaaaatactcccgtatcttactttgggatactcatactcacaagcgatggaacttgctggatataaccattcaggtagccttacaaaagatgaaaacctttcgagatatttactggataaattaaagccccttcccaaaaactccctcaggcaaccagtcgttgagaagatacttaatcaaatgataaatcttgttaacgaaatcatatatcggtatggtaagcccgacgagatacgagttgaacttgccagagagcttaaacaaagcagacaagagagaaatgataccgaatcttttattaacaaaagaaaaagagaaaatgataaaataattgaagaattggaagagtttggtttaagagctaccaaaaacaatatcttaaaagcaagactctataaagaaatggaagatggagaaaaaaaacttaatgcaatatgtgtctattgcgggaaaaacatatcgtttgctgaggcaatcagaggagataacgtagatatagagcacataatcccaaaatccaaactttttgacgattctcaaagcaataagacacttgcacacagaaagtgtaacagcactaaaggcaatcttacagcatttgactttatgaagggaagtaaatcagatcaagagttcaatgcgtatgtagaaagagttaacaccttattcaaaaaccatgttatttctaagacaaaaagagacaaactccttatgccagagagtgaaatcccagataatttcattgaaagacagctcagagagagtcaatatatatctcgcaaagcacgagaaatactaaatacaatctgtaataaggtatggagtacaagtgggactgtaactgcagaactaaggcatctatggggctgggatgaagtgactatgaagctacagctccctaaatataaacaagtaggtcttacagagactgtaatatgggaaagtaatcatggcaaaaacatacacgaaaaagagataataaaagactggagtaaaagagatgatcacagacaccatgcagttgatgcattaacaattgcttgcacaaaacaaggttttattcaacgattcaattctcagaatagcaaaacaaacaaccccattatcgttgaggatattaagcaatccaatgtagagtatacagaaaaactctccaatctagaaaaatatataatttcaaaacaacctataccagtatacgaagtagaaaaggccgtatcaaaaatactgatttcctacaaatcaggcaaaaaggttatttcaaaaggaactaggaaggttgggcaaaaaggaaacaagaaagttgttcagagagatattatcattccaagaggagcattaagcgaggagagtatatacggaaaaatacggcttctagaaaaaaataaacctttaaaatacctttttgaaaacccagatcttattgtaaagcaatacataagagacttaataatggatcgtattgctagtaacaacaacgatgtaaaaaaagcatattcgcaaaccagaaaagatccaatctatctagacgagaataaaacaatagctctagaatatgcaagctgctacgaagaaaagtttgtaattaaatatcctgttaattcatctttcaataaggtagataaagtaattgacaataaaatccgtcaaatacttactgataggctcaagaaatacaacaataatcccaaagaagcctataaagatataattacagaagataaatctactattccatggtttaaggatgaaggattgagtaggcctatatacagcgttagatgcctgacaggattatctgcagttgtacctgcacgtaaaaacaatgatggcaacaatattggttatgtaaaaccaggtaacaatcatcatattgcaatttactctgacaatcaaggaaaactggttgaacacacctgtacattttggcatgctgtagaaaggagaaagtatggattgccttctatcattaaaaatagcgatgaactatgggattacattcagttgaaaataacccatgaactacctgaatctttcttaaatcaactgcctcctccaggatatgagttgaaacacagtctacagcaaaatgaaatgtttatattgggaattcctaaagaagaggtagaaacattgttggaacgtggagatttttctactcttagtaataatctttatagagttcaaagtataagtagcaacgactattatttaagacatcatcttgaaacacaaattgttaacacaaaagaatccacgatagctatacgtttttataggattagaagtattaaagccttcaacgaaatacatccatataaaattaaaatcgatattcttggaaagcctttaatttgataaagagaacactatatattgagaaccctgcttatttgagtgtaagtctatcacagctaaaaataaaattcccggaagtagaaaagaatattcctaaagattttagcgatagatttacaaacagtatccctattgaagatattggtgttgttattttagacaacccacagataaccataacacaaaaggctcttcaagcattaaatgaaaacaattgcgcggtaatcatatgtgacaatcagagaatgccatacggactattactaccattgacaaataatacacttcaaggggaaagatatagatatcagattaattcatctactccccttaaaaagcaactttggcaacaaactatccaatccaaaattctgaaccaagcaacattgctgaaagagataaataatagtcaaatatcaaatatgacaaaatgggcaaaagaggtaaaaagtggcgactcaaccaatcttgaggcaagagcagcagtttattattggtctaatattttcccaaatatcaattcatttatcagagacagatatggagagcctcctaataatcttcttaactacggatactctatattaagatccataattgcacgtgcattggtaggtactgggctactaccaactataggcattcaccacagaaataaatataacgcttatgccttagctgatgatattatggaaccatatagaccgtttgttgattcagttgtagtaaagataattaatagtggaatagactacagcacattaaacagagatatcaagattcaacttatgtctattcctatactcgatgtctcaataaacaatttaaagagaccattgcaaattgcagccagcattactacatcatctttacttaagtgctttacaaaagaagataatagaatatcatatccgaaaatgaaattatgagcacttatgacagatataatcagtatagaatcatgtggattatagtattatttgacctcccaactgaaacaaaaaaagatatcaagcaatatagtattttccgaaaaaaactcatgaaagatggctttgcgatgtttcaattttctatatatataagaaactgtcctagcaaggaaaatgcagaggtgcatattaacagagtaaaaaactttttgcctccaaaaggtcaagtgggaatattaatggttactgataaacaattcggagaaatggagatttttatctccaaaaaagagttcgagaagccttctgttacccaacaactacaattattttagtatatcaataaaaaaactcgcagatttctgcgagttatcttgaaataacagtcaattttcacatcagacaaaagccctctaattgactaataacaaaaactttacacagagcctcctgttaattctctgataaagatacaattttgaaagcgaattacaactactcgaaagatgagacaacatgaccttttcctgttaattctctgataaagatacaattttgaaagcgaattacaactattcggagctcttgatggatctgctgatacctgttaattctctgataaagatacaattttgaaagcgaattacaacataccacgccacaccctaatatctgtgccgcctgttaattctctgataaagatacaattttgaaagcgaattacaactactgaagataataatgatgatgatctgcccctgttaattctctgataaagatacaattttgaaagcgaattacaacagctctgcaaatgcattgtggaaatatacccctgttaattctctgataaagatacaattttgaaagcgaattacaacaacctatgagttgtgctttttaattttaacctgttaattctctgataaagatacaattttgaaagcgaattacaacacttgcataaagttacaattaaaagggttacctgttaattctctgataaagatacaattttgaaagcgaattacaacaattctagcgagaagatataacacaaccgccctgttaattctctgataaagatacaattttgaaagcgaattacaactaggaactaacacgaattgtacaggaattacctgttaattctctgataaagatacaattttgaaagcgaattacaacggttagctaattttttagaaaaagcccttacctgttaattctctgataaagatacaattttgaaagcgaattacaactattggacaaggagttgcagatacaaatacctgttaattctctgataaagatacaattttgaaagcgaattacaacctaacacgaattgtacctcttactcaaatacctgttaattctctgataaagatacaattttgaaagcgaattacaacgtttagctaattttttagaaaaggccttaaacctgttaattctctgataaagatacaattttgaaagcgaattacaacaattatgcaatagtcaactcatctatagaccctgttaattctctgataaagatacaattttgaaagcgaattacaactaataaattgatgtcctgtgcatatattaccctgttaattctctgataaagatacaattttgaaagcgaattacaacaggccatctttttggagaaaaggactcaaacctgttaattctctgataaagatacaattttgaaagcgaattacaacccaatcaaggatgggtgtacattcatggcctgttaattctctgataaagatacaattttgaaagcgaattacaaccgattaagaaagagtagatactttcctgcccctgttaattctctgataaagatacaattttgaaagcgaattacaactcttcataaccttattaaacagaagagtaacctgttaattctctgataaagatacaattttgaaagcgaattacaacgaatcaaagagtacttaaagcagcaatatccctgttaattctctgataaagatacaattttgaaagcgaattacaacaataagacatatgaactagcgttacagttccctgttaattctctgataaagatacaattttgaaagcgaattacaacgctggacaata

SEQ ID NO: 1749 - DNA, 16395 bp, synthetic construct
  misc_feature 1..16395: note = Synthetic
  source 1..16395: mol_type = other DNA
tcacctaaggctatagccagtgcctcttgtttgatgcccaacatctcgcgaaaacgtttgatgtttcttccctggtgtacttttttgtctggcgtatcgaaatgtgacatactcatgtattttaaaattgtcggtataaatataattaaaaatatggttctataacagaacctgaaaaaggaataggataattattggagtactgaaatagtcaactttacagggtgaactttatgtttataaaacgcccgattatgaaaaattccacaccaagcagcaaccacaacaaacaaaaaaaacttccggtacgccgggtttcggtatacggaaaagcctttccacacgcctacgggcggtatgtatattatcccgaaatccgattggatggtaaatggcttcaagagtccgggtttaaaaccgggatgaaagtaaagataagctgcgaatatcggaagcttattataactgtagacacccggaaagatccctcgctttatcgttagtcgacctaaaaatagagttgcacacacacctgtatcacatccgctgcacacctgacaggtttttaaaacctgtcaggtgtaacatactacattgaagtgcgaatgatgatttcattattttttataaaccaattgcggaaacggaacacagttagttattgtacttttttcttttaatcaggaacgcagcggtgagcattatccgttgcggaacggagcctttaatgcgctccggattattgcggtaccgtaatgataaaaccctctgttaccagagggttttttgctttgctacacctgacaggtttttaaaacctgtcaggtgtgctgaatcgtgagaataagtaatagaaataaaaaaatgccttaatatactttttatatcaggcatttttctgttttttttgttttgtagtttatgtaaaaccccttgattttacagggattttaatgaggttggaattgtactcgataaaactacaaaaatttgaaaggaattcacaacgttcgagagtgaccgtaaaatctttgcctcgttggaattgtactcgataaaactacaaaaatttgaaaggaattcacaacattcttggacactatcagtttagtgatgatgttggaattgtactcgataaaactacaaaaatttgaaaggaactcacaacgcgcgtgtgtgggcgggactattccggcaagttggaattgtactcgataaaactacaaaaatttgaaaggaattcacaacaagcaatatgttatacaggaattaaatcaagttggaattgtactcgataaaactacaaaaatttgaaaggaattcacaacgtatcgaaccaattgattgaagaactatctgttggaattgtattcgataaaactacaaaaaattgaaaggaattcacaacaaagtacaatcggatgagcaaattgcattagttggaattgtattcgataaagctacaagaatttgaaaggaattcacaacccgggccatttcctccatttcaacaaaccagttgaaattgtattcgataaaactacaaaaatttgaaaagaattcacaactggttgcaaaacgcacagaagaccatcgaagttggaattgtatttgataaatactacaaaaaattgaaaggaattcacaacagattttgaaaaaaggcgtttccggcgcaggttggaattgtattcgataaaattacaaaaatttgaaaggaactcacaaccgattgtagaatattcagcagccaaaaattgttggaattgtattcgataaagctacaaaaatttgaaaggaactcacagcaaacaaattcaattgaccacaacagcgttagttggaattgtattcgataaaactacaaaaatttgaaaggaattcacaacccgttcctatgaataaaaattactacttcagttggaattgtactcgataaaactacaaaaatttgaaaggaactcacaacataaaaaaacaaggttatgaattttgacgagttggaattgtatttggtaaatctacaaaaaattgaaaggaactcacaacgcatgtttcgagattgatttaccggaattagttgtaactgtatttggtaaatctacaaaaatttgaaaggaactcacaacgatgcaaaagaccttgacaagtggaatgatgttgtaattgtattcgataaatactacaaaaaatgaaaggaattcacagctggatggataccctggatgtatgccaattagttggaattgtatttgataaaactacaaaaatttgaaagggattcacaactaaagtgcaccgtcacattttggaaggttagttggtattgtattcgataaagttacaaaaaattgaaaggtagtgtacagcgatttaagattattatggaatcggataatcataatatataaaaaagccccgaagatagtcgaggcactaaatgttttcacaacggaataatccttattgtgaattcctttcgatagcaaagtaactatttttttcggaaataacattacgtaaaaccataaaatggtataggaatatttttttaaatttcggaaaaacagttcactatgaataaatatatactcggattagatttgggagtcacttcaataggatgggcattggtggcagttgacgaaaacaacattccggttcgtattatagcaatgggatcccgaattatacctttatcatcagacgatagggatcagtttcaaaaaggtcaatccataaccaaaaatcaggataggaccaataaccgaacacaaagaaaaggatatgatagaaaacagttgcaaaaaaacgaattaaaaaagattctcaagcaatataatatttttccaactgaagaattgttgaagttacccatgctggatttatggaagctaagaagcgattctgtaaatccggacgcggctatctccggagctcaattgggacgtattttgtatatgttaaatcagaaaagaggttataaatcggcaagaagtgaagctaatgccgataaaaaagataccgattatgttcaggctgtaaaaggacgttatgcagaactaaaagaaagaaatcaaaccattggccaatatttttatgaggctttaaatacggcaaaaaatacaaactcgtattttagaattaaagaagcggtatatccaagagaagcctatatagaagaatttgataccctaattgaaattcaaaagaatcaacacgattttctaacagataaagtgattgagcaattgcggaatgagattatttattttcagcgaaaattaaaatcgcaaaaaggattagtcagcatatgtgaactcgaaggatttgaaaaaaaggttcttgataaagaaaaaaataaggaaaaactagtctttgtagggccaaaagttgctcccagaactgcacctttatttcagttatgccggatttgggaagtggtaaatacgctttcacttaaaattaaaaacccagaaaatagtaaatacaaatggagtgatagagtaatttctctggacgaaaaacaaaaaattgctgagtatcttttttcaaacggtaatcttagtttttcggagttacttaaaattttgaaacttaaaaaagaagatgtttataccaataaacaaatactaaaaggtattaaaggaaatgaagtctatgaatcgattcgtactattattggagataatgatttgttgcaatttaatgctgcggtagtttcttccaattatatagctatgcttgttgataaaaaaacaggtgaagtacttgaagaaaaagaaggattggaaatagataaaaaagtggagcaggaaccattacatcagttatggcatactatttattccattaaagaattggaggagtgtaaaaatgctttaattaaacgatttggatttgatagcgatacagcagaaaaactttctcatttagactttaataaacaagcttttggaaataaatcggctaaagccatgcgaaaaattttaccctacctaatgcagggatatgattattcgaaggcatgtagtctggcaggttataaccattccaatagtctgacaaaagaagaaaaagagcagcaacctctagcagacagattggagctattgtctaaaaatgacttacgacaaccggttgtagaaaaaatcataaaccaaatgattcatgtggtaaacgctattctggaacaatatggtagaccggttgaaattagagtagaattagcccgggaactaaagcaaagtaaggacgagcgtaatgatatggatgtctggaattcgaaaaatcagaaactcaatacagaaataggaaggagattatcagagttaggattgccaacaacgaaacgatatattcaaaaatataagtttattttcccttctttgagtaaaaatattaaagaggcacgcgtaaacaaccaatgcatttattgtggtgaaacttttaatcttacggaagcactaaaaggagatgcttttgatgtagatcatattgttccaaaggcattactatttgatgattctcaaaccaataaaatacttgttcatagaaaatgtaatgccaacaagaccaatcaaacggcctatgactatatggcatccaaaggaaaaaatgaattagaatcgtatttagagagagtagatgactggtataataggggaattgtttcttatggaaaagtacagcgtttaaaagcctcttataatgaatatctggaacgaaaaaaacagaagaaagaaacggaattggatagaaagctttgggaaaactttattgaccgtcagttaagagagacacaatatatcgctcgaaaagcaagaatgattttacagaaagtatgttctaatgtaacggctaccgaaggtggtgtaacggcaaagttgcgggatctttggggatgggacgatgtattgatgaatttgcagatgcctaaatatatgagtgccgaagaagcaacaggcaaaacgtttattgggataaaagaatggacaagtgatcatggaaaaagaaagcaccaaaagaaagaaataatcaattggtcaaaacgtgacgaccaccgtcatcatgctatcgatgctttggtaattgcctgtaccaaacaaggatttattcaacggataaatactttaaatgccagcgaaaccagagatgaaatgaatcgaaaagtggaagaggcacaaatagtatttaaagagaaggcaacattattagaaaaatacctgataatgcaacaaccattcacaacagaacaggttatgaaagaagcagataagattttgatttcttttaaagcaggtaaaaaagtagccactattacaaaatataaagctacaggtaaaaacaaacaaacaggagttattgtgccaagaggggcgcttcacgagcaatcggtttatggtaaaattaaagtgatagaaaaagaaaagccggtgaaatacttgtttgaaaatgcaaataaaattgtgaaccctaaaattaaagagcaggtatatgaacggctttctgaatataaaaatgaagtaagagcggctttatcatcactgaaaaaagaaccgatttatttgaataaagagaaaacggaaatattgaataaggcttcatgttataacgaagctactgtgctgaaatataaactagttggcttaaaatcacaacaagtgaaagatattgtagacgaaaaggtaaagaagttggtagctgaacgactggctttacacggtaacaatgaaaaagaagcctttaaagatacgctttggtttaatgaagaaaagcaaatcccgattcgtacggttagattattggcacgacccgatgcaaataatttacaagtaattaaaaaggatgcaaacggaaaagagattggttttgtattgacggggagcaatcatcatattgctatttatgaagataaaaaaggtaatatgagccaatatggctgtacattttggcatgctattgaaagaaaaaaatatcagattccctatattttcaaggagacatccgaaatatggaatgcaatattaaataaagactatccggaatcttttttaaataagctcccggctgatggcttacgattaaaatttagtatgcaacaaaatgaaatgtttgtattggggctttcgcaagaagagttgaatgctgcattaaaaaataacgatacatctatattaagtaaacatttatatctggtttggagtatatccgataataattattggtttcgacatcatttggagactaaaaattcggaactgaaaaaaacagaaggagccaaggaaagcaaacgattttataatatcagaagtgtaggagcattaatggctttgaatccgataaaagtaaggattaatcatttagggacaataaacaggataggagaattttaagtaattaacgatgctgaaacgaacgatttatattggaatttggtaaaactacaaaaaattgaaaggaactcacaactggctacagaatgcgcaaaagacaatcgaagttgtaactgtatttaataaatctacaaaaaaatgaaaggaactcacaacaatacaaagaattaagcgatggtaattattgttgtaactgtatttagtaaatctacaaaaaattgaaaggaactcacaacaagtaaaagaacttcaacaacgattaggcggttgtaactgtatttagtaaatctacaaaaaattgaaaggaactcacaactcgggaaggataaagaggttttctctaaaagttgtaactgtatttagtaaatctacaaaaaattgaaaggaactcacaacagaaaactacttatccccatttatggatgcgttgtaactgtatttagtaaatctacaaaaaattgaaaggaactcacaacgaggttttggagacggttttggagcgccgggttgtaactgtatttggtaaatctacaaaaaattgaaaagaattcattgtcttaataattgatagtttctactttaagtgttttttatttttacccaccaaagagaaattttattttactacattcgtaattgaaataatacactttgataggagtagaagagtctattgattcaaaaccaaactaccaaaaaacactataaaaaatggaacaaaaagaaccaggagccttaacaaacgaagagctattacaggaaataaaaaaaatgaaaaccacccgaatttacgatgccgggattataggttttttaataggagtggccttttatggcaccgttaaaggcggattcggaatatttacctttattccgcttgcctatatcccttttgctacaaagaacaccaaaaaatacaatgcgttaaaagaacagctaaaagaaagaggtttataataaaaaacacctgacaggttttcaaaacgggtcaggtgtttaatcccagatcgcgcggatttacttcgtctgttcggctaatgcctcgggtacaatccgtgtgcataataaataaaaaaactacgacattgctatcgtagtttttttattttaaatggtaaagcttattcagcctcaaccatcgtatggtatacgttcatcacgtcgtcatcttcttcaattttttccaatagtttttccacatctgctacctgatcggcagtaagggttttggttacttgcggaatacggtcaaaaccagacgaaaggatctccatattacggttttccaattctttctggatcgctccaaaactttcgaatggcgcatacatcataatgccgtcttcatcggcaaagatttcttctacaccaaaatcgatcatttccaattccagttcctctacatcctgaccttcggccggaattcggaagttacaagtgtgatcaaacataaattcaaccgaaccttgtgtacccatggtaccgttacatttgttaaaataactacggatattggctacggtacggttgttattgtcggtagccgtttcgattaaaatcgcgattccgtgtggcgcatagccttcaaataaaacctccttatagttggccgtatctttatcggatgcttttttaatcgcacgctctacgttatcttttggcatgttggccgctttggcattttgcatcaccgcacgcaaacgggagttggtctccgggcttggtccgccttctttaaccgccattacgatatcttttccaattctggtaaacgttttggccattgccgaccaacgtttcatttttcttgcttttctaaattcaaacgctcttcccataagagttaattgtattttgtttatagttttgtaaaaacagcgtgcaaaaataaaattattacagcactttaacaaaaaaagagactttttaaagtcccttttcctgtgattattttttgtaaaatggtaatttaaccacttttgcagctacatcattttttcggattcggatcgcaatttcgctgtcaactgccgaaaatgcagtaggaacgtagcctaaaccaatacctttgtttagggatggtgacatggttccggaggttactacaccgattacatttccgtctttgtctacgatttcatagtcgtgacgtggaatacctctttcggttaattcgaaagcaactaattttcgggaaacaccagcttctttttgcttttttaggttttcggaattcacaaactctttgtcgaacttagtgatccaacccaatccggcttccaatggcgacgtcgtatcgttgatgtcgtttccgtataagcagaatcccatttccagacgtaaggtatcccgagctgccaatccaattggtttgattccgaatgccgctccggcttcgaatattttgttccagatggtttcggcatcttcatttttaaaatagatctcaaatccgcctgatccggtatagcccgtagccgaaatgatcacatcttttacaccggcaaattcgcccatttggaacgaataatacggcatgttagtcaaatcgattgccgttaacgattgcatcgcttcggctgcttttggcccttggatcgctaacaaggaataggcatcggatgcattttccatagtcacacccaaatcgttgtgttgtgaaatccagttccagtctttttcaatgttggaagcgttaacgactaacaggtagttgttatcggcaattttataaataataagatcgtccacaataccgccttcgttgttgggaagacacgaatattgtgcttttccatccactaatttcgaagcgtcgttagacgttactttctggatcaaagccagggcattttcgccgcgaaggaaaaattcacccatatgggacacatcaaaaacacctacgccgttacgaactgtttcatgttcaatggtaactccttcatactgaacaggcatgttgtatcctgcaaacggaaccattttggctcccaaactttcgtgaacgtgcgttaatgctgtatttttcattttgtgctgtatatttattttaggccgctaatgtattgattttttacggagtggcaaagtgttttagctgctgagataatctttcaacgcttcgtaatcccgaatcggaatactttgttttggtttgtccatcatttgctgaagggattccggaataagtaagccgtggtttaaatacgattgaacggtgtccagaaattttaccggatgtgccgtttcgagaaataatccggttatatcgggattatgcgctagttttttttgcaatccgagatagccaaccgcaccatgtggatccatgatatattgtactttttggaaaaccgattccatagcgattcgcgtttcggtatcactaaatgtataggacgaaaagtctttttttagttgatgcagatcatgagcatacaattcctgtatacggataaaattactgggatcgctcacatccatggcattcgaaacggtactgatagtcgttttgggttggtaaatcccatggtccagatagcgcggaacggtatcgttggcattggtggcggcaataaaatgggcgatcggtaagccgagttgcctggcgagcattccggcaccaatattcccaaagttaccactcggacaggaaacataaagtggtttcccggtgtcctggaggactttatacgcaaagaaaaaataacacatttgcggtagccaacgggccacattgatcgaattggccgatgttagatttttggttttcagatcgctatcctgaaatgcttttttaaccatcgcctgacaatcgtcaaacgaaccctgaacttccagcgcgcggatgttttgtcccaaagtggttaattgggcttcctggatagggctgactttccctttgggatagagtacgaccacatcgacattttttatgcccagaaaaccattggccacagcgccgccggtatcacccgaagtggctacgagcacggttgttctccggttgttttcccggttgttttcccggttaaaatacgcgagacaacgcgacataaaacgcgcaccaacatccttaaatgcgagtgttggcccgtggaaaagttccagggtatagatgtctttttctatcggaaccaccggaaagtcaaacgaaaaggtttcgtcgattatctgttgtaattccttttccggaatggcatctccgataaaaggagccagagccctataggcgatatttaggttgtccgttttatttaaaaccttaataaaagaggcggggagtggtgttatttgttccgggaaatacaaacctccatccggggcaatactctgtaaaaccgcttcccgaaacccgacgcggtgttgtttgttcgtaagactataatagttcataatactgtttttaaccgttaattaattgtattccccgggttgcaaccggcgatacgtaaacttcaaatggtattccggtttcgatatatttttgttccatttcaaaagctactttatgagccatttcaagacctttatttaaagtaaaaacagaaggccctgatccggagattccgactcctaaagcaccgtttttgagtgccgtttcttttatcatgtcgaagccgggaatataacctgcccgtaaaggttcaacgatccgatcgtgtagcgaacggcgtatcagttcgtaatcgctggtatataaaccggctatcagtccgcccaggtttccccattgagagatggccttttttagcggaattttggctggtaacagggtacgcatttcggaggtttttaattcgatctgcggatgaataacggtggcatataattcggacggtaccggtaaagctaccacatccaacggttcataaccgcgaataagcgtaaaaccgcctaaaagtgccggagcgacattatcggcgtgttcgcaaccactggccacagcttctcctttcatagcaaatggaataagttcctttgtgctgagtggattacccaatagcgcattgattccaaaaacggctccggcagcactggcggcagaactgccaatgccactcccggccttgatttttttaagaataacgatatcaaaaccacaatcgggttgtaaggcttccaataaagccatagcagccacaccggctacgttttgtgtggtttccagcggtaaatcagctccgattattcgggttattcggatacctttccggtcggtttgggttactgtcatttcatctccaatagtgtcgagacataggcccaatacatcgaatccgcaagatacattggccacggttgccgggcaaaacaggcgtatatttttcatagtcgttcgcgttaaaggtttccaattcgtatgacatcggcaaaaattcccgatgcggttaccgcggctccggctccggcacctttaatctgtaagggttggtcggcatagcgatcggtataaaacaaaacaatgttgtctttgccttccaaatgataaaacggatgctctttgttgatatattgcaaccctacgctggcttttccgttttcaaatcgggcgacatattttaagcgacaggattgctgttcggctttattatataaggcttcaaaatgcgaggcatgttgttgtaatgactcaaaaaacgcagctattgattcggcttgtaaaacaggatccggtaaaaaggaatcgtttccaattgcgtcgatttccatcggataaccgctttcccggatcaggatcaggatttttcgcatcacatcaataccactcagatcgagtttcggattgggttcggtgtacccttcctgttgcgcctgaaggacaatatcatggaagctttttcctgctttaaagttattaaagataaagtttaaactacctgataaaactgcttgaatctgatgtactttatcacccgatgcaattagattttttaaagtatcgataataggtaatccggcaccgacattagtttcgaacaggaaaggcgcattgtactttttggatagcttttttaattgctcgtattcggaatattccgaggaacatgcaattttattacaggtaaccacggcgatattttgcgccagaaatcgtttgtagagcgatgctattttttcgcaagccgtattgtcgacaaaaatactgttcggaagatttagcgcttcaatctggtttataaagtgttctgcgttgctgtcttcgcccgattccagtacacttttccagttgtcgagtgcgataccttcaacatcaaaatgcatgttacgggaattggaaatcccacccacacggaggtttaatttcagattatcccgtaaatagtcagcttgctgatgcagttgttcgagtaattttccgcccacattgcccacaccacaaataaagaggtgtagctgtttgatatcatcttcaaaaaaacattcgtgtaatacattcagtgccttgacaacgtcttttttatcgataactgccgaaatgttgcgttcggaagcaccttgtgcaatggcgcgtacattgacgttgttctttcccaatatgctaaacattttaccactcagtccctgatggcttttcatgttttcgccaaccaatgcgataatactaagctctttttcaagaagaaccggttttattttttgcaatcggatttcgtatcggaaagccatatcgatagctttcttggcgcgttgggcatgttcttccgctattccgatacaaatggaatgctccgaggatgcctgagtaataaatacaatattaattccttcgcgggcaacggctccgaaaaacttttcggatattccggccacaccaataagtccggatccttccagtgttagtaaagtgatattctcgatatgactaattccttttacggattcgttgttggaggcgcaatcgggagcgatatgggttcccggggcttccggatcaaaagtatttttgataaaaaccggaatgttcttgttgagtaccggttgtaaagttggcgcatagagaactttagccccaaaatgagacaattccatagcttctctatagctgatttcggcaatggcccgggcttgttttacgagtttcggattggcagtgaacattccgcttacgtcagtccatatttgtaactcactggcatcgagtgaagcggcaatgacagcagcagtataatcggagccaccacgaccaagcgttgtagtatggccattatgggactcggctataaaaccgggaagtatggtgatgttggcctggtttttatcgaaataatactggatggcataattactggtttcgaaatcaactgcggcgtttccaaattgttcgttggttttgatcagttcccgactgtcgcaataggtaactttgctaacatcggattgtaattttgcaaagaggattcgggatgcgaataattctccataagacaggatggcatcgttcgtttttgccgatagttcacccaataaaaagcaaccgtctaatagggaggcaatagtcacaaagccagatttgagataggattgtattccgctattatcctgatccggaagtagcttttgtacgacttcataatgccttttttgaagttcgtttaggatatttttatagtgaaaatcacggtttttagcccgattaatggcatccaataacgaatcggttacaccggccaaagcggatacaaccactacttttttttcgggtatattttgtattactgcgatagcctgtttgatattctgttcgtttgcgacagaagtacctccaaattttaatactttcatagtactatatgttatagcctgaaactgtttgcagtgaaaggcataggattgaaaaatagaaatataaatggattcgtttgaaaacaaacgacttagcggtgttagaaaataacacgcagctacactggactatatgaaatgattataccccgaacggggtagtggttgttgtaatggtaacaatagaaatgacagccgaagaagattcggttgctataaggagcttatattttctattgtctgttagcattattacaaatataacagtttttgtttagaaaaggctttttttgtaaatttataggatgtcaaaaaaggttattatatggacaatctgataaaagtcgataaaaacgtagtgctacagcggtttcatcccattggtaaattttcgcataaagggatacagggacatgctttgatcatcggtggaagttatggcaaaataggtgcgccctgtttgtcggctaaagcctgtttaaaatccggagcaggattggtaacggcttatataccgaaatgcggttatgaaataatgcaaacggcacttccggaagttatggtggaaaccgacgattatccggcacatatccgggcgatcgagaccaaactgaaaatacaggcagttggaatcggaatcgggattggtcagcatctggaaacccaacaggccgtttttcattttttaaaactaaataaagcgcctttggttattgatgccgatgggattaatattctatcggaaaacaaagaatggctggagtttttaccacccaaaaccattttgacgccgcatgtaaaagaattggaacggttgctcggcgaatggaaaaacgaagtggagaaaatggaaaaggtaaaagcgctctccaaagaatgcgacattgtaatggtgctcaaaggtgcgccaacgcgcattgtttatcaggatcaggtttttgaaaatacaaccgggaaccagtctttggcgaccgcaggaagtggcgatgtattaacgggaattataaccggtttgctggcacaggcttatgatccggtggatgcggctgttacgggagtttatattcacggcctaacggccgatattgcactaccggaattgggctaccacgcgtttgtcgcttccgatagcattgcacatcttgggaaggcattccgcacgttatatgaataaaaaaacgcttccggtttggaagcgttttcgattattttacaccttgtttggtgaatagttctgtaagttgtggatccgatggtcgtggcgcatcggctgtaacgatgtttccgttaggatcgacaaggataaatcttggaataccttcaattccgtattcttttacaaactgagagttccagtcgttatcggcaaataactgaataccacctaattttttctcatctaccagttttttccatttgtcgtggtcttttttggcatcgatcgaaatacttacaaattcgatgtttttaccgtggtattgttcttccactttttgaaggtgtggaatttcctgacgacacggaccacaccaggttgcccatacgtcgatatatacaaatttgccctttaggttgtccagtgacgtctgaccgcctttgtaattttcgtagttgaatttaggcgatggttttcctgcgatcaatcctttgattttattgaacttttcggttaaatcttctttgaatttggtatcggtcgacaacaccatgatttctttgtataaggcttccgattcggtatttccggcacggatctgatagcctaagttttgtagaaagctgtttttgatgttcgggctttttacttttttaatttcggctaaaatcttatcgcttaattctttttcggtcatgtttgcgctgttttccgatactttctggttaaaacgcgcggcgatcaattgtttgtacggattggaaaacaagaagtcgttatcgctatccatatcaagggtagtatcgaatttcgggaagctttcagaaggtttaaagttttcctttttagcataatgcgcatgatatgccgggtagtttaacaataaaagttgttcgaaatagtcgatacttttttgctcgttctttttaaaagcggcatctgcaaatttggtaccgttatacaattccaatacggcattttttaattctttgcttttgctgatataagccgtttcatcctgactatagaatgtctgcggattgccaagcatcgtattta

SEQ ID NO: 1750 - DNA, 16222 bp, synthetic construct
  misc_feature 1..16222: note = Synthetic
  source 1..16222: mol_type = other DNA
atcagaagaaaaaattaaaaatgaaacggtcaaaataattgtcagaaatttaatcaaatcttgtcagtttaattaagaaattaatcattttcagaggttttttcaatttaacgaattatcttatttagaaattatcaactgtcaaaactacattaaaatttttgccgtctttgaaattattcagtctccaggcaaaatcaagacggaataaactcaagatacctccgattccaactcctgcttcctgatatatacctgacgtttcgctgtaacctttgtatgatgagagattaaaattcttcgctgaaatttcacttcttcctgcattgtaaaatgccacaaagttaagtgtgttcagcaatggaaaatttccccaaattaattttccaaaatcattctcaatatttaaataaaataatttatcgccgagatattcctgatatctcataactttaaatccgagtgcaggatttatacctcccggattagcattgaagtatgcaagactttgatagggaacttctccgttgagataagtaaaacccattttgtaagtaacattcaacaaaaatcccgccctgtttcttccgttcatcatcactgaatattttctgaaatcataagtgcttcctagattttttgaattattctcgtatgaaaattcaatcgttggaaaattagtcagtcttaatctcgactcgttatcatctccccaatctatatatttatatttgtttggatctaacctcatagaaaatcccacacttctggaaaatgcatcatttataggaggattggctttgaataactgatcattttttaaaaaactaaaattagtatttttaaaagcactctgttgtttttcctgttgaatagatccttcaaatctgaatagtggaacaggtgagtaattaattcttgcaaaccaacctgaattatacatataatcatactgatcgtctttaatacctaaagaagtcattgaattgtaaaatctcgcaagaaaaaaaacatcaaaattcattgtggtaagttttctgtaaattcccgcaccaaaatttaatgacctgtcaggaagcaatctctgtctgaaactcagttcatattttaatttttgatcatcaagtccgtatcctatcatcccatccgctcctgttctccatctgtccgctctgtatcggagattcaatccgagaaaatttccttctactctgttataatgataataactcaatggaacacttgcaaaattttctccgaagtttatcgcagtcggacttattgtaatttcagtttttcttttttcctcgttaatttctatttgtttatatgcaaactcttcctcaggtgtaggttcgattagtctgttctttgcccagtaagatgaatcttttgatgctcccggctgaactttgataatgtatttatcaaacgttccgggtggtgcgggaatgtttatctgataatcttttacaactgaaaatacttccgctttgaattgcaaaaatccgagcaaagatcccgtcccgttaatctgattgtcagtcggtaaccagtattcatacttttgtgtatctgtaaatggtgaaaaactttgtttgaaatttatgtttgaaaaaaatcttaacttcgccgcattgtttgtagtcaaatcaattttcataagtgcaaaaattgaatcaagtatatataacgttcccgaaaattgaggtacgagttctgatttatttttcatctcaattttaaagactgtaagggaatctattgttgttgttcctgtcagtcggtaatcgtaattatcaaacgcatcattacttatcggtccgggcactttaaactcctgcaaatcaacattatcatcataaaaattcactacaaacggtaacgcaactcctcttctggtgtttgcagtttctatttttgaaactattatttctttaaattcatttggttttctgaaatatccgatactttccgattctaaaatgctgaatatccccatctcgtttttatctttcattatggcagtatcttttacactcatctgattggattttaaaacgagttttgaatatgcttcatatttatactctttaagtcggctgttaaagttatttttataattaatggcatttctgattatctcataagcaggatcttcaccgctaacggttatttcttccgtgagaatttcagactgtttcaggtaaacatccctgacaatatctcctccttcgatatttacatatatcgtatctgaaaaatatccaattagagaagtaacaactttatatcctccttccggaagtaaaaatttgtaaacaccgttttcatctgatgtgctgacctgatttgtcccttcgattcttaaagttgcaaatccgacagttgaattaaattttaaatcataaacagtacccgtcagttgatacttctgtgcaagtgcgatgttacaaataaaaaatgaaaggagaataaatttgaacattaatttttttttgtctttaaattttctctttacttatgaaagcgaaatagttaataattttttgtcgtttaaattgtaaatttcaggataattaaattcagttatctgaaattttgtattcttatattttttttgaaggtcggcagtttcctctgagaggtcgcctcctttaatacataaaattttgcctgattgtttcagaaaattaactgaatattcgtataacttttcagcaggagcaaccgctttggaaacaacataatcgaacttatttttatgtgccggaagtagtgaaatttcttctgctcttgctgcaatacctttgatatttttcagccccagtttctctgttacataatttacgaccataatttttttacctatcgaatcaaaaagaaaaaagtcattgttcggaaaaagaattttaagtggaattcccggaaatccgccacctgttccaatatcagcaatcctgtcagtttctttaaaggtaatgtctttaagaaaaaaaatggaatctataatatgtttttcaattgaagtcgtttttctggaaactaaatttattttttgattccattcaagcagatatttttcaaaatttataaattgttcacgctgatcagaagttagttttatatttaattcattttcaataaattcaaaaagtaaattcatatctcaaactaaaacaattaataatattattaaattcaaatggcaggacataaaaagtttattataagaaagatggaattggaagatttagagtttgcggttcagcttgcaaaagaagaaggatggaatcccggaattcacgatgcggaatgtttttttgcttccgatccggatggattttttgtaggtgagttaatcgaagatgacggtaaagaaaattcagaagaaaaactcgcaggtggagcaggaagtggggcgggaagtaattctggtttagcaggcggagcgggaatttcaggaagcgatgccggagctgcgggagcgggcggatctggagcaggaggagcaggaagtagttcaggattagccggaggagcaggaggagcaggaagcagttcaggtttagccggaggagcaggagtttctgaaatagaggcaaaaggtgcgggagttttggattccggagcaggagcaattgatactggcaaaacagctactggtattaaaaaagaaagaatcgctgtagtatctgctgtgagatatggaaatgaatttgcatttcttggattttatatcgtaaagccggaatacagaaaagaaggttacggctggcaaatttcccggtatgctgaaaatcacgttaagggaatgttaataggtattgatggagttgtgcagcagcaaaaaaattatgttaaagacggatatgttttttatatgaatcaatatagatatgaaggtgagaatataaagggtttcagagatgaaaaaattattaatcttcaaagttatccttttgaacaggtgtttgattatgacagaaaagttgtaggatataaacgtgaaaaatttttgaatgaatggattcaccagcagggaatttctgctcttggatatgtggaagatgggaagttaaaaggtatgggagttataagaaaatgttttgtaggatataaagttgggatgttgtttgcagatgacagggaaattgcagagaagattttttatgcactcgctgaaaaagcaaacggagaaaagatttatctcgatgtgcctgaaaaaaactacgaggcatatgagtttgcaaaagagaaactcggcaaatatgtttttgaaacggcacgtatgtataaaaacggaattttaaatcaggatatcggaaagattttcggagtcaccacttttgaactggggtagtttgttaagcccctctatggaggatgagtctgctaaagtcggaaaattctttctgtcattctgaaggagcgaagcgactgaagaatctctacgcatttagaagtaaagatccttcttccgataaatcggaatcaggatgacagaacggatttggaactctaagattgaatcccttagtccccctttggaggagcctgtcccagcttgtcccgatgtatcgggaacgtgtcgggaggaattgggggagggctctggttaattcacaatttgtgtaattcgtttaattcgtgaaaattcgtggtgaagcgactatgtcatcctgagcggagcgaaggatctctgataaatactaccaagggattcttcagtcgcttcgctccttcagaatgacaggacttattcgctcttacagaatgacaaaacctttccaaaaaaaaagtgatgcggaaaaaatccacatcacttttaattttaaaaacaaaaatataaaaaacaaaaatataaaaaatactttaatgcaaaaaataacttacgcttctttgacgattctcattccgtagaaacttctccatacaaagaataatgcgaccgctaagaatacatatccaagcacgcctgcaatacctctgaactcaggaacgattgcaatctccatcgcaagcaatccaaacaatgtcgtaaatttaattataggattcaaagcaactgatgaagtatctttgaaaggatcaccaactgtatcaccaacaactgttgcatcgtgaagcggtgttcctttttctcttaaatcaacttcaacaactttcttcgcgttatcccaagcaccaccggcattagccataaaaatcgcctggaaaagtccgaacactgcaatcgaaattaaatatgcaacgaagaatgatgtcggtgcattatatccattctcaccgggagcggacataaatgcaaacgcaattgcaaaacagaaaatcgcaatgaaaatattaaacatacctgcttgtgcatattcagtacagattcttacaacttcttttgacttctctgttgaagcactcatagaagcattttcatcaagattgatatttttcttaatatactcaacggctctgtaagcacctgttgttactgcttgagttgatgctcctgtgaaccagtaaattacagatccaccgcaaaggaacccgagcaatgtataaggatttaataagtttagaactgtttccggctcaacaccaagaacatttttcaatacaaggataagagcgaaaatcatagtggtagcacctacaactgcagtaccaatcaataccggcttcgctgttgctttgaaagtattacctgcaccatcgttttcttcaagataaagttttgctctttcccagtcaggtttaaaaccaaaatctttttcgatttgttttccgttctcttctttgttctcttcaatcaatgaaagttcataaacagactgagcattatcagttacaggtccgtaagaatcaacagcgatagtaactggacccataccaagcataccaaaggcaaccaaaccgaaagcaaatatcgatgcgtaaatcatcatatcacccggaattgaatttgatgcaatgtatgcaacaaacataagcacgaagaaaaccatacctttccagaacgcagaaaaattacctgctaccaaaccggaaagaattgtcaacgaagcaccaccttcacgagaggcagtaacaacttcctgaacgtgtttagattttggtgaagtaaatatttttgtgaattcaggaatcaaagcggcaccgagtgttccgcaggaaattataatagaaagagtaagccatagatcattcagaagatttccgattaatacataacttacgatgaaagtaacaattatagaaagaatagaagtaatccaaacaagtgaagtaagcggagcttcaaaatccatcttatctttgcctttatattttatgttagacataaaaccgttaatataaaaagcaccgatggatgtaagaatcataagaattctcataacaaaaatccaaacgagcaaagtcgcctgaagctcgacacctgtaacagcaagaacgataaaagaaataagagcaacacctgttacaccataagtttcaaaaccatcagcagttggtccgacagaatcaccagcgttatcaccggtacagtcagcgattacacccggatttctcggatcatcttctttaattttgaaaacaactttcataaggtcagagccgatatcagcaatcttagtgaagataccgccggcaattctcagagcagaagcaccgagagactcaccgatagcaaaaccgatgaaagaagcacctgcatattcacgaggcacaaataagaaaattataatcatcataatcaactcaacacaaatcaaaagcacaccgatagacatacccgcattcaaaggaatgttcagcagtttaagaggatttctttcaagcgaagcgaaagccattctgctgttagccagagtgttcattctgataccgaaccatgcaacaccgtaagaaccgagaataccgatgacagtccagaataaaatcagagccacaccgccgatagacatatgcgagagatatccgaagtaaaacgcaatacacaccccgataaaaataaagaggatgataaggaattttccttgttgaagaaggtaagttttacatgtttcaaaaatgacctgagccacatcaagcatagacttgtgagcaggtaatttttttacttttgtgaactgataaagaccgaagagtaaaccaagaacgcagactatgataccatagtaaagcaattgattctgctcggcacttaactcagggattttgagatccgcttcactcgcaaacgagattacgggagtcaaaaccaaaaaaagtagagcaattagttttttcatttaattgatttgattagataataaaatttttattaaacttattcataactttttttatgtcatctgaaattataaaatcatcaatcgcatccagataatgcggcatcattttttttaaaatttcaatttcatcttgcgaaaaatttgagagcacaaaatcaacgtattcatcttttttaataatctgagcagccgagtcatcactttcagaaatttttccgataccgattctcattcgcggaatatcaagagattcaagtctgtagataatatcagcgataccgttatgcccgccatcagtacctgaaggtcttattctgatggagccgagcggaatttgaaagtcatcatatataatcagaatatgagagagttcgagaagattagactcgagaaactcagcgacggcagagccgcttctgttcatatatgtagtaggttttaaaagaacaaaattttcagatctgcaaaaataaaaatcgcctttaccggcagagaagtttaagttatgccgttcggcaaaaaggtctgcaataataaatccgatgttatgacgagttagagaatatttactgcccggatttccaagaccaacgataagtttcaaaatgaatggataaaaaaatcccgcttacgcgggattaaaaaattaagattctttttcttttttgcctttagacaccacttcaggttctttagcaccgccttcagcggctgcttcatcatctttttgaacagatttagcaataacaccgactacggaagcattagcatcattaagcaatttaacattatcaattttaatttcagatactcttacagagtcaccgatttttaattcttcgacattgatatcaatgtgagaaggaatatgtttcggcagacatttaatttgtaatttatgaagataatgttgagtaacacctccttctcttgcaccgatagcagtaccgacaagttgcacaggaacttcaagttcgatttcctcatcagcgttaagcgagagcaagtcaaagtgaataggtttatacttcactggatcgaactgcacatctttaacgatacaactgtgagctgcatcttcaccatcaatggagagattaataatatgagattcagaagtgtaaatgaaaggtctcaagtcaaggtctttggcagcgatcgggatattacctacaccgtgcccataaaatatacccggaatcataccggattttttcaaatcggtcaaaagagattgccttccggtttctcttttaaaagcttttaatgataattcagacataatattagcgtttttatgacaattttcaagatattcaaattaaattgtaatttcaattccaaaatcccgttgaaaagaaaaaaggggggaatggtaaaaagaataagaaaagattgaattatataagaatcgctttcaggagactcctgcgggagagggttttacctctttgtcatcctgaacccgacttttgggtgaaggatttctgttaaaaaatgcttaaagatccttcggtcgcaagctccctcgaggatgacagggggaatctttcccgattaatcgggaatggcagaatttcacaaatagtttataattcttttgaaattcagcttccgttacaattcttatatataaactttactaatttttatgaaaccagttatcacaagaaaaattaaatttttttttatggtaagatatggtaaagaaatggtcaagaaacggtaaagttttagggggagggaagcatttgcaatcaaatttaaggaatctacaaagtcccccttaggaggagcttgtcccgacgtgtcgggaggatttagggggaggacttggctactttttttaaattcgtaccttacctatcctgtcaataataatctagtttattacaattccatttctaagactccctaatatcattccaaactcacattcccaaaaaatcaaaaacccaattcaaaaaaagtgtgcaagtccagacacatcactccggctttagcacgccggcgattatgtctgcaaccagcacacaaagtctgtaaaaagtaaatcagtataaataatcttttcggaaaacttaaaagtgtgaaacaccaatccagtttcaaatttgacaaaaaatatttttaaaatcgagtttatttggtggcaaaatggtgtaattttggtgacatttcatccttgaagtaaatcaaataaacctcaataaaaaaagataattagaaaaatattttttaaataaaaaatttcaaaaattatttagaaatttatgagcataaattgtcactacatttaattttaaattaatccatttgacgatatgtacaaaaattttttttccacaaacaatttaattaaccaaaatgagaaagaacatttgacgggcaactacacccatacaaatataaggtaatcaaataaattatgaaagtgaaaaatattggtcgttaaatggaatgaaattataattttcgtattgaaataaacaaaaaaaaattacattttattgcagtcagaaattgtaaagatgaatgcgtcgagatttcaaacagtataaacctgaatagatattgctataaataaaaaaaggcgactcttatttctaagaaccaccttaaatgttttcacaacggaatcatccttattgtgatttgcttcaaaaagttattcaaaaatataaaatataaatttaaaataaaataccatgaaaaaaattttaggattggatttaggagtatcttcaattggatgggctttagttttagaaaatgatgatataagagaaatactcggattaggttgcaggataattccgttaaacccggatgacaaacaagaattttcaactggaaattcaatttcgaaaaataaaaaaaggacaacagatagaactcaacggaaaggttatgataggtatcaattaagaagaaaaaacttaacacaagaattgttagaaaagaatatgtttgatgaatctattttgaatttaaaaccgcttgagttatggggattaagagcaaaagctgtcaatgataaaatcacactaaaagaattaggtagagtcttatatcatttaaatcaaaaaagaggatacaaaagcggacgaagtgaagcaaacttagataaaaaagatacagaatatgtttcggaagttaaaaatagacatcaagaaataaaggaattagggataactattggtcaaaaattttataatgaattattaaaaaatgaacactatagaattaagaaacaagtatttccaagagaagcatatattgaagaatttgatgcaattatgagggagcaacaaactcactacaaagaaatattaacagataaatttattttaaaactaagaaatgaaattatatattttcaacgaaaactaaaatcacagaaaggtttagttaatgtttgtgattttgaaggtttttggtttaaaactgaagaaggcaaagaaatatttgtagggccgagagttgcacaaagaagttctccattgttccaggtttgtaaaatttgggaaacaataaatcatatttcactcagaagtaaaaaaggagaagaatttaaaattccattagaaaagaaaattgaactttttaaatatttagatacacatgaaaaattaagtcaagctgaattatttaaaatcctaaacttaaaaaaggatgattactatggaaataaattaatagcaaaaggaattcaaggaaacattacaaaatcattaatactaaaatctgttaaaaatttaatttttgatgaaagtttattaaattttaatttagagattcaagagaaaaccgatgaagaaatatatttaactgatatgaaaacaggtgagataatagattcaaatattaaaaaagtaatttcagacaattttgaaaaacaacccttttatcaactttggcatacgatttattcaatttcagaaaaaaatgaatgtataaaagttttaatgaataaatttaatatagagcaaacaagtgcggagaaattggcttcattagacttgacaaattatgcatatggaaataaatcatccaaagcaattagaaagatacttccttatctgatggatggatttgtatatagcgacgcaagtagttttgcaggatataatcattcaaattcattgactaaagatgaaaacttaaaaagaaaactgatagataaaatacctttgttatccaaaaatagtttaagacaacctatcgtagaaaaaattcttaatcaacttataaatattgttaatgcaataattgaaaaatatggaaaacctgatgaaattagaattgaattggcaagagaattaaagcaaagtagggaagaaagaaacgaaacatacaaaaacataaacaaaattgaaaatgaaaatgaaattattagaaaaagattacaaaatgattatggaataagacccacaagaaataatattattaaatggagattgtttcatgaaatcaataatgaagaaagcatcgtcaatgctaattgtatttattgtggaaaacaattcggaattactgaagcattgaaaggaagtaacgtagatgtagaacatataattccaaagtcactattgtttgatgattctcaaagtaataaaaccttatcacatagaaattgtaatgaagaaaaaggaaaagacactgcatttgattatatgcagaaaaaaggggaagaattattcaatcaatatttaaatcgtgttgaagatttatataaaagaagaataataggaaaatctaaaagagataaacttttaactcctataaataaaatacctcaggattttatagaaagacaattaagagagactcaatatatatcacggaaagcaaaagaaatattgcaacaagtctgtagaaatgtttggagtactagtggaaatataactgctcaccttaggaatctttggggatgggatgatgttttaatgaatcttcagttaccaaaatttcgagaacttggtttaactgaatttattgaatgggaaaccaaagatggacaaaagcataaaaaagaaataataaaagattggacaaaaagagatgaccatagacatcatgcaatagatgcactgacaattgcatgtacaaaacaaggatttattcaaagaataaatactttaagttctaaacatactcgaagtgaaatgtttgctgagttgagtaaacaaaatactgagttcaaagaaaaattgaatttattagattcctatcttatattgcaaaaaccgttcacaaccaaacaggttgctgacaaagctgaggaaatattaatttccttcaaatccggaaaaaaagttgcaaccataggaactcggaaaataaaaaaaagaggaaaaaaagtagaagttcaaaaaaatataataatcccaagaggagcattaagcgaagagcaagtatatggaaaaataagaatcatacagagaaaaaaaccgattaaatatttatttgaaaattcttctcttatttataaaccctacattaaaaaattggttgaagaacgaattagcaagtttgaaggtgatataaaaaaatctatttcatcattgaaaaaagaacctatttatcttgatgaagaaatgaaaattaaattagaatatggtagttgtttcaaagaagaaattgtaataaaatacccattagaaagcattaaagcaaaagatgctgaatttattgtagataaaaaaattaaagaacttgtaatggaaagattaagtaaatttggaaataaggaaaaaggagcttttgatgaaccattgtattttgatgaaaaatctaaaattcaaataaaatcagtaagaatgttaacaggattgtcagcagtagaacctataaaaaaagatgaaaatggaaatgatattggatttgtaaaacctggtaacaaccatcatatagcattttattcagatgaaaacggtaaaaccattgaacacatatgcacattttggaatgctgtagaaagaaaaaaatttggattacctgttataattaataatccaaatgaaatctgggaatcaatactaaatgaagaaaatgatgataaatattcaaatagttttttagagaaattaccgaagaataattggactttcaaatacagtatgcaacaaaatgaaatgtttataattggtttatcaccagaaattttaatcaaagcattgaaagaaaaaaataaaaaattattgagtaattatatctttagagtccaaaaaatagcgagtaatgattattggcttagattacattcagaaactaaagttggagataccaccaatgtaaaagaaagtaaaagatattataggatcaaaagtattggagcatttgaaaaattaaatccccaaaaaatcagaattaataaactcggggaaattataattgattaaacgaacattatattttggaaatcctgcttacttaagttgtaaaagtaatcaactcattattgatataaaaaatgaccagtatgagtttacttttattgaactttcagaaattgacaaaagatatcttacaaggaatcaattgaacaacaaaattccaattgaggatattggaataatcattatagatcactatggtgttgtgatgtctcatcatctaataaattctttgcttgaaaataattgtgctgtagtattttgcaatatgcaacatcttccaagcggaatgattataaatcttgatagcaattcacttcaatcagaaaaatttcgaactcaaatcaatgcctctttacctttgaaaaaacaactttggcaacagacaattagagcaaaaattttaaatcaagcagaatttttaaagcggaaaggaaaaaatgtgaaagttatggaaaggtgggctaaacaagtcaaagcaggagattcagaaaatttggaagcagttgcagcccaacattattggaagaacatttttccaaatagattagatttttttagatctagaactggtccaaatccaaataatcttttaaattatggatatgcaattttgagggcaataactgcaagaagtctgtcaggttcaggacttcttccaacattagggatttttcatagaaataaatataacgcatattgtcttgctgatgatataatggaaccatacagaccttttgtagatgcaattgtttgtaatatctctaatgatggtgaagattttgaagaattaacaccaatagtaaaaaaaaatcttttagaaatcccggtaactgatgtttatatcaatgatgaattaagtccattgatggttgcaatgcagagaacaacatcatcagttgcaaaatgttttagcggaaaattaaagaaaattaattatccaatatttccaccagtttaaataaaaataaatgcgtctaaacgaatatagaattatgtgggtaatggtattattcgatcttccaacagatacaaaaaaagatataaaaaattatacaaagtttagaaggtcattaatgaaagatggatttaatatgtttcagttttcaatgtatttaagacattgccccagtcgagaaaactgtgaggtgcatataaaaagagtaaaatctatattaccaccaaaagggcatataggaattttaagaataactgataaacaatttagcgagatggaaatttattatggaaggtcaaaagaagaaaaaacaattcaacaaccccaacaattagaattattttaaaaaacccgcatttcacacaacaaatacgggtttttttgacgattttttataatgctaatattctcgtaacatcattataaatatgctagttaaacgattattgttgttacaaaaatcgtcaaagaactttttgaaagcaaatcacaacacagacaaagaaattcaaaacgaatttttggttgttacaaaaatcgtcaaagaactttttgaaagcaaatcacaactccaactactaatttacttttaaagttaatgttgttacaaaaatcgtcaaagaactttttgaaagcaaatcacaactacggaattaacaatgcttaaaacactattgttgttacaaaaatcgtcaaagaactttttgaaagcaaatcacaacggtaaaaactacgagcttgaaggatccaatgttgttacaaaaatcgtcaaagaactttttgaaagcaaatcacaactattatgggtgatgatcataagtttgatatgttgttacaaaaatcgtcaaagaactttttgaaagcaaatcacaactcagtatttacattgatttgaatcaacctggttgttacaaaaatcgtcaaagaactttttgaaagcaaatcacaactactcagtattattccgttatatattttatgttgttacaaaaatcgtcaaagaactttttgaaagcaaatcacaacatggaatagagataattcgtaaagtccaaagttgttacaaaaatcgtcaaagaactttttgaaagcaaatcacaacggttatcccgtaataaatcaagatttttaagttgttacaaaaatcgtcaaagaactttttgaaagcaaatcacaacgtgctgataaatggataacagttcatcatgttgttacaaaaatcgtcaaagaactttttgaaagcaaatcacaacggtttgtggacaggttaataagtccgagagttgttacaaaaatcgtcaaagaactttttgaaagcaaatcacaacgcttccagctccgcacgtataggaaatagagttgttacaaaaatcgtcaaagaactttttgaaagcaaatcacaacgttaacgattgagggaagtggagtgaagccgttgttacaaaaatcgtcaaagaactttttgaaagcaaatcacaactcagcggtgtggtttttgattttggttaatgttgttacaaaaatcgtcaaagaactttttgaaagcaaatcacaacgttgtaggtgaagttgaa

SEQ ID NO: 1751 - DNA, 16131 bp, synthetic construct
  source 1..16131: mol_type = other DNA
  misc_feature 1..16131: note = Synthetic
tcaccaatgcttgcatctgtttcaaacgtggaagatcattaatagtcaatgattttttattttctgggataaatggtcctgcattgtaactctctaaagtcatatccataaaacctctgaattcatcgggtctcaattcatcttgattcactaaaacgcctacattttttctttcttcggcaatgatggatttgatgttagacgcgaaattgtattctaaattttcggcagatttattcagttgttcggtaaggtctatgtttgcctgattaattaccaacggaatagaagtgccatattttttgaacttaaacgtagcgtacggaaaaagaataacttttgtttcttttccgtctttggtgtaaggcaacatagatggttgcattcccattgccattaatgtatcttgagacattttggtagcaattgggtctataaatttataatctattttgggatttacttttcggaattcttctagcaagaatttggtttcgttttgtaattgcttaaaattagctgggaaatctccttccagataaacatctatggttagcggttctttcaccgattttagagtagcaattgtagcatcagaaagagtgtatcttttttctgcggttaagtcaaaacgatgagcaaacaccccgaaaatgcctaataacaagataatggctaatcctataaatatgatattttttttattacgtgatttcaaatttttatacattttattttgaaactattattttaaattttgcaactaaattatgatcaaaaacaatatctatgtaacttaatttttcgttatctaccataatttcaaacgaataattgttttttattttttgataatcaatgtatttttgtttttgtattgattttttatctagctctctttttccatttacagttttccaaatactaggatttttgtaaatattggtgttcacttgtattttatctaccaattcatcataagtaaattcaaatttaattttttctccttttttagcatttacaattccaaattctggctttgtaaatcttaaatatgacatttgataggcttctataaatggttgatttttataataatctttcgaaattccagaatcatttaaccaatttttatctttcgggaaatgatttctaaaaaaatctttattatttgtaagccaataataatcatctaattttttcacaaaatcatctaattctcctttttcattttttgtacaataaccagaagcccaagttaaatctacattataatattcattgtctatcttaatagaattccaggcgtggtctagaattcccatatttccaatttgatttgatgagtttttaatgtatccttctataattgcacaatgtaaatttgcaatatcacacattcttttgaataatttagaatagccatcgcaaactgctatttttttgcttaaaactctatcaataatctcattatctatttttgtaaatttctcattacaatcatcttttcctttgcattttacctcaattggttttttgtgtttattataagttttgtaatcatagcttatgttatctgcaatccaaataaaaatgactctgtatttttctttttccgttttacaattttgagttaaattatttaccaattgaggtaaatcatttttatatttaatggttcttgctatagaatctatttttttaaagttttgattttctttggtttgagcaaaggagactccaaaaacaaatgcaaaaataaatatgaaagttcttttaaccattacttcttcttttccacaaaaattttagccaagaacaaactcacaccaatcacaaaaagaaagtaaaacacatcttgtgtatcaatgagccctcgtgtaaatgccataaaatgatagtaaaatccaaggttttgtagcaaataatctgcacctcctaataatttgaaattcgccaattgttctatcccaaaatacaatataaaattcaagaaaacacccaacaaatacgccataatttgattagaagaaagcgaacttgccaaaatcccaaccgccgaaaatgcagcaatcaaaattataattccaaaataacttccaagagttgccccaaaatctaaatttccttcaggaacgcctaaaacatatattgaataaaggtaaaccaacgatggcaataaacataaaattcctaccaaaaatacagataaaaatttccctgaaacaatttcggagattttgagaggttgagaaaaaagccattgtaaagtgccattttgttgttcctctgcgaaggatttcatcgccaatgcaggaataatgaataaaaacaaccaaggcgaaagcgtgaaaaagctttgcaaactggcagttccgatgtcaagaagattaaaatcattctcgaaaaaaaataaaaataatgcggaaacaaaagaaaacgctccgatgataatccatgcgctccaattcccgaaataactccaaagttctttttttaatattgcaatcataatttatttatggaagatggaagacaaaatttaacttccagcttctgactttcttacttttttttattcactaatttcaccgtcatcataatgacaaacactataacgaaaaatcctacaattaattgccaccaatattctatggtaagtgctttcataattacagtgaaaaccactaaaaataaaataaaagtcgcgatttcattagcttgtcttaatttaagattaggtgtttgtaattctttggtattaagcgatttaatttctaaaattttcttccaagaccaataatggtacatacctagacctatcaaaaagaaaagtttaagctgaaaccaactcatttctagtaaagtaggatttaaaataatcatccaaatcccgaaaatcgccatcaaaacagctgctggtactgttataatattccataatcttctcgccataaaaacatattgctctctcaggatttctttttttggactttcgaaagcatctgtatctttataatacacaaaaattcttacaaggtaaaaaatccctgcaaagtagcttaccataaagataatgtgtaatgcttttataattaaataagtcatagtaatttatgatttatgattttcaacttccaacttccaacttctagcttctaacctctaacttccttcactcaaactgtacataaattttgtctcctacttttaaaccgaaaagagtattggctccatttttattggtgcctttgtagatagatatttctaataaatcttgttcgttaaaaatagccgatgctttgccatgatattcggtttctttttcccaatccgtcacaatgtctgtatattttctatgaatatttttgagtaaaatatttctgatgttgatttcgtgattttcaaaattaattgccgttttttcaaataaacctctgggaatgttggttacacaattgccaaaattgtctatatacattacttcgccaatcataattttttcggcttcattaaagtaaggttttgggaaggtaatttctttgtaattttttatttttctaccaataagttcgggtaaacctccattactaagatgtgccgctactggagaaaatatatctacactggcaaacttcacattatcatcaaatcggttattgattgtaatttcatagatggcttcaggttttacatcataaaaaataaggctcagcaaaccattatctgctgaaatgaagtaatgtccgtctgcttttactaatatattttttcggtctttatgaaaaaaactatccacagaaataatatgaatactttccttggggaaatttacatatgcattttttacaatatatgcagtctgtagcaggttgtatgcgtcaatttgatgagagatgtctataattctggcatcaggatttagctgtatgatattgcccttaattgctgcaactctgtggtccaccgttccataatctgaagttaaagtaattattggcattttttaatgaaataaatgtttgaaaaaacaaagatattgcttatttttggtaagataaaatttttaaaaacagaatatcttgtacgaactaacctatgaaatttccggcattaataccaaaactttttatggtgttaacaatcagttttttaatctgataaaatctagctttcctacccttaaaattactggtagagatcattttatttttgcaatgggcaaccaagaaaccttagatgtttttaaacaaaaattagatgatgtagtgaattacatttttaaaaataattctatagaattaaaggaattagaaagcatcttaaaaataaaagatgaagccgaaaaacaattggtttttgaccaagatattattgtaaaaggagtaaatggtaaaatcataaaagccaaaaccaccaatctgaagaagttggtaaaagaatctgaaaaaaaagatatggtttttgcaattgggcctgctggaacaggtaaaacctataccagtgtagctttggcagttcgtgcgcttagagataaagaagtcaaaaggattattcttaccagaccagcggtagaagcgggcgaaagcctaggttttttgccaggtgatttaaaggagaaactagatccgtacttacaaccattgtatgatgcacttagggatatgattcctcacgaaaaactagaaggttttatggaaaagaaagtgatagaagtagcacctttggcttttatgcgtggtagaacattagatgaagcctttgtaattctagacgaagcacagaatacaactcattctcagatgaaaatgttccttaccagaatgggaatgaatgccaaatttattattacaggtgatccttcgcaggtagatctgccaccgaaaatgcattctggactgaaagaagcgatgcgcatcttgaaaaacgttccggaaataggttttgtacatcttacagaagaagatgtggtaaggcatcctgtggtaaagaagattattttggcatacaatgcagaagaaaaaaggcaaagagaagagtagttatccacttattcacagtgagttataaatagcctaagtatttaacataagataatatattgtcaataatttgtgagtattgcttcaaagttatacttttgccgctcgaaattttataaattaataacaattatgaaaaagctatttttagtaggtgcattagcacttttcggagctatgaatgctcaaactgcaaaatcttctaacggagcaactgcaaaaggaaaatgggtgatagaagctaatacaggatcttggactacagctggtaatacatcttttagtcttacttcaatagatggtagcactgtttggaatattggagcagaaggcggttattttgttgcagataaattggcggttaaagttggtttaggttatggagactctgactttagcaaaggtacatttacatacaaactaggagctcaatactattttaacggaaatattcctgtaggtgttgattttactggagctagtacagatggagaaagtgtaaattatgtaggattagaaggtggttatgcttggtttgtagctccaaatattgcagttacccctaaagtaagatataatattgctactaaagatacttatgaaaatgccttccaaggattagttggtttttctttatttttctagtgtaatatagagaattaaaatttaatttatgccacttttagaacttctaaaagtggctttttagtttattttgctttattggaaaaaaatattacattagcaaaaattatttaatcaaaactaattaaacaatgagaaaattatttctagtaggagctttggctcttttcggtgctgtaaatgcacagcaaaattccgttaagtttaatcctttagctgttttcggtggttctgatatgtttacctacgaaagagcagtaggtgagcattctactgtaggtgcaggagtgggcttttcttcttataaaattacagatactaaatatagctctctagctggttctgtattttatagatactatttttctgaagttcttaaacgttggtacgcttcaggtggtgtaaattattattctggtaaatttacttacgatgatagtaaagataattacagttcttttggagtaagtgctaaaatgggttaccaatgggtttgggatagtggttttacgctagacttaaacggaggcttagtatatagaagttataattatgacagtagtaatgtagattctagtgtacttaaagcaagtggaataggtcctgcatttggttttggacttggatatacttggtagatttatatcaaaataaatttgcaaacataactaagcataagccattttctataaaggaatggcttttaatatttaaattatgaaaaaattatttttagcaagtgcaatagctctttttggagctttaaatgctcaagtaaatattggtgcaaaaggaggtttgtctgttactaccttatttgcagaatatcaaggtactaaaggcgtaagtgattctaaaatagctccttattttggattgacattacaaacaagtgtaaacgaaaaacttaaatttcaggctgaagcattgtacaccgtacttggaggaaaagattctgaaaacggggaaagtgcagattttaaaattcctgaatttattattccagtttcactaaaatattattctacagaaaaattctatttgcaaggaggtcttaattttggttttatttctaatcctaaagtaagtgtcaattcaagtattatttcaggttctggagatgcttcaagtgcttttaaatctttagatatggggttattgttaggcgcaggttttcgtgttgttccgaagttagatttagatgcaagatttaatatagggtttaataatatctctgatgtagatggaatggtaatgagaaataattattggcaaataggacttaattattggtttaaataaaaataaaaaacgcttccagaatatctagaagcgttttttattgaattttcattgaaatttatttcccgaaaaggttaccgcccattcctggcatattaggcattcctttgcccatcatttgcatcaattgttttccttgagggccttgcatcattttcatcattttgcccatctgttcgaattgtttcatcagaccatttacgtcttctatttttctgccgctacctctggcaattcttttcttacggttcatgtctatgatagaaggtcttcttctttcgtctggtgtcatagaatggataatagcttctatatgcttgaaggcatcatcattaatatcaacatcttttatggcttttcctacaccaggtaacattcccatgaggtctttcatgttacccatttttttaatttgctgaatttgttttaagaaatcatcaaaaccaaactcattctttgcgattttcttgtgtagtttttttgcttcttcttcatcaaattgttcttgagctctttctaccaatgaaactacgtctcccattcctaggattctgtctgccatcctttctggatagaataggtctagcgcttccattttttctccggtagagataaatttgataggcttattcaccacagagcgaatagtaagtgcagcaccacctctggtatcaccatctaatttggtgagaactaccccgttataatctaaaacgtggttaaatgctagagctgtatttacagcatcttgccccgtcatagcatctactacaaaaagagtttcggtaggttttaccgctaggtgaacttttcttatttcgttcatcatggcttcatctatggcgagacgacctgcggtatctataattactacatcgtgtttattttctttagcaaacttgatggcattttctgagatttctacaggatttttgttttctatttctttgtagatggtaacgcctacttggtctgctaatacagttaattggtctattgctgcaggtctatacacgtcacaagctaccaatagaggttttttggctcttttggctttaaggtaattggctaattttccagagaaggtagttttaccagaaccttgtaaaccagcaatcaggataatggtaggatttgcagaaaggtttattccttcttgtgtaccgcccataagatctaccaattcatcgtgaacaattttggtcattaattgtcctggggtgatggaggtcaatacattttcaccaagtgctttgtcttgtactcttttggtaaggtctttagcaactttgtaatttacgtctgcatctaccaatgcacggcgaatttctttcaccgtttctgctacgttgatttctgtaattttaccgcgtccttgtaggttttgtaacgctttatctagcttgtcctgaagactattaaacatagtttatgattttaagatgtgcaaaaataaggaattttgttgatttgttttaggattttattggtttcgtagagaatgatgttttattagaaggctagacaagatatttattacctcaaaaagaataaaaacattaatagtaaagtgtagattatagcacgaattttactacaataatcactaaagcgcataaaaaaaacgacctcaatagagagatcgttttaatttttatagaaaatacttagagtattagttcgctaactttacgtttactgcgtttaatcctttttttccttgttccacttcgtacgtaactttgtcgttctcgcggatgcttcttgtacccaaaccagatgagtgtacaaagatgtctgctccaccattagttggagtaataaatccgaagccttttgcttcgttgtaaaattttacggtgccttcttgcatggtaattttgttataaattgttgttattttactaattgtatattgatggcagaaaaacctttagccgatctttctttctcaaaagaaactttatttccttttttaaggggaacagaacaattgttctggtggaaaaatacattttctttggaacggtcttcggtaataaaaccgtagcctttttcgctaaaaaaagtaatgattcctgtttttagtttttcttctgcttctataggagcagcccctagttggatgtcttctagagagatttcgtctcttttttcgggtggtgtgttggtgattctcccgaattcatctacataagaaaacatttgttctaaatcttttcctttgttattgttctctttacgctcttctcttcggagcgctttttctttttgtttttgaagttttttcttaaaattttctttttttgagaaagaatctgccataaataatattgttctatttgtttttaaaattgtaaagtcataaccaaaattatttggtttttttgttcgggtatggtctatctctctttttgaaaaaagtagaagacttactctgtcataacttgtggggttttgatagggaggtattttgcctagttttgttttcagtgctgtgcatcattgtgatgaattaaagttaaaaaatggggcgctgaaaaagcaaaaactgaaaaagagaaaacaagattctaaactgtaacagatagcaaaggcagtaacctattttaataaatatattgcaaagatacattaaataaatggaatagcctaattatgtgtgcgatgtacgattttagattttctctcaacaacttttattaattacaatctgatttggtttaacatttaggcatataaaagtcttctgattttatacaagaggcaacccaaatgttttagctcacaagaatctaatttttttaaggtgttcgtgaaacattcaataattaatcaataaaaaaggcgagttgccccgccttgaatgttttcacaacggaataatccttattgtgaattgctttcgagtacaaatataaaataaaaaaaataattgaaataggggaaatccgtatttttatataaaagtttctttttaaatttatacaatttcaaaaaactcaataattatgactaaaaatatacttggattagatttgggaacgaactcgattggttgggcgttggtggaagttgacggaaataatattcctattcggattattgcaatgggatcacgaattattcctttaacagcaagtgataaagaagaatttcaaagaggtttgtcaattacaaaaaatcaaagcagaacagttagtagaactcagagaaaaggttatgataggaaacaactgaaaaaaagtgatttaaaaaaacttcttatcaaatatgatattttcccttctgaagaattattgaaacttccaatgttggatttatggaagttgagaagtgatgctgcaaatcctaatgaaaatatttcagccgaacaattagggcgtattttttatatgcttaaccaaaaacgtggatacaaatctgcaagaagtgaagccaatgcggataaaaaagatactgattatgtgcaagctgtaaaaggtcgttacgcccaattaaaagataaaaatcaaaccattggacaatttttttatgaggggttgaataacgctaatcttaataactcatatttcagaatcaaagaagaagtctatccaagagaagcctatatagaagaatttgatacgattattaatgctcaaaaaggaaaacacgattttcttacagatgagattattcatcaattaagaaatgaaattatttattatcaaagaaaactgaaatctcaaaaaggattggtgagtgtttgtgaatttgaaggctttgagaaaactgtttttgataaagaaaaaaataaagagaaaaccatttttgttggtccaaaagtagctccgaaaacttcgccattatttcaactttgccgaatttgggaagtagtgaataccattactttgaaaataaaaaatccagaagaaagcaaatataaatggggtgaaaagatacctacattagaagaaaaggaactcatagcagaatatttatttaaaaatgacaatttaagttttacaaagcttattgaaattctaaatctcaaaaaagatgatgtttacgtaaataaacaaattttaaaaggtattaaaggaaatgaaacttatgcgagtattcataaaattttaggagataatgatcttttaaattttgatgtttccattattccaacagaaaaaacttcaattttagtagacaaacagactggtgagatttttgaagaaagagcaggtttggaattagatgcaagtttagaaaaagaaccattatatcaattgtggcataccatttattctttgaaggatttagatgaatgtaaaaatgctttaattaaacgatttggttttgaggaagaaattgcagagaaactttccaaaattgattttaataaacaagctttcggaaataaatccaacaaagcaatgcggaaaattcttccttttctgatggaaggttacgattattctgaatcttgtagtttggcgggttacaatcattcaaattctttgaccaaagatgagagagaacagcaaaaaactatagatagattagagctccttaccaaaaacagtttgagacaacctattgttgaaaagattctaaatcaaatgattaatatagttaatgcaataattgagcaatacggaaagccatctgaaattagagtagaattggcgcgagagctgaaacaaagcaaagacgagcgaaatgatgcagatttacaaaactcgaaaaacaaaaaacttaatgaagaaatagggaaaagattgacagagttgggattgcctgctacgaagcggtatattcagaaatataaatttatttttccgtcactaagtaaaaatctaaaagaggctaaagtcaacaatcaatgtatctattgtggagaaagttttaatcttacggaagcattaagcggcgatgcttacgatgtagatcacatcgtaccaaaagcattgttgtttgacgattcacagaataataaagttttggttcatagaaaatgtaatgctaccaaaaccaatcaaactgcttatgattatatggctacaaaaggcgatgaagcggtaagaatatacgctgaaagagtggatgactggtttaacagaggaattatttcttatagcaaaatgcaaagattaaaagtttcgcataaggaatatttaggaagaaaaaagctagggaaggaaacggaaaccgataaaaaactttgggaaaacttcatcgacagacaattaaaagatacacaatatatctccagaaaagcacgtgaaattttgcagaaagtatgcaataacgtaacaactaccgaaggtggagttacagcaaagcttcgtaatctttggggttgggacgatgttttgatgaatctacaaatgcctaaatacaaagaattaggacaaacggtaactaaagaatggacaagtgaacacggaaaaagaaaacaccaaaaagaagaaattgaaaattggacaaaaagagatgaccatcgccatcacgcaattgacgctttggtggtcgcttgcacaaaacaaggttttattcaacgcatcaatactttaaattcaagtgaaactaaagatttgatgaacaaagaaattgaagaagctaaaatagaatttaacgaaaagactacacttttagaaaaatacttgaaaactcaaaagccatttacaactgaacaagtaatgaatgaagccgataaagttttagtttcttttaaagcaggtaagaaagtagcaactgtaacaaaatttaaagctacaggcaaaaataaaattactggcgtaattgttccgagaggagcattacacgaacagtcggtttacggcaaaattaaagttatagaaaaagacaaacctttaaaatacttatttgaaaattcaaataaaattgttgatactaaaattaaaaatctcgttgaaacaagactttctgaaaacgaaaatagttcaaaaatggctttatccagtttaaagaaaaacccaatctatttgaatgaagaaaagacagaaattcttgaaaaagcatcttgttacaacgatgcaacagttttgaagtataaattacaaaatttaaaagccagtcaagctgatgatattgttgatgaaagagtgaagatcttggttaaagaaagattagctcaatttaataataaagaaaaagaagcatttaaagatactctctggtttaaccaagaaaaacaaattcccattaaaaccgtccgtttgtttgctcgtcctgatgctaataatttacaagccataaaaaaagatgagaatggcaaagaaattgggtttgttgtgatgggaaataatcatcacattgctatttatgaagataaagatcaaaaacttatccaacatagttgtacattttggcacgcagtagaaagaaaaaagcataaaatttctacagttattaaaaattcatcagacgtttggaatgaattattaaacaaagaacttccagaatcatttttaaataaactacctgccgacaatctcaatttaaaattcagtatgcagcagaatgaaatgtttattttgggattatcaaaagaagaatttgacgaagcaattcaaaaaagcgataaaccattgttgagtaaacatttgtatttagtgtggagtatttctgaaaataattattggtttagacatcatttggaaactaagaattctgatttaaagaaaacagatggtgtcaaagaaagtaaaagactttataatattagaagtttaggatctttattttctttaaatcctataaaagttagattaaaccatttaggcgaaatcacaaaaatcggagaatattaattatgatcacccgctccatctatatcggcaatcccgcttatcttaggctcaaagacgagcagttgaaaatcctctgcccggaaaccaaaacggaaaaggggagtgttcctgtggaagatttggggttattgatgctggatcattatcagataaccatttcgcaccatctgattcagaaaatgatgggaaacaatgtcgtggtggtgagttgcgatgcccatcatttaccgcacggaataatgcttccgctgtatgggcataccgaacattccgaccgcgtaaaagatcagctggaagccagtgaaccgctgaaaaaacagctttggaaacagacggtggaatgcaagatcgaaaaccagaaaaatgttctgatgaaactggggaattattacgaacccctgattgaatatcagagaaatgtaaaatccggcgacgttacgaatatggaaggaattgcagcgcagcattactggaaatacctcatcagtctggactttttgaggcagcgttttggagattcccccaatcagtttttcaattttggatatgccgtactcagaagcgttgtcgcaagagccatcgtagaaaccggactgttgcctgttctcggcatttttcataaaaataaatacaatccgtattgccttgccgatgatttaatggaaccttaccgtccttttgttgatctgcttgtaatgcagtggctgaaaattcatccggatactgaagagctgacgaaagaatttaaagcgcatattctccagattgcgaccaaagatgtgcgtattgatgacaaaacaagaccgttgctggttgctgtaaaaacaaccgcttcttcgctttacaaatgctatacaggagaaaagcgactgatttcatatccggaattgatgtaatttttttatggcagctttatccgccctccgttcccgcttttttgcagatttccagccacatttttccagcactacaatctgcaaaaagagctccactcaggtcgggctgcgaacgttacgacaaacaaacaatagtcaccaaaaatgaacgccgaaaggtttaatgcataccgaattatgtgggttttagtattatatgacctcccgaccgaaacgaaagcgaatatgaaagatgcaaaccgttttcggaaggctttgattgatgacggatttactttatttcagttttcgatgtacgtgcgtcactgcccgagccgggaaaatgcagaagttcatatcaaaagagtaaaatttatgcttccgaaagccggaaaagtagccattatgtgcattacggataaacagtttggagacatcgaaattttttttgccagaaataaagaagaaccgccaccgaccttccaacaactcgaattgttctgaattttaaatcctgaaaacaaaataaacccactgtaattcagcgggttaaattttgaggttgtgtcatatcccaaagatactaaaaaatgaaagcaattcacaacgtgtattgaagtgaaaaaaaataaattaatgttgtgtcatatcccaaagatactaaaaaatgaaagcaattcacaacagagcttgtattattaaaaagagaattagagttgtgtcatatcccaaagatactaaaaaatgaaagcaattcacaacaattgaatggggtaaaattttagaaaattggttgtgtcatatcccaaagatactaaaaaatgaaagcaattcacaacgatacacagagactttacttgctcactggggttgtgtcatatcccaaagatactaaaaaatgaaagcaattcacaactgggcaacaagttcccaatctaatctaacagttgtgtcatatcccaaagatactaaaaaatgaaagcaattcacaacctcacagatattctggctggcatctctgccgttgtgtcatatcccaaagatactaaaaaatgaaagcaattcacaaccacgaactgatatatttgcggtacaggatagttgtgtcatatcccaaagatactaaaaaatgaaagcaattcacaacttctcgtttggcgttttctcttttctaaatgttgtgtcatatcccaaagatactaaaaaatgaaagcaattcacaacaataccaaccatcctttgtgagtagcctcagttgtgtcatatcccaaagatactaaaaaatgaaagcaattcacaactgccagacctcagaggtaaggatatgattggttgtgtcatatcccaaagatactaaaaaatgaaagcaattcacaaccttctgaattattggcagaaatatcgtatagttgtgtcatatcccaaagatactaaaaaatgaaagcaattcacaac

SEQ ID NO: 1752 - DNA, 15899 bp, synthetic construct
  misc_feature 1..15899: note = Synthetic
  source 1..15899: mol_type = other DNA
aaggttcattctactaatcctgcctggaatttctgctgaaatcaggtaatcttttgcctcaaaattaccgtaagcatctgatttttctttgttgaaaccgcaggagaccagaactactgctgagactattgccaatgctgaaaaaatcttattcatagtataattgttgtattgttgtttttgtgttctgtttcaggatattgagataaaaacatttcgatacattttattgattccacattaatctgtaacataattttgttttttaatataagccggattgaataaggtaatctgtttttgctcttgtaaattgtattctgtgaaaagcataattaagctttgccagtagttcgttgttcttttctgtgatatactggcttgaagtaagcattccattgtcaagctgagctgaaacaactttcgatatcttctcacgctttgcaataatttccgcatctgaaattagtaaagcctgtagcttctgaacctcagaaagttgtttttgctgagccattttaaggtttagattgaacacctgctgttgaacatctaccatatcatactgcatcttcagaattcgtttttcccttttcgtttgatcccagttccagaaattccagttcattttagccccgaaaatataataggattcaaaatcgcttttaagcatattcaatgccgggcggccataaccgagctgaccaaaagcaaaaactcttggcaaaagttttcttccgctgagatcctggctaagacttagtttttctttttgaagattgtaaacatcattttcaaagcgcttattcaaaaaaacgtttgtggaaatctctacaacaggaattttcagcattcgcggattaagataaacggtgtcgagatattctgaaagaatttctgtatgattcttaacctgaatttctgattcagcaagttgctgtttcagttttaatatttcagcatctataatatcagcattcatttccagttgcacacctccatcaactccggcttttatggattcaagccttgtgttcatatcatcaatgtaggttttaatgatgcgttctgacatctgtaactgcagcactccaaaaaataactggctgattctgtctttcagtttatacaattccgcttccagatttttctgattgtactcctgatccttgctttcaatcttcttcagcatttttgtctgacctccgtcgtaaatattctggctcagatcaagactcagtttatattgatccttgtcgggttcgggaatcgtaataaacggcagcttaaccggaatagaggtaacatccgattgataggaggcctgcccgttcaggctgagctgtggcaaaaatgcgacagaaaggttcttaattctatcctcactgcttttgctgaaaagtcctttctgaacagagagcggatatttctctatcgcccgtttattgcaccattcaaggctaattgaatcaagggcttgagcataaacaaatactggtacaaggaatgaaaggataaggaataactttttcatattgattactgctaaaatttaaagctgtttttttaaatttcttattatcaaattcttaatctcaacttttcggtttgatgtaaactcatcgatctgctgctgtacattgccaaaaatgagtttatcgagtagcggtttggccacaaaagggaaagcacataaggccattatatttattatcaaatgctgtgggttcacaggccaaatactaccattctcaatttcctggtcaatttgagtattaaacaagtcaaaccttaatccagtgccacgtattagtgctaaaattttttcaggattacggtttatttcatgtgtaacaaatgccggcagatatggatttgcagaaagaatatcgaggtactgatcaataaacatttcaattttctcgagcaaaaagcgttctgaagttaacaattcaagcatatttgactgaacctgcgaaaaagcttcaacaaaaattgattcaaacagattctccttactcctgaaatagtaatgcagcaaggatttgttaattccggcttcatcggcaatttcctgcatccttgcaccatcaaatcctttcagtacaaaaatttttcgtgcagctatcagaatactttttcccgtactattttccgttgacatgtttagaaataggtttaactgtttggtttaaccaagtggtcaaaattacaacataaaaaaacactttgtcaagtgtttttttaaatattaagtattttatatgctaagtagcagtatttcagccttctgtacctactttaattttttgtccgggtttcagactatttgcatttttaatattgttcagattttttatctgttcaacggtagcattatacttatttgctatatcccaaagtgtatcgccctggcgaataacatggtatacaaatttgcttttccggtcggtatctaaacatggtgctgcaatactaacggcttctgttacaacctttactgctgtagaatccacatccgtggttttggcaacatcaacttctttcgacggatccagtttagcagttgctgtatctggaacctctgtattttcgggttttggtgattttttcttcacatacaccagcaattcctgtctgtaatgaactgttccctttttaaggttattccatttttttatctctgaaattgagcaattatatctacttgcaatactggcaagcgtttcgccttttttaacaatgtgcaatgtagaattgtcgcgcatatcgcgaaccattgccatcatcttttccttttcgagactgcgctgcgttttatatgcgtaaacagcctgctcgttattaatgaaatcaataataaattgctttgggagacgcagtacgtatggtttatcaaatgatgcaggaattaaatcctttgaaaaagcaggattcagataccttatgttctccattgggatgttgaaaacctctgaaatttgttcaaaggagagaaaattctttatcgttacagtatcgatttcagcagccacaataccaggataaaccggataaagattatgttcaatggaataactcattacataatttacggcgaaaaaagcgggcacataatccctggtttcttttggcagataccgcattatgctccagaaatccataatgccacctgctctgcgaatagctttatttacatttcctgcaccagagttgtaggctgcgagaaccaatgcccaatcgccataaatgccgtataaatctttcagatgctgacaagcagcagcagtagccttgtaagggtcggaacgatcgtccatgtatgaattaacctgcagatcgtacattttgccggtaccatacataaattgccacaagccttttgcgccggcacttgaacgggccacaggattaagagcagattctataactgcaagatatttcagttccagtggaatattgtacttatcaagttgttcctcgaaaagaggaaaataaattttcgccagcccaagaaccctttcagtaagtcctcttttacggacagcgtaaagatcgatatattgccgtacagcctgattgtagataaattcaaaaggggagagtttatttagcttttccatacgcccggcgtaaacagaatcgctataaaccggaacataatcttctgagaaattgtatttattaagtgctgaacgctgtgcaggaaaatcgggatatccctgaaaagtaaaatttgcaaggctatcaagcatagaaacaataggattgtctttaaccagaccaattgcgcctgcccgggaagtatcagatacggctatccatgaagacgaatatgccccactaccaaggcacactatcaagcctccaagtattaaccatttttttaatcccatcctttatattttagtgcgaaaaattgcggtgtttgttttgaagtcccaagtttacaaaaatatctgaaaagaacaagaactttttaactttttttatagtttttaacaatctgatgttcatgcacagactgtctataatcaactatatcaaccaattaatacaaaataaaaattagtgtcgaactcaggatgctccgacaataaaaaagaggctgacagaaatactagaatagcggcttatccttggagctatcttttttctgctcctgagttttgtcttgctgtttagagctatcgtcgctattcataccttccttaaattctttgataccctgcccaactcccttcattagttcaggaatttttttacccccaaaaagcaaaagcgcaattacgactacaagaattaattgccagggtccaactacacctaagattatgttgttcattgtgttgtatttttcaaaagtcaaatgtacgaataatttcagttacgaaggtatcattattcttcatcaggatattcaggtgttattttaacgccatcatagcgtttctctattccatctttaaagctgataatcaggaaaatagaaccatctaattcatattttacccattcgccctgtttttttcccatcgtatagattccctcatcctttttattgccattttcccagtaataaatatgctttccatcgggaatatcttcaacatactttccttcaaactgaagcgtactatcgctgtaccacgatttccacaaaccatctttctgtccgtcctggtaatttccttcttcgcgataatcccccatttggtaggaccatttaccttgttcattgccatccacatattctccctgagcaacaattttaccggattcatcatattctgtcatcaaaccatccgatttcccatttctgaaactttcttctcgcctaacagaaccatcgtcgtaaaaccacttccagtcaccctccgtttttcctgctttattgtaacttcctgcagtttcaattttgccattctggaaataatatttccaggtgcctacagtttttccatcagtatatgaaccttctgatttcaggcttccgttctcaaaatattccttccatagaccttgtctaaaccctgcttcatcagtaataccatcggcaattttaattccctttttatataaaaaacccttgataatctttccgctttcatcgtattccctacgtattccttcagctacattatttctgaaactggcggtaatcttaagctttccacttgggtaataatctgatctattgtcgagtttaataacttcttcggcatcttcctgcaaaacatcgtcgatatacttactcaattttatcaattttccaccctgatcgtattctttaaagtatccattcttaaggtcatttttgtaaataccttcaagctttattgtaaaattctcccagaaaattatccaactaccctgctttctgccttccttatcgagcctgttaatgtttgccttcgaaattatatatccctttttatattcaatcaaggtaacaatattcccgtttttatcatattccctggcaaatccctgttcgagaccagcaacaaaatttaccacaagctttacttttccatccggaaaataataggttgttgctccgcttttaacgtcgttcacaaaattctcagtggttaattctccttctctgtaggtttttttcagaccattttttttgcctgttttgtaattaatttcaagaataagctgtccttcggtattgtaaaatttccacacactatccaactcaaaattcttacggtttccctccgatttctttgttccgttttcattaaaagttttccagtagccatcagctttaccatcccgtattgtgccttcgcttgaaattttaccgttagtatagtaatacttagtaagctcattcttagcagtatctgtttgagaatacgacagaaaagtaaagaaaattaaaacgactgtaagctttatttgtaaagacatattgtttatttccgctactttataagattcattttcttcgaaagactcaacatcttctctataggaattctggcttttcccattaattctaaaggtaaatttagcttaggtttttcatcatttaaagcattgtaaactttctctaaggtattcattttcataaatggacaatcattacaggcacaattttcatcagccggaacaataataaattccttatccggacttttcttcttcatctggtgaagaataccagtttcggtagcaacaataaactttcttgaatttgatttctgcgaatactcaagcaaagcagttgtagatcctataaaatcagcaagctgaagtattggctctttacattcagggtgggcaataagttcagcatcaggattgtttatcctgagattaattacagattccagattgagcatatcatgcacctggcaggtaccatcccaaaggatcatatttctgccagtgatattattaatatatctcccaagatttttatcaggagcaaaaataattttctgttcctttggaaacgactcaacaatggcgacagcatttcccgatgtgcaaataatatcagataatgcctttacttccgcagagcaattaatataagaaattacaatatgatcaggataattttctttaaattcagtaaaagccttagccggacaagaatctgccagtgaacatccggcatccaaatccggaatgagaaccattttttcaggatttaaaatttttgcagtttcagccataaaatgaacaccggcaaaaagaattaccttggcttttgattgagcagcttgttgagctaagcctaaactatctccaacataatctgcaatttcttgaatttcaggtatttgataaaaatgagccagaataactgcatctttttcggactttaagctcttaatgcctgcaataaaaaaatcgttttttgctttttcactcatcatagaatggttatcaaccttagtttataaaaaatgttttataagaagttttattattgttgatgttatcctgttaatagtgttaacaacattttcaggaagttttcaccaatacagtaacaaagttttaacacaattatttcattttaaaacattgaaaaaaagaacagtacaatgtaattaacaatttgttaaaatgtcgttgttaattactttgcacttggtttatcattttggggtgttgacaaatagtgttaagtaatcataaagtttccgttaaattaacatgaaaacgggtaaaaaactttaatcaacaaaagtaaatacttatgaacaaacaaatactgctaattgtggataatcatttaataaagtaattataaaaacactctgggtttgtaattgctatttttattttaatatttgttaatataaactattgatatataattgtttacatttttattgttgaaatctcagcatcttttgcttattttgcattactgttttaaaaatgaaatctgatgaataattcgattccgatagcctgtgatcatgcaggattttcaatgaaggagtttctgaaggaagccttgaatgagaaaggtatgcttgcaaaggatttcgggacttattcggaagaaagtgttgattatcctgattttgcaaaagctgtttgtatgcaggtaataaacaatgaggccgattttggagtacttatatgcggaacaggcaatggaatggcaatgactgcaaataagttcagttccatacgggcagcactttgctggagtccggaaattgcagggatggcaagaaaacataatgatgcaaatatacttgtattaccggcgaggtttatgacgtttgaagcagcgcttgaatgtatgcttgcttttataaatacagattttgaaggtggaaggcatagtgccaggattgaaaagatgaagaaagtaacggaagactaaaagacaccattatattatgtcggaactatataaccagtttttagaggatgctgataaaaatgccttcaatccggagtacaggaaaaggataaagtacaacatttcgaagtatgatgaatctgttgtgcgtggaaagcaacaatatcatgaccttgatctggccaaagacagagctgctttcatcaaacataaggttattaatgagctggaaaagtatctgatagagttcgagtctaattttattagtcatggaggaaaagttatctgggccagtgatgaaaaagatgcgatcagggaaattataaagattcttaagaagcatgaagtaaagacagtggtgaagtcgaagtcgatgacaactgaggagatagaattaaatgagcatctgaagaaaaataagattgagtcggtagaaacagatctgggtgaatttattgtacagatagctgatgagaagccttttcatatagttacaccggccatgcataagtcgaagcaggatgtatctgaattgttcaacagtaaatttggaacacctatcgacaatacaccggaggatattaccgtatttgtacggaagttgctgcgcgaaaaatttctgagtgcagaagctggaattacaggtgcaaattttctgatagcagatataggaggtattgcacttaccgaaaatgaaggaaatggaatgatgtcgatgtcgtttccgggaattcatatcgtattggttgggattgagaaagtaataccatcaataaaggatctggatctcttctggcctttgcttgccactcacggaaccgggcagaatatgtcggtatataatagtattgttaccggtccgcggcaggaaggagagaaagaaggaccttcagaaatgtatgtagttttattggataatggacggacaaaagtgctagaaaacagtgagcagcgaagggttctgagttgtattcgctgtggcgcctgtttgaatgtttgtccggtttacaaaacagttggaggatatacttataacgccacatacagtggacctattggttcggtaataactccgtttttcaatggatttaaggattacaagcatctgagttttgcctcaaccttatgtggttcctgtacagaagtttgtccggttcggattaatcttcatgagcttcttttgctgaatcggcgtgatgcagttaaaaagggatatacaacagggaaggataagctgatgatgtggacctggaagaagatgatgagtaagcgcagtcatatggagtatgttacgcccggagtaaagaattttcttatgaagaagtttgtagccaagacatggggcgatcggcgggagctgccagtattatcgccaaagagtttcaggcagatgtgggaagaacggaaagggatgaaatagtttgctggaagaataaaaaaattatcatacttttgtggccagaaaccggggcgttagctcagttggctagagcgttagactggcagtctaaaggtcaggggttcgactcccctacgctccacccggaaaccttctaaaaagcctgatttcattgcgagatcgggctttttttataggtagcaacataaatatattggttttattacatacaaaaaattgatagatttccagattgctaaaattgcaaatttcgccggaaaatattgagaaaattcagattggagcagatctggattattatcgttttttttcaaaccagagcttaatgtagcaatttaccactttaccaggctaataattaaccctgccctgaaggggcattttccattagcgatgggcagcgcccatcgtgtagaaagttgataaacaatataatagccctgtatgggcggcctaccgaaaggtggacagctctttaaattggtatattattcaattgaaatttacacacagattgagagagagacagtttgagtacaaaaccaactttagaatgatgcctaattgatgctttgtactgatttacctgggctttataaaaaaagaacgacccggttgcccgagccgctccaaatgttttcacaacggaataatccttattgtgaatagcttcagattgtattgcaaacatagtacaaatttcatagatttacaacaaaaataattgtgttatgaaaaaagtactcggactcgatttaggtgtgacttcgattggatgggcgttaataagcgaaaatgacaatgaagttgataataaaatacttggcataggttgcaggataattccatactcttctacagaagataatgatttcacgaaagggtcaggggaatcaaaatgccaaaaacggacaattcacaggacgcaacgaaaaatgtttgacagatatcagttaagacggactgaccttgtttcaaaacttcgtgagttaaaaatgttaccatcagcaacactgtttactcttgattctattggcttatattcactacgggataaagctcttcaggaaaaactatctcttgaggagataggaaggattttttttcacctcaaccagaagcgtgggtataaacatgcaagatctgatgagagcgaagacaaaaaagaaacacagtatgttttggaagtaaattcaaggtatgatgaacttcgcgaactcaaaatgactgtgggtcaattattttaccaaggattaaaatcagatcgtcactatcgcattaaaaacaaggtatatccgagaaaagcatatgaagaggaatttgataaaatatgggtaaaacaaaaagagttttacccggagaccctgacagatgaagtgtatcaggcaatcaggaacgaaataatattctatcagcgaaagctaaagtcctgcaaacatctgataaatatctgtgaatttgaagggaagttttatagaaacactgagggaaaggagatcttttcaggtccaagggttgcacccaaaacttctcctttattccagataaccaagatctgggaaagtataaacaacatcaaactaaaaaacagaagaggcattgaatacatcatcagtcctgcacaaaaagaacagcttttcaagttccttgacaataataaaacaatgacttcaactgatcttaggaaacagctgggcattgaggtatcagagggttattctggtgggcaaatgcttagcaaaggtatacagggtaacactacaaagtttgccttaaagaaagcctttgaaggagtagagttttccgaaaatctttttgatttcaatgttaaaaaagaaacctatgagaaagttgatattctttcaggtgaaataatttcacgtgagcggataacagctagctttgaaaatcagaatctttacaagctatggcacatagcatattcattgaaagaaaaggctgaaatagcagctgctcttaaaaaccaattcggcatcgaaaacgaagaagtaacgaatgcaatctataagctagactttgttaaacccggctttggaaataaatcctccagggccatgcgcaaaatcctgccttaccttgaacaaggttttaattacgccgatgcttgtgtttgggccggctataatcattccgacagcatgacaactgaggagaatctcagacgcaggcttttgaatcaattacctaatctatcaaaaaattcactacgtcagcctgttgtggaaaaaatccttaaccagttaattaatctggtaaatgcaataataaatgaatatggccgtcctgatgaaattcgtgttgaattagctagagaacttaaacacagcaaagatgaaagatcggattcatacaggtatatcaataatcgcgaaaaagaaaacaacaaaatagcagaccggctgcgaaatgaatacggactacccgctactcgaaaacaaattgagaaatggcggttgtttgaggagattgatggtgataatacaaggattaatgggtgttgtttatactgtggaaaaaactttggtatgagtaaggccttaaacggcgaagatgtagaagtagaacatattatcccacgatctcttttctttgatgactctctttcaaataaaacattgtctcaccgcagttgtaatttgtcgaaggggagcatgactgcttatgatttcatgaaaacgaaatcagaccgagaacttacggattacattgaaaggattgacaaactttttagtaacagaactatttccaagacaaaaagagaacggcttcttacaaccttggataaaatacctactgattttattagccggcaacttcgagaaactcagtatatcgccaggaaatcaagagaaattctgatgcaggtatgccatgatgttcattctactagcggatctgttacagagagtttgcgcaggatctggggatgggataaaattttaatgcaattgcatattgacaaatatcgggaagccgggttgacagaatgggtaacgatagaaaaagatggacagatacatcaggaggaacggataaaactctggaccaaacgagatgaccaaagacatcacgcaattgatgcattaacaattgcatgcacccgccagggatacatacaaagattgaatacactggcttcgcagcatacacgggatattatgtttgcagaggttcagaatcaaagtgaatcctacaaagaaagattaaggttatatgaacaatggatgcaaaaacaattccattttccaactcatgtagtaaaggaatcggtttccaatatccttatatcctttaaacccggcaagaaagtagccacaagcggtaaacgggttgatcataagaagggcaaaacaatagtactgcaaaagggaattattgttccgagaggcgcattaagtgaagagagcgtatatggaaaaattaagacattggtcaaaggtgtccctgttaaaaaattatttgaggatccaacgattatcgttaataaaaagattaaaaaccttattgaagaacggcttgaatctcttggcggagatgcccgaaatgctgctcaatcaattagcaaacaaccgatctaccttgacaaagaacgcagtatcctgcttacccatgctagtgtttttaaacaagaaattgttattaaataccctgtaaatacaatcaaagcaaaagaccttgagtatgttgttgacaaacagatacaatcggttcttcgtaacagaattgaaaaatttggagaaaaagatgcatttaaggatttggaaaaaaatcctgtatttgccgatgattctcaaaaagtgaggataaattctgtacgttgttttgcaaagcttgatctggataaaattgcagcagttaaatttaatcaggataacgaacctataggttacgctaagccaggaaacaatcaccacattgccatatataaggatgaaacaggaaaactaatcgaacatattgtaacattctggcatgccgtagaacggaaaaagtatgggattactgttattattaaaaacccggaaaccatctggcaaaatataagcggtaaaaatttgccagaaagtttccttgcagcattgcctgatccaacctggatctttgttgaaagcatgcaacagaatgaaatatttatgtttggaattacgcaagattcattagaagaaattatcaggaatggcgacttgagcaagatatctcctaatttattcagagttcagaaaattgcaacaaaagactattatttccgacatcacctggaaacaactgttgatgataaaactgttggcggagaggagacagcaacaaaattaaacaaattacgcagagtttgtagtctctccaaaatgacaggtattaaagtcaacgttaaccaattgggaataataaagcttgcttatcaataattgattttatgattaagcgcactttatattttggaaacccggcatatctgagtttagacaacggacagctcctggtgcgattaccacaggtggagaaaaatattgaacttcctgagaagttcaaaaaagaatcggttgcttcaattccggttgaagacattggtgtggtgttattggatcataaacaaattaccacaactcattcaattataaatgcattgctcgataacaatgtggccattatttactgtgatgacagtcatcatccatcaggcttgttgttgccgctggcagtaaaccacatacaatctgagcggttttctgctcaggtagctacttccatccctttaaaaaagcagctctggcagcagactattattgcaaaaatacttaatcaggcagctgttcttgaggcatcaggaatttcatcgggagccttatgttcttttgcaaaatcggtaaaatcaggcgataccggaaattgtgaagggagtgctgccaggttttactggcataaagtatttccagagataccccattttttcagggaccgtttcggtctaccgcccaataacttactcaactacggatatgcaattctcagagcaattgtagcccgctcgctggtgggttcaggcttactgcccacccttggcattcatcatcataaccggtataatgcttactgccttgccgatgatattatggaacctttccggccatttgttgacgcaacagtaaagaagataatggaagatgaatccgactataatgagcttacgactgaactaaagcgttcattacttcaaatccctgttattgacatcctgattgacggtgaacgaagcccgctgatgattggagttcagcggaccacagcctctttagcaaggtgttttgaaggaaaatccaaaaaaattctttatccagaatatgcttaatcattgagacttaacgaataccgaattttgtgggtcctggtttttttcgatttacctacgctaaccaaaaaggagcggaaaattgcgcagaagttccggaaggaattgctgcacgacgggtttggaatgcttcaattgtcgatatacgcccgacattgcagcagtcgggagaatgcagacgtacatattatgcgtgttaaaaggcagctcccggaactaggccatgttgttatcatgtgcattaccgacaagcagtttgggatgatggaggtctttattggccggaaacaggaatcagcacatgctccatcacagcagcttgaattgttttagaaattaaaaaagcctcccggaagttgtttccggaaggccagaacatcaatttttttcatgtctgacatgctacatcctatggtaatcgtgcacttccgacgataacgatgttcgcaatatgtcaaagatacaatctgaaagccattcacaacttcagaagcgtgccaatgacgaaatacagggatgttcgcaatatgtcaaagatacaatctgaaagccattcacaactgagttaacctttaaggaaataacacctttgatgttcgcaatatgtcaaagatacaatctgaaagccattcacaacattctggcagggtgttaaaatactcctcaagatgttcgcaatatgtcaaagatacaatctgaaagccattcacaactacctgttgttgttgtgctgttcttaatcgatgttcgcaatatgtcaaagatacaatctgaaagccattcacaacactcaaacagcaaatcttagcatctccaacgatgttcgcaatatgtcaaagatacaatctgaaagccattcacaactcggctttgcttattgtaaacgatagcgcggatgttcgcaatatgtcaaagatacaatctgaaagccattcacaacttctgtgagcaccgaaacgttaaaaccattgatgttcgcaatatgtcaaagatacaatctgaaagccattcacaacttcggcagaagcttatcatttcatcaagctgatgttcgcaatatgtcaaagatacaatctgaaagccattcacaactttaatactattcatgatggtattgcttagatgttcgcaatatgtcaaagatacaatctgaaagccattcacaacagtatctggattatcctacagtttatcagagatgttcgcaatatgtcaaagatacaatctgaaagccattcacaacgccttactttgttggtgac

SEQ ID NO: 1753 - DNA, 15166 bp, synthetic construct
  source 1..15166: mol_type = other DNA
  misc_feature 1..15166: note = Synthetic
tatccggttcttcttcccgttccggctgaaattgaaagttcggatctgtgctgaagataaaaccgttgctgtctgatttgaatttcttagacatacttagattttggcaaagtaactgaaaactgagatccatttccgggctcacttttcacagataatgttccatgattggcctctacaaactctttacacaatagcaagccaagacccgcacccttctcattttttgtacccgtagttgtaaaatgggtattgaccttgaataatttcccgatctgttcttttgtcataccaataccattgtctataatatctaatatcgccatatgctcatcttcgcggtattgaacagtaatgctgcccccttcttccgtgaatttaagtgcattcaataatagatttctgagaatgatatcaacatgatgcacatcagcataggcttttgcagtaatggatacatcattatgaataacaattttcttttgattggctgcactggtgagcaagtgagaattattttctaccatttcatacaaggaacattcactcgcctgaacatctgttaccccttccatctgattacgagaccataataacagattgtccaatgtagtattcagtgatgtaatttgcttgcccaacgcatgcttgatctttgtaaatgcatcttctgataaactttgtttgtcaattaactgcaataccccactcaatgacgaaataggcattcgaagatcatgagaaagaatagaaaatattttgtctttttgaaaagatgcttgctccaaagccgctttctgtaatcgtaattgtttattagcaagttgtttaaattgatttcttctccaagatacgagccagagagccatcacaagcgccactactactaataataagaaagtatataaacgttgatccttgattttttctttctgagcctcatcttctttttttaaaagattgatctcagcttgttttttctctgtctcaaaagcaacctgcatttgtgcaaatctggctcggcttctttcttcaaaaagggtatcgtttaatgcgacatgtatcgcttgtgattcgtatgcttttttgtaatcacctatttgtgcatatgagaaggccaataatttctgaatcgttgcttgttcacttttggctcctaatattttcgatacagctactgcttcttgtaaataagtgattgatactttccattgtttttttcgctggtatgcttttcccaatcgatacagcgatgtttcaataatgaaattactcttagctgctcgagctgctgttaatgaagctaaaaaataatcaatagagcggtcaatggaaccttcttcaaaatatacatcgcccaaagtacgtaagctaaaagctatcaggtactgatctcccaacttagagttatgctctaaagctgcgtgtccgaaaatgatcgcagaatctttgatttttgcacgatgtgcacagaatgcaatattattcaaacttctacccactcctaaaggattattgagtttcgcatgaatactcatttccttatgaaaataatccatcgactcccgatacttggcttgtgagttataaatagcccctacatttcgataagaaattgctagttgagacagcaattgcaaagagtcattgattcgaagtgcccgtagggcatagtcaaacccctttgagtaatcacccttacggtagtaagcccaaccgatattgttgagcgcttttcccaatccgggtacatccttgatctttatcgcctgtagttgggctttgatggcaaaatcgagagattgatctgcgtctttatctgagagttcctctgcaatctgattcagtacacttacataagtactatcctgttgaattgttttggatataagtatcaaagaatcagccttgggtgtttgtgcactgattattccagagagtaacagaaggaatagtacaggaattgatcttatcatcatgagcaaaaaaggcgtattcaaaagcaaacatcattagatgaagaccaagatacgctaaacccgcttattttccaacagccttatgcgataataaccgctttcaaactcagatccaagctctgtgcctgatgaatgagtccccctacacttacatagtcaacatttgtagctgcataggcttgtatattttgtaaggtaataccaccacttgcttccgtttcaaaacgaccattgatcaatgctacggcttcttttacttgggtaggcataaaattatccagcataattctaaatactttacccgtggctttggtacaaaccaactcaacatccgataatgttcttgtttctacttcaatttttaagtgaggatgatattgtgttacataatcatatgctttatcgatagcttgtataataccacccgcataatctatatgattatcttttagcatgatcatatcatacaatccaaatcgatgattaaccccacctcctattcttactgcctctttttccaacaagcgaaaattgggtgttgttttacgtgtatctaatagacgcgtgttatatccttttaatcgttccgtgtattgacgggtaagtgttgcaatgccactcattcgctgcatgcaattcaataccagtctttcacaggaaagaatggtatgaatagacgctgatacttcaaaagccgtttctccttcttgcatagcgtcaccatcagacttatgtattgtgaatacagcatcaggatcctgcatgctgaatatttttttggcaatctctactcctgctaaaatgccattttgcttgatttttaagactgctttccctttctgatcccgaggaatacaacttaaggtggaatgatctccttcaccaatgtcttcttttagtgctgcagttaccaatatctttaagtgttcatcaaaatggttcatacaacaaaactaaaatatattcatggaccctataaaaataatccgcctattgttctcttaaaaacaacaggcggcgaatctcaatacgagattaacatattcatatcatttaaaatcaatcacgcaaaatgtcgaaactaaatattgctcccgtgccgaatggccccgtccttgttactccgcctcaggcagacattgacctctgatcatccgccccggcggatgatctgtcttagctacgcttgacaccgaccccaatgaggcccgtccacaaggactgattaaaaattatttattgatcatcactcgtgccttagtctttttactacagctttagaatatagaaatatataaataggcaatcacgttataagattaactgattcgtagcgaaataatcttgaacttggcagcttgtgatttgatcagtacagtgatattatatcctttattattcttgtcagacgaaacgagtttaccgaccagataagtggtactccccaaatctcgattggatagtttttcaaagcccgtaattgcattctctgtgaaaaaagtctttagcgcaatggaagcctgattcttactgatatttttaatttcatctttatccagaaatttcagatctacataagtatcaaaagattgagcaatttcttctgtatcagcctttttaaaagcattaaagatctgatccagactattctcctgaactacaaaagacatggctaaaaacgcccatcccacagtcaaaaaaaatgttttcatacagtttattttgtattcactattataatgtgccaaaaacatgccaactttgaatgcagttaaagttaatgcctaatcagcaattaataaaccatatcattttttaatatgaataaaaaagtcattctcctcatcatggatgggtggggtttaggtaaaaccgcaagtgctgatgctatccaacaagcaaatgtaccctttgtgtcttctttatatcagcaatatccaaatacaacattgattacctgtggtgaagaagttgggttaccggaaggacaaatgggcaacagcgaagtgggccatttgaatttgggggcaggaagaattgtgtatcaagaattacaacgtatcaatgtagctgttaagacaggggaattggccaacaatgccaatttcttagcaacattatcgtatgcccaaacccatcaaaaagcactgcatctgatcggtctggtaagcgacggtggtgttcattcacatattgatcatctaaaagccatttgcgatctctgtcaaaagaaccggttatcccaagtttttattcatgtatttaccgatggaagagataccgatccaaaaagcggactgggttttgtgaaagaattggaagctcatttacaacagtcggtaggcaccattgcaacagttagtggcaggtattatgcaatggacagagataaaagatgggaaagggtaaaactggcttatgattgtttggtgaatgcggtaggccccaccgctacaagtgctgtaagcgccattgagaacgcttataaaaatggcactaccgatgaattcattttgcctaccattattaccaatgaacaacaacaacccatcgccactatcaaagaaggtgatgcagtgatttgtttcaacttccgcaccgatcgttgccgtgagatcacagaagtacttacacaacaggccttcccggaacaagggatgcagcctttacaacttcattatactaccatgacgcagtatgatcagaagttcaaaaaagtgaatgtaatttttgaaaatgataaccttaccaatacccttggtgaagtattggaagcacatggtaagcgacaaatacgtattgctgaaacagaaaaatatccgcacgttactttcttttttagcggcggcagggaagtaccttttgaaggtgaaaaaagaatcatggtgccctctcccaaagtagctacttatgatctacagcctgagatgagtgctgttgaaattacagatcaactgattcctgaaattgaagcaggagcagttgactttgtttgtttgaattatgcaaatacagatatggttggacataccggcgttttcagtgctgctatgaaagccgctgaaacagtagatagctgtgtaaaacgcgtagtaactgccggacttgcatcaggctatactattttcctgactgcagaccacggcaatgctgattttatgattaatgaggatggtagtcccaatacagcacataccttaaaccccgttccattctttatcattgataaggaatggaaaggagccatcaagcccggcaaattaggtgatttagcccctaccatcttaacaatgatgaatcttccgattcctgctgaaatgacgggaaatgtcttaatttaaacgcataaacaacccaaaccaatcatgaaaattgtcaaaaaaattttgtgggtgcttttgatcgcccttgtagtcatacagtttattcgtcctgaagccaatgcctctaccgatatatcaggcaatatcaaaaacctgtatactgttcctgaaaatgtaaatgccattcttgtaaaagcctgtaacgattgtcataccaataatactgtttatccatggtattcaaaaatacaaccggttgcatggtggttagatgatcatgttaaagaaggtaaatctcatttgaactttgatgcttatacttcttataacctgagaagacaatatcataaaatggaagaagtgattgagcaggtaaaagaaaaagaaatgccgttgaattcttatacatgggtacaccgtgatgccaaacttactgatgacgaacgcgttgttttaacaaactgggcgcagtctgtaatggatacgatgaaagctaaatatccattagacagcctgatcagaaaaaagaactgagttgcttgtattacgtaagtgtatagcaattttctttttattattggtgttatctccaatgacaggatttgtattgtttcatcatcaacaaaatcaaatacgatcagatgtaaaaaaagcttttaaaaccaaagagctttctactgttcgggtcaaacatctacgttggtataaaaaaaataaagaaatcattgtaaatggtactctgttcgatgtaagttccatccgcaaagaagcagatggaacttacaccgtaaaaggcttatacgattatcaggagcataaattgcatgctttgatggataaagctgctcataaaaataaaggagcaagtagaatactctctttttcattttgttttataagtgatcaaatttcgtcttcagttcaagtaactagtacaggttttttccttcgcacttgttatgctactgatattgtttcttggaaaccacaatttcaaccagacctcatcgcacccccgccaaagcaaatactgtttagaacatcattttcttaattattaaacagtacatccatgcgaataaatatggggtggacatgtactttatggtcgtgtctactattcaatatacacttacaagcacaacaaaaaaaagacagcatttcaacagataacgagtccgttaatctgaatgaagtaaccgtatatgcaaacaaatttgccgaaagatccggtcgtgttgctcaaactgtaaaaagtatccgagacaagaatacattgaatatgcaggccaataccggcgatatcctcatcaataccggaactttatttgtacaaaaaagtcagcaagggggtagcagtccggtaatacgtggttttgaagcaagtcgtgtattgcttaccgttgatggaatcaggatgaacaatgctatatacagagccggacatctacagaatgtcattaccatcgacaatatgattctcgacagaatggaggtattgtatggtccatcatcaacactgtatggtagtgatgccttaggtggtgtagtgagtatgtacacccgaaatccaaaattatctagcggtacaacaacagaagtttccggcagcagtacgcttcgttataccagcgccattgatgaacaaagaggtaatgtcatattcaatattggtggaacaaaatgggcatcgctgacatcagtgacatacggaacttttggtgatatgagacagggtaagaacagaaacagtaaataccctgcttttggtttaaaaccatttcttgttcaaagagtcgggaatacagatatagctgttcctaatcccaaccctaatcaacaaacgccctccggctatgaacagatagatgtattacagaagtttttatacaaagcatctgataaagttgatcacatttttaattttcagttttccaatacaggagatatccctcgttatgatcgactcagtgaaggcacattggcagcacctgtgtttgccgaatggtattacggtccgcagttacgcaacttggcatcctatcatctcaatgtttcccaacaatatggcttttttcaagacttgaaactcactgccagttttcaggatatcgaggagagcagaataacacgtcgattcaataataacaataaagattatcgatgggaaaaaatcaatgtattcggattgaattttgatgcgaaacactacaagggtaaacatgaacttcatgtaggcgctgaaagttataccaatttcgttcgttcaacagcagaacgccgcaatattgtaaccggagcactgagcagaattactacccgatatgctgatggtcctacaaaaatggcatctaatgcattgtacgcacaacacacgtataagatcactgacgagtggactttgaacgatggcattagattgaatttgataagattggatgccaggtttgcagatactacgcttatgcatttcccctttaataaggcgcaacaaaataatatcgccgttacaggaaatattggactggtatatgctacaaaagacaatttccgactagccatgattcttagcagtggtttccgcactcctaatgtagatgatctgtcgaaagtgtttgataccagaaccggtattgtagtagtacccaaccctaatatcaaacctgaatatacatacaatggagagctgagtattgccaaacaaaccaaagcattttcattaggtgcttcattattttataccattttcagaaatgcacttgtgctggataaatacaagtttaatggacaagacagtattttatacagtggtgtacgcagtgctgtatttgccaatcaaaataaagccagtgcttatgtaacaggctttagtttaaacggttctcttaccattgcaaaaggaacagcgatagatggagtatttacctatacctatggaagatataccgatcaaaacaaagtgaaggttccattagatcatattccaccggtatatggaagaataggtcttaaaacacaacaggacacttggaatgcagaattttatactttattcaatgggtggaagagattaaaagattataatccgaacggagaagacaatttacaatatgcaacagcagatggaatgccttcatggtttactttgaacctgagagcaggattgtttatcactaaaaaactacaatcggtactattattagagaatcttaccgataagaattaccgctattttgccagtggtatttctgctccgggaagaaatctgtctatttcattgaaagtagatttctgatcacgctaactatctattgtattgttttaaagcccgctgacgaaagatcagcgggcttttagttactttgcagcatgcagatccgtaaagcctcttacctaatatccagtcccactttcgataaatgtcccaaaccggacaaaccggagtatgcatttattggaagaagtaatgtgggtaaatcatccttgatcaatatgatcacgggacaaagaagtctggccaaaacttctgctacgccgggaaagacacaactcatcaatcattttgtcattgaaagcagcgcagcagaaaaaggacctcgtgaacaatggtatctggtggatctgcccggctatggttatgctaaaagatctcagagtgatagaagaagatgggaacagatgattgaaggatactttagaaagagaactaatcttactcaaatatttgtgttgatcgatagcagacatggtccacaaaaaaatgatctggagtttattagtcagctagacaaatggggtgttgtattttcattggttttcaccaaaaccgataaggaaaaacccgcggttgtagaaagaaatatcaaagctttttttgatacccttagagagagttggcagtttttgccaagacattttgtgacgagtgcggagaagaaattggggagagaagaaatgttggaatttattcaacaatgtaatcaagcgtttcaagggtcttaggatttagctttcatctagggtacatgataaaaatcagtgatggaacgcagatttttatgatggtttatgatggtaatctatcggcgctcatcataataatcataaaaaatctgcggcctataaaagcttgaaaacttttggaaagtttcgaaactttctaaaagttgatcctctttccggcgatgtcataatgtgatgccttctttggttgcataatatacaatatgacctaataacagttttttttcagcccattcatttcttgtttgaagaatgatatcgaagggggtttcaaaatcatgtgtaagttgttttcgtatatttttttcataccctaacttggacttgctatctaaatcctgatcggtaacgatcagcaggtctacatcacttgatacagaagcctctccacgtgcccgtgaaccgaataatataacattcgccccaggcaaaaaactgtggatagatcgtttgatatcttcatgtatcaacttacgcatacttaaaattattaaaaaaacagggaaaaagttttgaatattaaaatatatttctatattgttattccccatatgtttccatcgatcttataacagatctgaataaaaaagccccgtattgtaagacgaggcggcttaaatgttttcacaacggaataatccttattgtgatttgctttcagttataaaactataaatgattttttatatgagcaagaaaattttagggcttgatttgggtgttacatcaattggatgggctttaattgaagaattagaatcaaataaaaaaattctaggaatgggctcgcgtattgtaccactgaatacagatgagaagactgagttttcaactggcaataaaatatcaaaaaatcaaacccgcacaattaaaagaacccaaagaaaaggctatgatcgctatcagcaacgaagggcaaatttgacaagggttttacttgaacgtaaaatgtttgatgagcaactttttaaactaagtagtttagaactctggggattaagggctaaagctgttaaagagaaaatttcattaacagaaattggtcgtgttttgtatcacttaaatcaaaaacgaggatataaaagttcaagaactgatgcaaacatggataaaaaggatacagattacgttgcaacggtaaaaggaaggtatcagactttaaaagatttaggatttactattggtgaaaaattctaccaagagctcaaagctaacgagtattatagaataaaggagcaggtctttccgcgagaagcatatattgaagaatatgattccataatgctggagcagtcacatcattatccagaaattattacaaaggatttaatccataaaatcaagtttgaaattatttattaccaacgcccacttaaatcgcaaaaagctcttgtaagcaaatgcgaactcgtaggattttggacaaaagataagactggaaagcaaatatttgtaggtcctaaagttgctccaaaatcatctccattattccagttgtgcaagattttggagaccattaataatttaagtctaaaagtcaaaaatcctgaaatatctaagcataaatggttagacttttatccttctcaagaacagaaaaatactatatctaagtatctaaatgaaaatgaaaatttaacgtatgcagagctgttgaaaattttaggtcttagaaaggaagacgtttatgcaaataaacaaattataaatggattgcagggaaacacaactgtcactatactaaagaaactgatcgataaaaagcatctgcaattcgatctgaaaataatcactaaagaagacgcgaagcagttagtagatagaaaaacgggagaagttctttgtgaagaactatatgccgaagtgtcttcatcgtttgaagtagagccgttatatcagctttggcatacaatatattcaattaaagaagaaaaggaatgtcaagaagtattaataaaaaaattaggtgttgataatgaaatagcgttacaactgtcgaaaatagattttacgaagcagggttttggcaataagtcttctaaagcgattaggaaaatactaccctatctaatgcggggacatgtttattctgatgcatgcgaatttgctgggtataatcatagcaaaagtctgacaaaagaagaaaatcagaaaagagtaattgcggaaaaattagaactcttacctaaaaatagtttgagacagcctgtagttgaaaaaattttaaatcaatccataaatatagttaatgcaataattaatcgttttggaaagcctgatgaaattagggttgagcttgcaagagaattgaagcagagtaaagatgaaaggaatcaagcagaacaaagaaataaagccaatgagaggctgaatgcagagattgccaatagattgtccgaattcggcttacctggaactaaacgatacatacaaaaatataagttcatattcccatcacagagtagaaatttaaaagatgcacacgttgaaaatacttgtatttattgtggcaaatcatttagcatagccgaagctttaactggtgataattttgatgttgatcacatagttccaaaatcattgctttttgatgattcacaaacaaataaagtgcttgtacatagaagctgtaatgcctccaaaaccaatcaaacagcttatgatttcatagccaaaaaaggggaatctgagttaaacggatatattgaacgtgtagatgaatggtttaaaagggggattttatcatattctaagatgcagagattaaaagtttcttatcaagaatatttagaaagaaaatctaaaaaaaaacaaactgattctgatataaagctttgggaaagcttcatcgaaagacaattgagggaaacgcaatatatctcaagaaaagcaagatatattttcgaaaacatctgcaacaaagtatcaacaacagaaggcaccgtaactgctgagttaagaagattatggggttgggatgatgttttaatgaacctccagttgcctaagtataaagaattaggcttaactcagatcaaagagtggacaagtgatcatggtagaaaaaaacataaaaaagaagaaataattgagtggacaaaacgagatgaccacagacatcatgcaattgatgctttagtagtcgcatgtacaaaacaaggctatattcaaagaattaatactctaagttctagtgatgcaaaagatgcaatgcggaaagaaattcttgaatctgctctagttttcgatgaaaagagaaatctgctagaacaatacttaattaaagaaagcccctttagcacctcagaagttgaaaaagaagcatcaaaaattatcatctcatttaaatctggaaaaaaagtagcaactaagggtatcagaaaagttaaaataaacggaataaagcaggttgttcaaaagaatatcattgtaccaagaggtgcccttagtgaagaatttgtttacggtaaaatcaaaaaaattgaaaaaaataaacctttaaagtacttatttgaaaatcccagtaagattgttgaactggaaactaaaaagcttattatagatcgtttgaatgaatttaatcaggatacgaaaaaggctattcaatcaacaaaaaagaatccactattaacaacaaaaggaattgctatcgaatttggtaattgtttcaaagatgagtatgtgattaaatacccattacaatctttaaaagcaaaagatattgattttattgttgacaaaggagtaagagacattattcaaaagcatttagcaaaatttgatggtaaggaaaaagaagcttttaaagaacctgtttggtttaacgaagagaaaaaaaatcagattagaactgtaagaagcttcacaggtttgtctgctgttgaacctgtttcaaaagataaaaaaggaaatgatattggctttgtaaaacccggtaataatcatcatatagccatttataaaaacggctctggtgaattttcggagcattcatgtactttttggcatgcagtagaaagattaaaatttaaaatagccgtaattattaaagactccaatcaaatatggactgatattatcaacaaagaattacctgactcttttattgagaaattaccagaagataatttaaagctagaatatgtattgcaacaaaacgaaatgtttattctaggtatgcataatgaagaactagaaacggcaattattaataacgattattcactactaagtaatttcatttacttggtttggagtatagcagataatgattactggtttaggcatcatcttgagacaaagaattctgatttaaagaaagttacgacagcgaaagattctaaaagatactatcgtacaagccttaatggatttttaaaactgaatcctgtcaaaataaaagttgattgtttaggtagaattataaggttgtagatgataaaacgtactatttgcatagaaagcccttgtcaccttcactgtcaaaatgaacaactggtagtcagctatacccgtgtaaagggtatggaagaggctccggataaaaccgtacccatagaagatatcggtattttggtattagaacaccaacaaattaccattacccattacttgctagacaaactggcagccaataacagcgctgttattacctgtaacagtcagcaccacccaagtgctttattgatgccactggaaggtcataccctgcaaactgaacgttttcgttttcaaattgaagcaacagagcccttaaaaaaacaactttggcaacaaaccattaaagccaaaattcataatcaagcagcagtacttgaaaaatggcaattgcctagccaattactattgaacctcaaacaaaaggtaaaaagcggtgatagcgataaccatgaagcacaagcatctgcgcattactggaagaacctcttcccccctgcctggcagttcttccggcatagagaaggacctccccccaataacctgttgaattatggttatgccatcatccgggcaaccatggcaagggctttgacaggagcggggttattacctgccttgggtatatttcaccggaaccggtacaatgcctattgtttggcagatgatatcatggaaccataccgaccatttgtggatcaaattgtgaggaacattattgacaaaacctcgcatgtggaggagctcaatcgcgacttaaagaatcagttactcaagctgcctaccgtagatgtgctgattgaagaagaaagcagccccttattcgtagccacgcagcgtacggctacttcattggccaaatgttttgcggggcagcagcgaaagatcgcttatcccgttctgccatgaaagcagaccgtttaaatgcataccgaattatgtgggtaatcgtatttttcgacctgcccgtggtcaccaaaaaagaccggaaaatctatgccgattttcgaaagaaactgctgcaagacgggtttggtatgttccagtactccatttatttgcggcactgccccagtatggaaaatgcccaggtacatatcaaaagggtaaaaaaacaattacccgagaaggggcatgtggtcatgatgaccatcaccgacaaacaattcgggatgattgagatttttcagggtaaaaagcctgccgaacccttggaaacgcctcaacaattagaattattctaaaaataggatagtctaaactttaacccagcagataaaacaagcgctcagaagcccatttttcagcgaacacgatctttgataacccttaccggtattgcatttcagccaatcctgttgttatcaaagatcgttgttcctgaaattgaaagcaaatcacaac

SEQ ID NO: 1754 - DNA, 15150 bp, synthetic construct
  misc_feature 1..15150: note = Synthetic
  source 1..15150: mol_type = other DNA
tctacttggtgggctgaaaagcaaaatgggcggctttttttagcgctatttgtttaatggctacgatctaatattaattataattatgtagctttttttacggtcgatagatgtttttctggctgttttaattttattcgttaataattttatggctttcgcagttttttttaaataaaaacccctgtgaaagccatttttatgtacctgcacattgaatctccctattctgtcatcattaaacacaatgaccgaaatcagcaagaattggtccatttcgaccgatatttgcagtcgattcattcaaaataaaaacaaaaacaaatggcaagtaatttcgtttcaatcggtgacaggttccccgagttcagcaaaaaatcagttgtatccattgaaaaaggaaaggaatttaaagacgttagcagcaaggacatagaagggaaatggacagttatgttttggtggcctaaggattttaccttcgtttgtcctactgaaattgcggaatttaataagagctacacaaactttaccgaccgtgatactttgctcttgggtgcatctacagatacagaatatgtgcacctggcatggcgcaaagatcataacgatttgagagatcttcagtttcctatgatagccgacacgtcgcgcagtcttgccgaagagttgggaattctgtcagccgatgaaaaaatagcctatcgcgccacctatatcgttgatccggaaggaattgtacgttgggtttgcatcaacgaccttagcgttggccgtaatgtagacgaagttttgcgtgtattggatgcattgcaaacagacgaactatgtccttgcaactgggtgaaaggcgaagcgacactatagttaagtaatatttttagcaaggtggcatgtggttgtaaacaactactgccaccttttctgttttttgcacttagtagctgctgcaaaatgggttgtatcaaggtttttcgacaacaaaccagaatataacctattccctttgccctgaaaaatcaaaagtgtgtacctttgcgcgctgtttgtaaatagataatttttcaaatgttttttggttggtctttgttgttcgccaaaagggagttgaagagcatttgcaaaatattatgggcaatacaaaaagtttgctgcaatacgtgtgcgagtaaactgcctgaacaactacaacttaacaatgaaatacgataaagaaatagcgcaacggcgcacatttgcgatcatatcgcaccccgatgccggtaaaaccaccctcaccgaaaaactgctgctgtttggtggcgctatacaggtggctggagcggtaaagagcaacaagataaaaaagcatgctaccagcgactttatggagatagagcgccaaaggggtatatcggttgccacttcggtaatgagttttgagtacaacaatacgctcatcaatctgctagatactccaggtcacaaagactttgctgaagatacctaccgcacgcttaccgcagtagacagtgtaatactggtaatagacagcgtgaacggcgtggaagaccaaacccgaaaactggtagaggtgtgccgtatgcgcgacacaccggtgatagtttttgtaaacaaactggatcgcgatggcaagtttcccttcgatcttatggatgaaatagaaaaggaactaaagttgtcgttgcatccgttgtcgtggcctataaacatgggtaaggaatttaagggggtgtacaatttgcacaacagtagcctgaacttgtttacagcgagtcagaaatcgacagaagaaaatactatacctatcaacgacctgagcgacgcacttctcgatgataaagtaggggagcgcgatgccagccaactgcgcgaggatgtagaattgctgcagggcgtgtatggcgaactggatacagacagctacctgaaaggtaaaatagctccggtgttttttggtagcgccgttaataacttcggggtaaaagaactgctcgatacgtttatcactatagctccgcatccgcaaggccgtaatacagatacgcgctatgtagcccccgatgaagataagttcacaggcttcatatttaagattcacgccaacctcgaccctcgccatcgcgaccgtatagcgtttcttagggtatgttcgggtaggtttgcacgcaacacctactacaagcacacacgtctggaaaaggagatgcgctttagcaacccgtattcgtttatggcccgcgaaaaagatgtgattgaagaggcctatcccggcgacgtggtggggctgttcgacacaggttcttttaaaataggcgatacgcttaccgagggcgaaataatgcagtttaccggcataccaacattctcgcccgagatattcaaggaactgatcaacaaagacccaatgaaaaccaagcagttagaaaagggtgtacgccagcttaccgatgagggtgtggcgcagttgtttactcagcatggcggcaaccgcaaaataataggttgcgtaggcgaactgcagtttgaggtaatacaatatcgtttattacaagagtatggcgcggcttgtgcgtttgtgccgttgtcgttttacaaagcttgctggataaccggtgaaaagaaagcagtagaagattttgcacgctttaagcaaaacaatataatggaagataaagacggcaatctggtatatctggcacaaagcgaatggttcttgaataccgaaagacagaacaaccccaaaatagaattccatttcacgtctgaattcaaaacaaggatgaacagttaattgattagttaatgaatattataagcgagaggtccatgtatatgcatgtggcctcttgctgttttaatagctttaaaggcataaaaagttgatggatgacagacagagcgaaacaacgggatacactaatagtgtttgatatagatggcacgcttacagatactgtgccgctgcacaagcaggcttttagtagcgccatatatgcattgggtattactgaatttgacgacgactatggcggctacttgcaccatactgatagttatattttcaaaacaattttcgataagcatattgggttgccggtaactcagcccattatgcagaccttcgaaaattatttgacagcgcattttaaattggctacagtaagtaaacctatcgaggagatagcgggcgctgctctggccgtagcgcagttgcaacaaaacggaaattatgcagtagcttttgcgacagggtcgctggcagggccggcagtactgaagctagtgcgcacaggtatacaatacgtgcctgaactcctggttgccgctaatgaattgctgacgagagatgaaattgtgcttaccgccattcgtaatgctgaagcgtactatagtcggtctttcaggcgcataatatctgtgggcgatggtatttgggatatgaaaactgcgtttgccaacggaatggagtttgtgggcattggtcggtcgcgatttgcagcgttgccgggagtggggctgagtatcgatgatttttcggggacatcatttttcaattatttataaaaacggctacgttttttgccgcgccgctaaaaattgtatattagtgttcaaatgtctggcacaaaatggctggttgcgtaattattccaatgagaaatagaatttgctctgcactaggcatggcttgcgttgtgtttatttatttcgctacttcgtcgtgcggcagcaatagcggcacaggcattgcacacaaaccggtagatacaacacacaaaaccgaactggcaaaaccaaccggcaaaaagtggaaaatgctggaaacgaatattttcgatcgtccggctacacttttcaagcgccaccttactggtaatgtaaaatcggtaacaaggcttgtatacagattgcccaacaaaaagggagccgaaagtctattattgttttcaaagagttacgatgtatttaataaagaaggttacttggtagaagccagcaattttaaagcagatggctcgcccgacgctaaatttataggggtgtatgatagtactggcgacgaaaaagagtttacgctctttaaagccaacggtatgatagaatacaagaccataagtatacgcgatgtgatgggccgtaaaatagaggaactagattacgattcgagcggcacaatggcagataagtcgatatacaaatacgataaacgcggtaatgtagcagaatatggtgtgtacacagccgagggcgacctttacaccaagtatgtgtatagctacgatgaaaaaggaaaccggacagaaggcctgaactacgacgagaatggcgaattggtagaccacattatttcgaagtttgacagcaaaggcaatgaaattgaaaagtataaatacaacagtcacgatagcctgctgaatatatacactaccaaatatgatagcctcggtaatgtatccgaattctgcacttacctatcagatagtagtttggaactgaagcaaatgtttaagtacgacaagaaaggaaatattacagaaaataactggtacgagccagatggtacattttacgaaaaggaaagttactatatagagtacgaatacgacaaagaaggcaatgccacaaaagaaaccaagtatatgatgcgcgacggcatacagacggtggtagaagtggtagagactactatagtgtattattgattgtcagtaaatccacagttagcgggctactgttatttcgcctaccatgtacgtaaccgcattgccgctaatggcaaccctattacccaagtgcacgcacttcaaatatcctttgcgcgccgatacttgtatggcgttgagctcagttttgcccagtcgcgcggaccaatagggtgtaagggtagtatgtgccgacccggttaccggatcttcatttatgccgctttgcggaccaaagaaacgcgaaacaaaatcgcctgacaagcccggggcggtgacaattacgcctctgcaggccaatgcattgagtaattcaaaatcgggttttatatccagtatttcctgttcggtggcatataccgccatgaagtcggttttccctttgtaggtttcggtaggtgtgcagcccagcgcttgcaccaaaattgctggtgtttctacggcctcgtaggtatctgtcgggaaatccagaattagttcggctcctttgcgccctacttcaagcggtccgctacggtgcgagaagaacaaaatagcatcgccggtgtagttgcaatgattgaacagcacatgtgctgccgccagagtagcatgcccgcaaaggtcaacctcaaccgtaggcgtaaaccaccttatatgatacgaatcaacggcctttaccacaaaagcagtttcagcaaggttgttttccatggctatttgctgcatcagttcgtcgttcagccaactgttgagtatgcaaacggcggcaggattgccgccaaacagcttatcggtaaaagcatctacctgatacatggtcagtttcatagtctgtgatttgtgcaggcaatttaaataaacaaactgacaagcatagccgacagcaacatcatcgttaacactctacggactattttagcatataaggacgtttttttaacagaatagacggtcacaaacaataaaatggatcgtcgcggctggttattttttcctgtttgctacacccgaaaaccgatcgtcggtaagtgttagcaggaagttttctatgtctatcttttccgtttcagtaagaccaagcgcctttgtcagcaatgagtctgtatttatcgggcgttttactgttttataggggtcgttgtagtaatctatcacctcgcgcagcgtccggaacattccattgtgcatatacggagcagtggcggccacattgcgtaggccgggcactttaaacttgccaatgtcctttatatctttcgagatactatacctgccagagtcgttgaattttttaccgtcaaaaagcccaatgtttttgaattcatcgccagtgaagtctggagaaaaatgacattcaaagcattttgctttaggccccataaatagttcgcgacctcttatggctgatgcgctgattgcgctgtcgttgccagccatataacggtcgaagggtgtttttgaggtttcgagtgtgcgttcaaaagctgctatcgcctcttttagcgtagtctcggtgggcttgctattgaatatggctgcaaacaggcgaacatactgttcttttttattcagacggctcactgcttccgcaatgggcaggttcatttcgttatggtcttcgatagggaatcttacctgatcttcgagcgatgcggctctgccgtcgtaaaacaacaaatcgcggcctgcgatattcatacacgatggcgcattgcgtttgcccaatctgccgccaacccccttactaaacgcaactgtatcggcaaatgcaaatgcaggaagatggcacgacccgcagctaatactgctatcggccgataatagcttttcaaaaaacaaggcctcgccaagttgctccttgtttttgggcgctccagtaaaggagagctctgtattgtgtgaggatgaagtgaaaaaggaactcaaaaaaaggatggagccagctattgtaagtaaaaatatcgcctttttcatgttgcaaaattagtaaatcgatttcataaaccggttgttatcaaccctatgtaaatgctgtcgtctcttatttcgcaagggtaagtatatagtttgtagccctcgccgctggtattgcggccattggtaggatcgaaacggtatttgtgtagcggacaaacaatccgccccattgcatctacccagccatcgcacataggtgcgcccgcatgtgggcagagcgctgcaaatgcatgtagtttaccttggcgctgtagcaagccaatacgctttccggccacgattatctcggtaggtttgttttcttccagagcgcttgcagttagttgttctgctttatgccaagtgtacactttgagctaattattgaatcattaatcttggttgcataataggtttattaccggcgcgccgcaaaaaagtctttcattagttgcgcacattcgccggccagcacacctccttttagcgctgttttaggatggaatggcgagttgtcgccggtcgttttgcggtagccgttttttacatcttctgcgccatataccacgcggcctatctttgaccagtagagcgcgccgctgcacataaggcagggttctaccgttacaaacagcgtgccctcgggcaggtatttgccgcctgtagcattaaaagccgatgttagcgctatcatttcggcatgggctgtacagtcgttcagttgttcggtttggttgtggccgcgggctattattttattgttccacaccactacagcgcctaccggcacctcgccggcatcgtatgccagccttgcctggcgcagcgcctcgcgcataaagtattcgtcgtcaaacatcattggggtgtgaaaataacaaaagaaaggcgctcacagggttaaatccttgaaaacgaggaaatgccctgcagtttttagtggcaacagcggcggtaaaggctatctcccacaattcgttctactcagcagcttttccaaggcgttatttggtttagtgaacaagagcttactctttattctttgtatccataataatagttaccggaccgtcgtttaacagcgccacctgcatatcggccccaaacttacctgtggctacctttttacctattgtggcagctaatgaagtagtgaaatgctcataaagcggaatggcctgctctgggcgcgctgctttaataaatgacggtcggttgcccttcttgtacgcggcatgtagcgtaaactgactaaccaccagtatattgccgtcggcggttataatatcgttattcatcaatccgttttcatcagcaaacacccttagcttggctattttggcgcaaagccagtcggcatcttcttgggtatcgtcgccctcaatgcccagcaacaccatgaatcccctttctattgctccatgcaccgttccgccaatactgacgcttgccgatgaaactctttgtataactgcccgcataaattgtatcgtttttgtttgctggaataatcgccgtccgcaaagttgcaaataatggaacttctatgcaacgcgccaacctatgatacggttttatgcaaataactgactaattttgaaaaacatgctcctcctcaacgataccataattgccattgctacccctcccggcgagggcgccataggcgtcattcgccttagcggtccggcggctatagctattgtcaatgccttgtttgcaggtaaagatcttgccgcgcagcctacccatactttgcattttggccgtataatggatggagcgacagcggtagacgaggtagtggccagcctgtataaaggccccaaaagctacactggcgaagacgtggtagaggtgagttgccatggctcggcctatgtgctggagcgggtaatgaagctgtgcatggcgcaaggggcgcgcatggctaagccgggagaatttaccctaagggcttttttgaaaggcaaactggatcttacccaggccgaggccgttgccgacctgatagccagccaaagcagcgcagcccacaaggccgctatgcataatttgcggggtggctttagccacgacctgaaagatatgcgcgaacaactaatcatgtttagcgcacttatagaactggaactcgactttagccaggaagatgtagagtttgccgaccgtgagcggctttattcacttattgccgaattgaccactgccaccactgcgctgttgaacacctttagcctgggtaatgccataaaaaacggggtgcgtatagccattattggccgccccaatgcaggcaaaagcacgctgctcaatgcactgctcaacgaagaccgcgccatagtaagcgaaatagccggcaccacccgcgacaccatagaagaaacactgaacataaatggcatccttttccggctgatagacaccgccggtatacgtgaacacagcatagacgtgatagagctgcaaggaatggagcgcagcattaccgccatgaacaatgccgatgtagtggtgtacctctttgatgtaaccgacgaccagcaacatgccctgctcgccaacaagaaagctgaactggaagccgccggactaaaatacctgctggtaggcaacaaagccgaccaactaacccatccgctgcccaacctcgctgctatagcagacaacattctctatatatcggccaagaacaaagagaacatacaacaactaaaagatgccctctacacccttgtagctggcggacaaataaaacaggaaggcagcatagtaaccaatgcccgccactatagcgccctgcaggaaaccttgctatcgctgcacgacataaaagccggcatggacaacaacctgcccggcgacctcatctccctcgacatccgccgctgcctgcactacctcggcgaaataacaggcgctgttacgacggaagataagttggattatatatttagtaagttttgcatcggaaagtaacccaattctcccccccccaaatactcctaaaagccctcattgaagggcttttagtttttttgcattgtagcacataagcatacccggcagctaccctaaaagctaaaaaccgataccctattgcaaaccaaacaaatatcagcactaaatttattccaaataaaaaacagtattaataaagctatatttacgaaaaataccgtgtaaattgtgcgcgaagaaatggagaggtaggggcataaaaaaagcgacttgcgccgctttggatgttttcacaacggaataatcctttttgtgatttgcttcgacacaaagataacaataaatatttactaacaaaattcagctgtaacgaaacaataaaataatcaataaaaatgaataaacgtattttaggacttgacttgggcataacaagcatagggtggactatgattgaggaagacggagaattaagaaaaataattgatatgggatgccgtatcgttccacttagtaaagatgataacgacgaattcacaaaaggtaacgcaatttcaaaaaaccaaaatagaactgctaaacgcacccaaagaaaaggatacgacaggtatcaattacgccgcacattattaaaaaatatattggcagaaaataccatgatgcccggcgatgacctttttaaattatcagcgactgacttatttggattacgagataaagcgctttctgaaagagttacgccacaggaattgggcagaattttataccacctgaaccaaaaaagaggtttcaaaagcagcagattagatgctggcgcaaataaaaatgaaactgactatgtagcagaggtaaaaagtaggtatgctaaaatacaggatgccgggcagacagtaggtcaatggcttcacaacgaattgaaatcggaagcccacttcagagtaaaagacaatattttcccaagagatgcttacacctcagaattcgatgccattattaatgcacaaaaaaaataccatactgaaatactaaacgatgaactggttgaaaaagtaagaaacaagataattttttatcaaagaagacttaaatcgcagaaaaatctggtaagtgtttgcgaattcgcaggctttaaaactactgtaagaggcgcagaaaaattagttgggccaaaggttgcgccaagaagctcgccacttgcgcaagtatgcaaaatatgggaaacaataaataacatccgtttgaaaaacaaacggggtgaaatacttaacatatcacccgaattcaaacaagaaatatacgcctacttagatgataatgagaaaatgacgcaaaccaaattgttcgaaatcttaaaactgaaaaaaaatgatggttggtcgggcaataaacaaattgaaaagggcatttccggaaaccaaacaaaagctccattaacacaaatcctaaaaggatttgaacatcttctcgaatttgaacttgaaataaacaaaacggacgataaagtatttttggttgataaaaaaacaggcgaacaaaagggcgagcatacaaagcaagaacttacagcaaacattgaacaccaaccattgtataaactttggcatgtaatttactcaatagacgatgttgcggattgtaggaacgcactacaaacaaaattcgatttaccgcccgatattgcagaaaagttagcaaatattgattttaaaaagggtgggtttggcaataaatctgtaaaggctatgcgacgcattttgccatacttaatggatgggtatggatacagtgaggcttgcgagtttgcaggttacagtcattctgactctttgacaagtgacgaaaaaagcaaggtaactactaaagataagctagaattgctacccaaaaatagccttagacaacctgttgttgaaaaaatcctcaaccaacttattaatctcattaatgcgctaattgataaatacggagcttttgaacccgatgatgaaattagagttgaactggcacgagaattaaaacaaagcattgatgaaagaaaccaaacctataacgctatttctaaaaaagagcgggaaaataatgccataacaaaaagaatagaagaggaatatgcctcgctaggcatcagggcaacaagaaatacaataacgaaatggcgtttgtttcacgaaataaataacgatgaaagcaaagcaaatgcaacgtgcatatactgcggccagccttttggtattacagactcgcttagaggtagcaatgtagaaattgaacatattatcccaaaatcactattattcgatgattctcaatcaaacaaaactcttgtacactccaaatgcaattcagacaaaggcaatcgcactgcttacgactttatgacaagcaaaggcgaggacacgctaaatgaatacatagaacgagtagacaatttgtacagaaatcagataattagaaaaagtaagcgcgacaaactcctcatgcctgccgacaaaataccaactgattttattgacagacaattgagagcgactcaatacataactcgaaaagcaacggaactacttgcagacatttgtaaaaatgtatggtgtaccagtggtagcataacaagctacctgcgtaaaatatggggatgggatgatgtactaatgaatctgcaacttccaaaataccaagatctaaacctgactgaaattgtagagtggaaaaccaacgacggacaaatacaccgaaaattagtaattaaagactggacaaaaagaaaagaccaccggcaccacgctatagatgcgctaacaattgcttgcacacagcaaaggtttattcaaaaaataaacactcttagtgcaaaaaaaacaagggatgaaatgtatgcttctgtagaagaccaaaataacgcgtcgcgagaccgcctatcgttgttggataggtattttatcaaacaacgtccgttcgtaacagccgaagttgaaaacgcagcagcaaaaattatagtgtcgtacaaagccggcaagcgtgtggccaaacgcgacttttataaggccactggaataaataaagaaaaaggtgtgctagtgccgcgtgggccgcttagcgaaaaatcggtttacggcaaaataaacaccattgaaaaaaacaaaccgataaagtacctttttgaaaacccagaactaatatacaaaaaaagaattaaactactgattaaagaaagattgtcagtacacgatagcgatgttaaaaaggctatggcgagcataaaaaaagaacctatatactttgatgccaacaaaaccgtggcacttgaatatggtagctgttacgcagaaaaatatgtaattaaatacccaatagaatcattaaaaccggcagatgcccaatacatagtagatgagaaaataaaagcaattgtagaagaacgatttaaacagtttgaaaataaacccaaagaggcttttaaagaaaaactgtggctaaatagagaaagaaatattgaaataaaaagtgtaaggtgctatactgggctatctgcggtagaaccagtaaaacgaaatgaaactggtgaaccaattggctttgtgaaacctggcagcaatcatcacatagcattctataccgacgaaaatggaatgatgcaagagcatatttgtaccttctggcatgcggtagaacgaaaaaaatacaatattccagtattggtaaaaaaacctaaagaaatatggaataaaatactaacagacggcaccaactacttacctgaatttatagaaaaactgcctaaagacaattggtgcttctgtttttcaatggaacaaaatgagatgtttttacttggcctttcaaatgaacgtgtaaatgatttaataataagtaacaatactgaaataataagccaacacttgtatcgagtacaaaaaattgcagctacttactacgttttcagacatcatttagaaactgaacttgatgatagtaaagatgcagcagcagcattaagatactattcagtaagaagtataaagagtttactctcgcttcaacctcaaaaagtaattatttcaaacataggcacaatacaaaaaagtacccattaaccctatgataaaacgcacactatacttcggcaatccggcatatctcagcacccacctcgaccagttggtgataaagctgcccgataccggcgaaaccaaaaccgcacccatagaagatataggggtgctgatactggatagccagcagcttactattagtcaggcgctgatggcccggctgctggccaacaatatcgcggtgatagtgtgcgatgctgcccgccaccccaccggcctgctgctaaatctggacggcaacaccctgcaaagccgcatatttgcagtccaactggatgccagcgaaccactaaaaaaacaactgtggcaacaaactatagtagccaaaatacaaaatcaggccgcatggcttagtcaatataccgcacggggggcactgtggcctgtgcccgacaaaaccctgactaacatggcgcgcgatgtaaaaagcggagacagcgacaataccgaggctatggcagcaggctactactggaaaaacctgtggggcaaggaatttgattttgcccgagaccgctatggcgagccgccaaacaatatgctgaactatggctacgcactgctgcgggcagtagtggcccgcagtctggtgggtagcggcttgctacccacactgggcatacaccaccgaaaccaatataacgcctactgccttgccgacgacataatggagccctaccgcccctatgtagacaaagtagtatgcggcatagtaaccgacaccccggctgccgaatggcaggagctgacaccggcgctaaaaaaacgactgctgggcatacctgcaatggatgtgcggatagatgggcagcgaagcccactgatgaatgcagcccagcgcactacagccagcctggcacgctgctacgagggcaaagtgaggcggctgctgtacccggatatggcagccgaatgacgggctgtgaacaataaatgctattatatgttcgatcgattaaacgcttaccgtattatgtgggtactggtatttttcgatttgcctaccgaaaccaaggaagaccgtaagcggtacaccacatttcgcaaaaaaatgatggccgatggttttatgatgtttcagtttagtatatacatgcggcactgtagtagccgcgaaaatgcggatgtgcacataaagcgcaccaaggccaacctgccgcccaaaggccatgtgggtataatatgcattaccgataagcaatttgggatgatggagattttcagagggcacgccagtgtgccgctggagccgccgccgcagcaactggaattgttttgaaacaggaataaaaaaactggcaaatccccgcatttttattcctgcaaaacagctacaagccttgctggtagacaatcttagccattgctgttgtttaagaactcaaagctaagaaaaattgaaagcaaatcacaaccaccatcgcacatggtgcagg

SEQ ID NO: 1755 - DNA, 15015 bp, synthetic construct
  misc_feature 1..15015: note = Synthetic
  source 1..15015: mol_type = other DNA
ctcactgatatgacgagtactattttaacttcatttaatgctttgaaacttgctgacgaaggcaaattggataatattgaagtgaaaactatcgaagttgcaaatgctaaacgtcggttggaactactggaattgaacgaaaaaattaaaggaggaagaaaacagtacattaaattgattaaaaaatggttaaaaggcgagacggagtaccttcagatcattggaccaatattaaaaaagtctattcaaaacagcatcttcaataactaggaataatttagagtatgtataatacgcctaactgtgggagctacttctacggtgcttctagttatttttttctggatatcgttttaacttctttccattcctcgtcaaaattatgttgtgctctgtagttgcaaaaattgctgtttttgaccatgcaattttgaattgaattgatcatgacttctaaaattaataggtgtaggaaaaatccaacctacataaaaaaaaatagatgtcaatttaaactaaaattatatgatcacgcaaaattgaaatttagcgatcaaggctactaaattttgcaatcctaaaacttatttcactaatatattagatagttttttccaatcttcaccagtgaggtgagaaccaggtggtacgacagaattccactcgctactgcttaattcgttgattttcaagcgtatttgggttaaactcaatgtttcattttcgggaattattttagaaatagatttagctagtcgtctaggtattcctgccattcgcattaaaagggctcgttccgtgtcaacaccataataaaccatcgaaggaatatatgaattatcttttagatcgtcgttatcactagttacaataccttctagcgctcccagaccccaagatgctttaaatcgtgtactattaatatacttcacaaaactattaattctttcagaatcattagaattgttagcgaatgttggatgataagaagaaacctcgaacaattgatctcctttaacccaactaataagcacatttgcgactgcctcttcattaaaagaattactgtgagaatccgtccccaaaccagtctcttttaattttgcaattacttttatcttttcttttagatattcagtattaaaattaaaaagattatcaggattccagctttctgctgaggatattgacggattgttacggttctcctgcttcataatttctaacacagaaggtactgagaaacctgttttatcagcaaaccctaatgttccggggttaaatttctcttgcaactcaagataaatcatcttgcagattttaatgaatttttgtttatctgaaacatcaagttgataataacccaagctatctttaaataaatcacttatctctaatacgctttcattgccagactgattaagcacatgaattaaatattggaccagaggctctaaagaatctgagtatttataagcaagtttaaaaatctgactatctgaagattctaatgtctctaaaatattatctgcgttaataattagttccaaaagcatactggcgattcccttcgaactttcacgaattaaagattttgcactttccgcattggaaggggagtcaaacggaaatattaatttaccataattatctacaagagttctacctgctctacctgctatattccaaaaatcgcttgatgatagtttaacgggtccttttctataagaatcaaaataaacagccgaaacaggaaaattaaccccttcggcgagggtgctggtagcaaaaatgtgctcgatttccttttcacgaattaaatattcaattagtagtttagtttcatctgacagtcctgcatggtgaagtgcaattttcttttttaaaaccttagttagaatcgtctcctgaccaacttcgtctataataaattttcttactagttcaattttctctgaaactggagattcaggtaatgcattataaagatattctgatctgttatcgaccatgccggatccttgacataaatacaaaatggatttatttgcagctccatatcttttagcagtaaattcaatgtacttttctttatttttccctgtaggtacaaaatctaattcaatatcttctaattcccgctcactatcaattagagaataggcagaaggtaaaagtgtttgtgcaaatttcttaaaattgcttttttgtttaattccaattaatagcttttcggccggtttccaatttattcttatgggtgttttaattttattgccccccatccaatcggcaattgttgatgcggaatcctttaaaaaaggcgaaagaaacataaatttagaatttggtcgttcacgttttaaaattgctaataataattctaatcgcgtacctcgactaccattctgtatcatgtgcgcctcgtctataacaaaaagtgcaacgtcgtttacagattcatgatttcttctaatcaagagatcaagtttctcaggtgtagatactaaaatgtctattctttcttggagtaatgcctcttcagaggggtcaacctctatagctcccgaagttttttcaattgaaaaatttagaccttcaaaatcagatttcagatcatagtaaacttgatttactagcgctctggttggaacaacatatactattttcgattcattatttaaagccttagtaacaataatattaaattccgctagaagagtttttcccgcacttgtaggcatttccactacagtaacacttgccgcaatatccaataaactcatattaatagcgtccctctgagatggtaataaatcgataattgctttttctgattggctttttgcgatgcaaaaatcttttaatttttttatctgaatagcatttgttgagtaccaaatcgaattattttgaagtaaaattaaattgtactccataatgccaacaatgctttgtagcttgggatgattgctaaaaagttttcttgctacttctgaatgtattcttatctcactttctagctttcccttgtagctatagccttcggtaagataatctgccgtttctgtaatagtttttgaaatgtgataccatcctaagagtacttctgctgattctacctgctctggataattatgtatttgtttcagataatcagattcaaattgtgattgagatatttttaattcagctatcagttgtagtgattctcgaatatcagcatatccattatcctttcttacaagcaagatgaaagcttctataattttatttgaaacaatctcttgccaattgcctaatacgctataatcttttgttatgtattctttgagatctaatctaactcgtattgttttatcagccttgagtcctagggaggctaaataaaaataataaaggctatatgtgtctaagtttttctgtccaaaaaactcttcaaataaattattgaagtattcaattctgatatcataggattttaaaattgaataagccatatcatatagagagttatctatatcttcttctttagtagagagtaatttatttaataataaatattcaattttaagaattttgcggttaaattcatcattattatcaggaatagaatatcccaactcaccttccaaaaaagcaaatttacggtcctgtacataggatcgtatttcatcatcatgtaaaacgtactgtaaaatgtctttcatttttaagctttacaaagttcttgtactttttcgtaaaaaagatctattgtttcggagatttctttgtcaaagttgagaacgcaaaatgttatgttgtgtggatcaaaatcagtttgttgagtgtaaaatttgccataatcatcattaattttaacacaagagacatcgcgtataagagcacatccaaagactaaatcgaagtcgctttgcttatcaaattcaagtagaagtaggactaaacctattttttccgccgcttcgtcagttaagtttctggtgtaatctgataaacggttgattaaaaggtcacggtcatttttaaattttgtttgagtattgaatattgaatcgttgttataatctactaccgatggtggatttttcttttgttgagagactttaccttcgccgatcattaaacgaagtctgtcattatcaatgcgatatccgattgcatcaagtcctcttcctggttgtccagctagttcacggttagtaatattcttgtgcggtatgataaaacgttcattttttggtaatttatcttcaaaatagtaagttagtaataactcacctaggtcacttctgtagatgtcagtaataacatgtttgtgagtgttgccagcctctcttactaaatcttccgcaacagaatttcttttaataatatgttgaagctgagtactatcgaatccatgtttttgaaagagtaaactttcatctattttaccatactcaaatctggtttcagatctttgctttatatacatctcagaaaatttgatgataaatttatcagtgacggagatatcttctttaacgaatttatgaggcattaattatgatgttagttatactattaactcgatggagtgagataataaatatttagtggttactaattactctttagtaaccaaagatattaaaaaataatgaggtaaatactcggatagttacaaatattaataggttaaaaattaatgtttattatccatctaacaacgaaaagtttttatgtttttagcttatcggattttacaaattaatctcttaacattttttactacttattatgcagagaggcgtagcgcttaataattccttgggtctacacttaataatatgcggctggcccgaataggatgaacgttcgcctaaaaaataaaacctatttcgattttacaaattgcgtcgaaagatatgatgcaaggcaacgtgttattaaaaaattaatcatcggccttctccatggaatgtctatgataggagcaaagatcaccttcataagcttcttctaaatctagttgattatgacaaataccgcatcgcttgtccgcttgttgataaccgcaattaagacaggccatttctgcaaaaatataagtagattttccacattcaggacaatctgcataaggatcatcgcctccgtccatccaagcaatatgagcttctgctgccagttcctcgtttatacattcctcgatcacatcttcaatatcaaattcattaaagcactttttgcaaaataatgttaaggtttccccaggatcatattttttgtggattatcgcatggataagatctgattggcatgaaggacaacggatattggatacagcttctctaagggtttgaaacttccaatcaactcctaacaacgatttaatactttcgtccttttcactttcataaatttcatcggtttctaaaaagatattccatgcttctggaccaaataattcagacggttcctcattgagataagtgacgcaaaaatcacggataattttaaaggattttgaaactacctcattaactatgtacggtggtttttctgtataataatgctcaatattatttctaaggttactaatctcatcaaaagcattccaattgataatgattccaaaatttttgaatcgttcccttatttgttgtacatcaactgttttatgccctctaccttgaaaaaataactggccgtgctcatccaacgatggaacaattgtttgttgaattaatatattatcatttgcaggtggagataagcgtctcaatttttctttgaataaaaggagagttcccgcaaatatattcctaagtgctgattgggcacggcgagggtcttcactggtaaagtcttctagaccaatttgaatagcttcaacagcattcttaagtattttcattgtataagcatttagatttcttgaaagttagtaattctataaatattactactataatcatttcttgttaaattggtgtatttgtggttatgaactaaaacgtccttttggaagtagtcgggtaatagtcgagatatggaattgttaaaatttacttgctaatcggtgagataaacattacataagtattaggtgaaaatttaatttgactttgtctttaaataagaatttgcttatatttgtacctgaaaactaaaacgttctttaagttaatttgtaaaataggtaattatatttttaatattttgctcgtggcaatataatggcactcaaaattatttaaaatataacatgcagaatattagcgatttaatggttggggttcgagtcccgtccattccgcagtagctcagaagagaactgaaaattgattttttgaaaatgcacaaaaagaatgtggcaatatcgtggcaaatttcattcttaaagtaaaaaaatcattatcaatcgtatattaaaggggtaggtgagaaaccctctctctccgcaagttgagaaactaaaaaataaaaaaagcctttaaatattactatttaaaggcttttttgtgcttattaaatatcaattgtagccaccagattttgaagctgatccatttttaggatcagttccaaaacttggggactaggcaaaaagtttagataacctaaataggaaaaacgatttatctcgtacgcccctaagttgtaatctgaagttttttattttggcattaaaagattcagctgccgcatttgtgctacgagcattaaaataattgagaatattatcatagtttaatatgattgttctcgttaaggtattgaaggttttaaatccggattcttctacttctttaaacaaatgtgggatcaataccaaaagttggggactaggcaaaaagtttagataatctaaataggaaaaacgatttatctcgcacacctctaagttgtaatctgaagttttttattttggcattaaaagattcagctgccgcatttgtgctacgagcattaaaataattgagaatattatcatagtttaatatgattgttctcgttaaggtattgaaggttttaaatccggattcttctacttctttaaaccaatgtgggatcaataccaaaagttggggactatgcaaaaagcttagataatctaaataggaaaaacgatttatctcgcacacctctaagttgtaatctgaagttttttattttggcattaaaagattcagctgccgcatttgtgctacgagcattaaaataattgagaatattatcatagtttaatatgattgttctcgttaaggtattgaaggttttaaatctggattcttccacatctttaaaccaatgtgctaacttttgattttcaagaccatcgaaaacaaaaagaagaagttgaattttcatttaatgcaacattaagagatcatcaggataaggtcattgatagtatttcaaagaaggattttggagtaattgttgctccgcccggttcgggtaaaacaattatgggtttgaaaatcattgcagacaagaaacaaccagctttaatcgttgttcatcgtaaacaattattggaacaatggcaggaaagagtacaaacatttatcggaattcctaaacatgaaattggtatcatcgggcaaggaaaggcaaaaattggaaaacagattacaattgctaccattcagagtttgccaaagcaaattgagcaaatccagaatcaatttggaattattatcgtggacgaatgtcatcatattcctgccgaaacgttccgtaatacgattgaaaaattggaaacattttatttatatggactaacagcgacaccatttagaaaatacaatgatgataaattgatttttgcctttcttggagaaataatttcagaaattgcgaataatgaaattgaaaactttaaacatgctaaaataattgtcaggaatacaaatttggatgttccatttaattcaaaaactgacaattttgaaatactttcaaaaattttaattcacgattcggaacgaaataagcttattctgaatgacataaaaacagagctttcctttggaaagcgaattgtgattatcacggaaaggaaagaacatattgatacgctttaccttttcctaaagcaatcttatgaagtgattacactgagtggtgatgattctgaaagtaatagaaaatcaaaatggcaaatcttacaacaagataactttcagatattgataaccaccggacaatattttggagaaggttcggacttatcaaacatcagttctttgtttctggtatatccgttttcattcaaaggcaagttgattcaatacattgggcgtgtacaacggtcagaaatcaaccccacaatctatgattatcgggacatcaaaattgattatctgaacaaactatttttaaagcgaaatacctattaccgtcaaatagcaagacaagcaagtttgtttgatgaaccaactgaacttactcctgaaagacaaagtttggttatagagaaacaaatcaaaatagctatagaagatttggatttcagatatggcaatgttggttttaagtacatagacaaagaaaacgatcaacaaatagattttgaaatagaaaacgaggaatttagacctgagtttgaagttttgaaaccttatatcattaaaattttgaaatcaaaatctgttaaaattgatatttatagcgaaatagaaaatggtgttattttatcacaattagctacatcatctgatattgaaaatatcaataaagaaatcgttgaaagtgttaattttcagtttcttaataaaaattttatcactcagattccggtatcgaagcaaaatattcttacaagcaatgaattatcgaaaaatcaaaatatttatactgatgcagaaaatattttggaggatttactaaaaggaaaacagtacaagcactctaagcacattcaatacttagcaggcaaacacgaacgaaatgttatgaaactaaggtttgttttacagccgttttcttttgtgtttttaattgccggagaacagagttatcatattgttttagaaactctagatacagaagaggcaacctacatttggcatacagaaaaaagtaaatcagtactaatggagactgtaatgcaaatagacaaagaactcaatattattcgagctaaaggaagacaagcttacttagaaacgaatccgcataatttctcaagaattatgcacgattattctgatgataataaaggttttatggtgtggaaggggcaactagaagaacgactagtttaagagcgtagaaactactaatcatatttctgtcagataatgattgtatgctatataactatttagcagacggtggctatagaggaaatgttattgaagaaataaaagataagtttggttacatcattcaggttgttttatggtctgacaataaagaaaaactctttaagccagtacacaaaagatggattgttgaaagaacgttttcttggtttgataactacagaagactttgccgaaattatgaattgctaatggaaaattctgaaaacatggtcaaattatctgctataaaatgattattgaataaaatttaaacaggctcttattgagctgaaagaacaacaaaacgaaatttttacaaaaatttattcattaattgctagtgattaataatatttagttctttatgatctggttttacaaactgtattgtattgttaaaaagtaagaatcgaatattatagatatgtattaagagatgatatgaaggttatttattgcatatattatcacttttgagaaacttacagaatgagaaaaaaaatatttgtcaaaaaaatgccccgaagatagtcgaggctctaaatgttttcacaacggaataatccttattgtgaattgcttttcaaaattattgatacaaatatatgtcaaaaattgattagttgatttacggaaaaccataatttgaatgattttttatttctatttttatacaatatcaaaaactatttgctatggctaaatatatactaggattagatctaggaaccaactcaatcggctgggcattaattgaagttgacgaaaataatatccctattcgaattattgtaatgggttctagaataattcctttgtcgtcaaatgatagagaggaattccaacgaggtttgtcaattactaaaaatcaaaacagaacgattagccgaactcaaagaaaaggttatgacagaaaacaattgaaaagaaatgatttaaataaggttttaaataaatataatatttttccttcgaagatgttgttaaatcttccaatgcttgatttgtggaaattaagaagtgattcagcaaactcaaataaagatatttctgctgaacaattaggacgtattttgtatatgcttaatcagaaaagaggttataaatcggtcagaagtgaagcgaatagtgataaaaaagatacagattatgtgcaggcggtcaaggggcgttatgcacaactgaaagatagaaatcagactattggacagtatttttatgaagaattgtataatgcaaacgttaataattcttattttaaaattaaggaagaagtttatccaagagaagcttatattgaagaatttgatacaattattaattctcaaaaaactaagcatgaatttcttacagatcaatttgttcatcaattaagaaatgagattatttattttcagcgaaagcttaaatcacaaaaagggttaatcagtatttgtgaatttgaaggctttgagaaaactgtttttgataaggaaaaaaataaacataaaattgtttttgttggaccaaaagtagctcctagaagtgctcctttgtttcaactatgtcgtgtttgggaagttatcaatacgatttcaattaaagttaaaaatcctgaaggaagcaaatataaatggggggaaagaattcccagtataaaggaaaaagaaattttagcagattatttatttaaaaatgaagtattaagttttactaagcttcttgaaattttaggattaaataagaatgatgtttatgtgaataaacaaatactaaaaggtattaaagggaatgaaacttatgctactctttataatattttaggagaaaatgaatttttgaattttgacgtttctataattccatcaaatcatacttcaatgttggtggataaaaagaccggggaaattctggaagagagagctggtttggaattagatgtttcattggagaaacaacctttttatcagttatggcataccatttattcactgaaggatttagatgaatgtaaaaatgcattaatcaaaagatttgattttgatgacgaaactgcagaaaatttgtctcgtattgattttaacaaacaagctttcgggaataaatcgaacaaatcaatgaggaaaattcttccttttctaatggagggttatgattattctcaatcttgtagtttggctggttacaatcattctaattctttgacaaaagatgaaagagaacagcaggttactttagatcgattagaacttcttccgaaaaacagtttgagacaacctattgttgaaaaaattctgaaccagatgattaatttggtcaatgcaatcctcgatcaatatggagaactctctgaaataagagttgaacttgcacgtgaacttaaacaaagtaaagatgagagaaacgatgctgatctacaaaatactaaaaataaaaaacttaatgatgaaatcggaaaacggttggctgagttgggattacctataactaagcgatatattcagaaatataaatttatttttccgtcactcagcaaaaatctaaaagatgctcatgttaacaatcaatgtatatattgtggagaaacatttaatctatcagaagctttgagtggtgatgcgtacgatgttgaccatattgtacccaaagctttattatttgatgattcccagactaacaaagttttagttcataggaaatgtaattccacaaaaaccaatcaaacggcttacgactatatttctacaaaaggagatgagcaagttaggatatatttcgaacgtgttgacgattggtttaaaagtggaattatttcttacagtaaaatgcaaaggttgaaagtttcacataaggaatatcttgaaagaaaaaaaataggaaaagaaacggagaccgataaaaaactttgggaaaattttatagatagacaattgagagatactcagtacatttctcggaaatcaagagaaattttacagaaagtctgtaataatgtgactacaacagaaggtggagttactgctaagcttcgtaatttatggggttgggatgatgttttaatgaatttacaaatgcctaagtacagagaattaggacaaaccgttatcaaagaatggacaagcgaacacggtaaaagaaaacatcaaaaagaagaagtcgaaaactggacgaaaagagatgaccatcgccatcacgctattgatgctttggtgattgcttgtacaaaacaaggttttattcagcgtatcaatactttgaattcgagtgatactaaagatttaatgttaaaagaagttgaagaagctaaagtgaaatttagtgaaaagacaacgcttttggaaaaatatttaagaactcaagagccgtttagtacacaagaagtaatgagagaagccgataaggttttagtttctttcaaagcaggtaaaaaagtagcaacaataactaaatttaaggcaatcggaaagaataaagattctggtgttattgtcccgagaggggctttgcacgaacaatctgtttatggaaaaataaaagtgattgaaaaagataagcctttaaagtatttatttgaaaattcagatagaattgtagatcctaaggttaaaaaattggtagaggtaagactttcagaaaatgaaaataattctaaaacggctatatcaacactaaagaaagctccaatctttttgaacgaagaaaagacagaagttttggaaaaagcatcttgttacaatgatgcgacggtacttaaatataaattacaaagtataaaagcaagtcaggctgatgatattgttgatgaaagagtaaagtttttagtaaaagaacgattagctcaatttggaaataaagaaaaagaagcattcaaggatatactttggtttaatgaagaaaagcaaattccaatcataagcgttcgcttatttgctcgtcctgatgctaataatttacaggtaattaaaaaagacgaaaatgggaagagtatcggttttgttttaacaggtaacaatcatcacattgcaatttacgaagataaagacaataaacttattcagcacagttgtacattttggcacgcagtagaaagaaaaaaatataacattcctgtagtaataaaaaattcttctgatgtttggagtcaattattagacaaacaacttccagaatcacttttaaataaattacctacggataaacttaatttaaaattcagtatgcaacaaaatgaaatgtttattctgggtttatcacagaaagaatttgatgaagctattaaaaataatcataaatcctttttaagtaaatatttgtatttagtttggagtatttctaataatgattattattttagacatcatttggaaacaaagaatactgaattgaaaaatatttctactgcaaaagaatcgaaacgatattttagatttaaaagtgtgggagcgcttgttggaactaatccaataaaaataagattaaatcatttaggggaaatcaataaagtaggagagtactaattatgatcacccgctctatttacataggcaatcctgcttatcttaaattaaaagatgagcaaatgaaaatcctctgtccggaaacaaaattggaaaaggggagtgttcctgtagaagatttgggattgctgatgctggatcattttcagattaccatctcgcataaccttatccagaaaatgatgggaaataatgtagtcgttgtaagttgtgacagccatcacttaccacacggaattatgttgccactttatggtcatacagagcattcagatcgagtgaaagatcaattggaagcaactgagccgttaaagaaacagctttggaaacaaactgtagaatgtaagattgaaaatcagaaaaatgttttgataaggtttgataattattatgaaccaatgattgaatatcaaaaaaatataaagtctggtgatattacaaatatggaaggcattgcagcccagcattactggaaatatctcattagtttagattttttgcggcaacgttttggagatgcaccgaatcaatttttcaattttggatattctgttctaaggagtattgttgcaagagcaattgtggaaactgggctattacctgttttaggaatttttcacaaaaataaatataacccttactgtttggcggatgatctgatggagccttatcgcccttttgttgatctgctggttatgcaatggttgaaaataaatcctaaggcagaggaattaacaaaggaatttaaagctcatattctccagatagcaacaaaggatgtaatattgatggtaaaatgagacctttgttaattgctgtaaaaataacagtatcatcactttataaatgttatactggagaaaaacgtcttatttcttatcctgaattaatatgaataccgaaaggtttaacgcttatcgaattatgtgggttttagtattatatgatttaccaacagaaactaaagccaatatgaaagatgccagccgctttcgtaagggcttaattgatgatggctttacattgtttcagttttcaatgtatgttcgccactgtccaagtcgagaaaatgcagaagtgcatattaagaggataaagttcatgttacctaaagctggaaaagttgcgataatgtgcattaccgacaagcaatttggtgatattgaaatatttttcgccagaaataaagaagaaccacctccaacctttcaaca

SEQ ID NO: 1756 - DNA, 14850 bp, synthetic construct
  source 1..14850: mol_type = other DNA
  misc_feature 1..14850: note = Synthetic
gtgatcttttttctatcgatttccattttcgagaacgtttgctggtctgcgatatgcttttgtctaactagttaataacatcatttatatcctacacttatccttttatcattctttctttccttatcttccagattaactctcattatcaataacccatccctgcctctttcccctttaggataatctgatccctatgtctagcaatatttcttttttcggtagtaaaacaaatagcaatactatcaaataaccatagagcacgagcgataaataagtaataagaaatacaacaaatacagtatacaaatatatgttatttgtgttattattcaaaacaaaagcatctttataaaatgtaaaagacagggcataacctcccttgcttgcgcacgtatcatacgcgtgcatgggaaactaccttcacaaggttaaaagaaatacttccaatattgatttcattcccttgcttgcatctcccgacgcgtgacggtgtagtttataccgacacgcgtaacaaacgcgcgccagctaaggcatttcatataatttatatcgaaatatgttaaatatataaaaaatgagtatatatttgttaatagttaccttaggataaatcagaagaaatattggcaaatttaataacctaaagaaataaatcaatctacgctatttgtagcatgccagcgaaaaatcaataatcacaataaacagttcatataattataaacatttaaaaacaaaaacatgaaaaaagtaattgttttaggtattatgttaagtgttagcttattgggatttacccagaatgaatttaagccggagcagactgttgcttacccctttaaaattacctctaaaaacattaatccaagccatacgctggtgcttgttaccgataacaagcaagtagccatgatggatgcggtaacatgcaaggttaaatggtcaatcggcttgaacgataaattcaaaatcgaaaaagcggaatggtgtgggttttctactgagaatgactccgtatggatcgtttacaaagaaaagaatgaaagaaaaacattaaccttaaatcctcaaacaggtgaaaaagtagcagggcctgtggtagaaaaacctaatgcagacgaaaaatccaaatcaggtgagaaaggtaaattgcttgatataaagcataattatccgttcaacgaaaatggagtaaccgttaggataaattataaaatgaagcttatggctaatgtattttcaagttccgattatgcactgactgtactatgcgatggcaaatacaaatggagtcaaaccgtgaacgccaaagtaatgcctgccctgatctccccttcaagcaagaaactggctgactttctgacagcatatgttcagggcgacaaactctttattgtgtacgatggcttttcggtgttagaccttgtaagcgggaaaattttatggacaagcgggtttgattatgtgaatgccgacttaggtttaaccaaactcacacagcaatatcccaaagccccattcccttattgcgacggtaaggtggtgtatgtaaccgatatgcatgataatgcacgtaaattaaaagctttggatgcaggtaccggaaaaatgatatgggaaagtgaaaaatacgataaagatgcaatggtttcgaacatgtattttgtaaacaatacaataattaaccaatttggcgggcgtatttttactctaatatcgaaagtaagcagcaattcagaaacatatatttcggattatgcatttcctaccgacgggggttttaaaagctatgatgccacatcgggtaaattgctttggaccacttttgataaagctgaatactctggtttaaagaaaaggactaccaattcgattgtaaaagataacatcatttatgtggccactgaaaaggaactttttgcaatagatgccttaacaggcaaactgaaacattccaccccgctttcgaagtttgatattggtgtcccgaaggaattatcgtttttgaacgataacttatttttatattctaccgagggtttcgcaatgcttacaaccgatggcaaagtagtttataatactcctacaaaagagatatttacatacgatgttatgggcaaaatttatgttgtgtggattggtgatgatatctataatctgaattcattcctgtgtttcgaccccttaacaggaaaaattgcaggcaagatgaaagatactgcctatccctatttctctgagagcggagatgcttttattaagttcgacgggaataaagaaatgctcaggttcaaaatttattaattgcagcagttaataaggtgtgttgaaatttattttaaatcaaccattaaattttaatctgcaattttacaatgaattagaataattagttaaattttaattcataaaaattaaaaaccggacttcccatgtgcaagtccggttttttgcattctcccgtactggtgcgtgttccgtcgcgcgacggtgcatacattgttactttccttgccctccctcgctggcgcagatttgtaacttagcggagcgatctcatcccgcgcagcggggaagtttataccgcccacgaaagtgattcgtgcagtagcggggggcttcaattatgttttcaaaccgccatttgttaaagcctttgtgagcaccagtattttttttaagaacattgtaatatcatccaggtcttattaaagtccttgttttttaaatcttctttttttatccaaaagtacaatcgtccaacatcaccccacatcattccggtttttacatcctcagagtcaatttgtaataatagtatccagttatatgcacccttttttaattcttttgctttagggtcattatagccagatgcgtcgccgcaatataatccattagtcaccaactgacattcaagtcccatttcattttgaatagtatttgcatatccaagcattttattaataatattatcctgcggcaaatttaaatattggtctatttcttttcccgagagggtttcagttacaaattcatgctcccaacctggtaacgaaacagttgttttaaaatctaatttacactcattaaatctggaatattcaggtaaattaactgggaattcccgtctatctatattttcattcccggggttataatacaccatgaatttatcagaatctttcgggtcaaatccccaggcttcctgctctgccgaataaaagaaatataagattccattagcaggtagcagatcgtcagtatcaaatgacttaatctctttaaaatttatttgtgcgataaatgacaaaggtttaccattattttctttgaaccaatcaacttctttaggtaaatcaggttgtccaccaatttttgataatcctggctctttatgttctgtatccgattttgaagttattatccgtatctcgtttctcaataagggttcaaatttatcccaatgtttacttaatcccaccttttggaatttatcctttaatgcggttgaagtaagaatttcatttatgtcagactcaacaccaacttgattattaatctgattattggatgactttttaaaaagcgattttctgttaagtaagccaaacactattattatcgtaagacaaacccatataattgtgctcatagttttatgtttatttctgtcgataatattggtgccagcgggggacaaattggatggtttgaaccggcacggattattcgcttcgctcatgagatcgctgcgcttagttattcgcttcgctcatgagatcgctgcgctaagttattcgcttcgctcatgagatcgctgcgctaagttactcgctacgctcgtgagatcgctgcgctaagttactcgctacgctcgtgagaccgctgcgctaagttattcggcttcgccttatgaaatcgcttcactaagttacaaatccacggaagcgggggggcacacgtctggagacgcgccaacctgggtatagtagttgcatgtaagcggtttgttattttttatctgttatcaaatgcattgtaaatatatcaataggttttttgatccgtagctgttaatcttgatatgcttattgcttaataagtttacttgttttaattgcctttttgtcagttactttaattaaataaatcccttttgctaaactgcttacatctattttttcgctcctggattttgcgaatctgtttattaatagcttaccatttaaaccgaaaattgaaattatggaatttgggattaattcgtttattgttaattcatttgtcaccggatttggaaacattgaaacagattctttggtaatatcatctattccggttgttccaacatcttgcgtaattgttatagtaagggtcgttactccagctccttcaactgtaacaattgcagttctggttgaagcggttgggtttgcttgtgctgttaatgtaatcacagtattgtttgaaccggcactattgcttaaagttaaccaggattgattgctcgaaacatgccaatcagtattagaagtaatagtaaacgttttagtgctgttgttcggtgctgcaatagttaaagcgtttgttgatacagataatacaaacgagaccagggaagaataaatatttttaatgcctcctaagaatagtttacctgttgatgtatacgaaagcgtatttagcgatatgccatcaaaataagaaatatttgtccacgactgaccatcatcgcacgaataggacaacccaccgtttttattcatactgaaatatgcttttgcaaatggaatatattttatattttgataaaaattacttgtcgaaatgctgtcccagtgttcgcccccattgcttgtcttgtaaattttatggttaattccatcatttgaacaatatgaaatcaatccattgttttcatctttgaaatcaaaagtaataaccgaatcaaccgcattatgaaatggcgtattgatagctttccaggttaatcctttatcggaggatttaaaaattcgtgctgaactggtaagaaaccaaattgaattattactggttctgtaggaattctgagaattatacattccatcattatttccggcaggcatattagcatcagctacccggttccactgatttccaccatttgctgtcgtgtaaatttcgaaattcggcgaggcatcaccaatagcaacgccttcgttttcattccaaaaatatataacatccggaaataagctgttttgattaaaacccgaagtttgttttgtccatgaattaccagcatctgtagttacataaatccctttcgaatcgccctgacatacaacataatacgcttttgttttattgatagcgcatacaccgccaaccgaatgagggaatccggatataagaggcatagattttgttttccatgtagctccggcatttgaagtaatagaaatactatcggcattcgcgtctttaacccacactactgtatcgttggcaacacttatatcataagcccacgaatcttgcccaaattttgatgaactccattgagttttaacaaacgatggtaaacaatcatcaaattcacaggcaccgatatctgccttattaatccgggaatgccctctttggtcgaattgcggagatccgttaccctcggcaggtaatgcgtcaactgcagagccgattgcatccaggtcgcaaacgggtatccaaaagcttttatctaatccaacatatctagtaacacctaaaagcttaaaacctggattaacattgaaaatgtcggttgcagaagctccatcagcaatagaaatagtttggtcaaaaatattatagccgcctgaaataaacgtactattagcatccccggttaaatccctgttgtcatcatcataaaatatggaattttttatgatgagttttgaattgttcagactaatagttgaagtatttacggttaccgaaccataatccggagcaggtctaaaataagagaagtgattgtagtgttcacagaaagtacaatttgtaacgttgatattgctattttgcatatagattgccgtgcccttgccaatataaggatgagaagctgaaaaattactccctactgaattcctataaaatgtacaatttaccaggttcaattctcctgctaacttgtaaatggcaccaccggctccggtatataccgggcctccggattgaagaccggaaaaagtgctgtttgaaatatttaacactccgccgtaactggcaatcgcaccaccattttgtccatattgaatgttaggatagtaatgtacatatcctccatatccttcggtattgaaatagcataagttaatattaacctttgaatttgtatttcttattaaaattacgccaccatcggtattgtaagaaactgtatccccgatgtgaaaacctgttttgaataaattacagttatcaatattaacagtaattgttgaatttcccgtaatttcaaagattcttgggaaaattccgtttgcacctcttcctcgtataaccagatttggatttcccttaatagtttgtgatttattaatgtctatcttttctcctaaaataatttgagtaagactattatcgaaaacaattgtatcgccactatgagctttaataatcgcatcgcggagagagcccgcaatactatcagtgccggtagtaacaacaattttttgaccaaaacctttgaatgaaacaattatcaaaataattgtcattaacaataatcttagagttttcatctttttaaaaattaattttcgtttttctactatggcccataacggccgacgctctgccaagtgcttaattaaattgttgctcaactgccggctagtacaaatatatgtaaagatttcaaatgtatcaccgatcacgaaaaacctcaatttattgtagactaatttgtaccggcacggattactcgctacgctcgtgagaccgctgcgctaagttactcgctacgctcgtgagatcgctgcgctaagttattcgcttcgctcatgagaccgctgcgctaagttactcgctacgctcgtgagatcgctgcgctaagttattcgcttcgctcagatcgttgcgctaagttactcgctacgctcgtgagaccgcttcgctaagttattcggcttcgccttatgaaatcgcttcactaagttacaaatccgcgccagcggggttattataactcaataccctaacaatacattatgggatgaggacgatacgaaatcctatatcactgtcggcagtgtatggttgtccgtgatttcgaaaagccgagcggcagtcctgagctttcgaataaaaactgccacctctgatcacacgacccaagccaattgcagggcctgtagggttggattgtgcaataccaggataatcgtcataccaatcgctgcagaattcagatacattcccatgcatatcatacaatccaaaagcattggcaggatatgtgcccacggcctgagttttatgagtagtagtattggtgttagtacaattgctataaggttgagcccaatcgtaatttgcctgtgcgttgcttaaacagtcaccagcgttaaaaggcgaagtggtattggcacgacaggcatattcccattcggcttcagttggtaagcgtccgcctttgtaagttgcaaattcaactgctccataccatgaaacaaatattacaggatggtcttcgaaaccagcagcaggtatccactggttgttggtataatgcaggccccaatcgtaattatcgacactggcttcaatcaggatatttgaaggatatgctccctcggcgtaataaccattactaccaatgcttttggcattcagaaaggctgcaaattgagcgttcgttatttcgtatttgctcattttaaaagcatttaaggttacctgatgctgggtttcattatagtgacctatttcgctcacaggactacccatagtaaaagtaccggcaggaatttgaaccatagtaatggctaacgggtcagaatttttttcatctttcctacatccggctaaaagggaaaaacaaactcccaatattaagaatcggaatatcaatgaactattttgctttgtcatgtttataaattaaagtgtaataatcattttatttatttctcttcggttacgctgtctttctgtgatgcttcaaagcaaatttaattattatcattatatggcacgaaagtatttgtgcggcaatggggtttattccgaaacgcgttgaaaacacgcgcccaatgctattaagttaagagaaaagcataaaatttgaaccgaagaaccgcaaagaaattttgcgattaacggctttgcggcactttgcgttaaaaactcttattaataaaattccttaacttaatagcattgaacgcgcgccagcttggggggctctattgtattatttacgttcatccaattaatgtttaatggctttaacaggtaattattttttgtttcataataaatatatcttatcagactttatatatgtactattcctttgtatatttgaagtataacaattgaaatatcaatcaacagaagagattgtttattttttcgattttattcatatcttcgatttgtttgatagtaatatgtgataaaatttagcttgttttaggaaatgacaagaattataaaggatattaggcgggtataaggattatattaaaaagaaaaggcgagttgccccgccttgaatgttttcacaacggaataatccttattgtgaattgctttagattgtgatgcaaatataagttataaaacacataattatacatagtatgaaaaaaatattaggacttgatttgggctctgcgtctgtaggttgggccgttattttggaagatgatgaaaatgaaaaaactaaaaatgagatattaggtttggggagtcggattattccttatgaagggacggaggggaaagattttgctaagggaactggcgaaagccggaattcggaacgtaccaaagcgcgtacggctcgtaagggatatgatcgttaccaattacggcgaaaactgcttattgatattttagtaaaaaactccatgcatcctgatgcaatccttaaggcccttcctaaaaataaattgtgggaacttcgaaataaagctgtaaatcatcccatttcattacctgaacttggtcgtttgttactttggctaaatcaaaaacgggggtataaaagtagtaggagtgatgctaatttagataagaaagatacggaatatgttgctactgtaaaaagtagacatgagaaaataaaagagaacaatctgactattggccagtttttttataatgagctagttgagaatgaattcttcaaagtgaaagaaaacattttccctagagaggcatacatagaagaatttaatacgatctgtaaaagacagcaactagaatatcaagaaactctaacagatgaattgatagataaaatccgtagtgaaattatctattatcaaaggcccttgaaatctcaaaagggattggtctccgtttgtgagtttgaaggcttttggacaaaaggcagtgatggtaaagagtatttcgtaggaccaaaggtagctccaaagagttcgccattattccagttatcgaaaatttgggagaatatcaacaacattaaacttgggtcacgaaacggaggtgagtttgtgctgacagtagagcaaaaacacgaaatatttcaacacttggataataacgaaaagctaacccaaaccgatttactaaaaatattggatttgaagaaagaaaattgttttgtaaataagcaattggtaaaaggaataaatgggaatataaccaaacatgcaattcgtcaatgccttggtaatacacttaagtatgaacatctttttgaattaaaactaaatgttattcaaactgaagatgaaggtttcttgtacgatgcaaaaactggtgaagtacttggcagtaaacctagtagaattatagatccgttaattgaaaaacaaatattttatcaattatggcacaccatttattcaattcaggaccaaattgaatgtagtaaaatattgcaatataaatttaaaattgacaaggatgtagctgacaaaatagcagcaattgattttggcaaacatgcatttgggaataagtcagcaaaggtaattcgcaaaattctaccctatttaattgagggtgatctatacagtcaagcaatgagttatgccggatacaatcattccaattcgcttacaaaagatgagaacctcaagcgaaaactatctgatcaattaaaaccaattgccaaaaactctttaaggcagccgattgtagaaaaaatcttgaatcagatggttaatgtagttaatgcgataattgacaaatatggcaaacccgacgaaattcgtgttgagttagcgagagaacttaagcagagtaaagatgaacgcaatgagactgataagttcatgggtaaacgtcaacgcgaaaatgaacaaatagcgaaacgacttgcagagtatggtttacgttcaacccgcaataatataattaaatggcggctttatgaagagattgataacgaagagaaaaagctcaatgcagtatgtgtgtattgcggacaaccaatatctttattagaggcaattaaagggaatgatgttgatattgagcacattattccaaaatcaaagcttttcgatgattctcaaagcaacaaaacgcttgcccacaggcattgtaataaagataaaaacgatcgaactgcttttgattttatggcaagtaaacccagttatgtgtttaatgaatatgttgaacgggtaaataatctgtattcgaatcatataattaatagagcgaaaagggataagttgttaatgacggagagtaagatcccagataattttattgatcggcagttacgtgaaagccaatatattgcaacaaaggcacgtgaaatattgcaaacaatttgccacaatgtttggtcaactagtggaaccgtaactgctgaattacgccatctttggggatgggatgatgttacaatgaaccttcaaatgccgaagtacaaagaaattaatctgaccgaatttgttgaatgggagagcgatcatggtaggagcaagcacaaaaaagaaataataaccggttggacaaaacgcgatgatcatcgccatcatgcagttgatgccttgactatagcatgtactaaacaaggttttatacaaagattcaacacattagctgccagtaaaacaagggaagatatgaaatttgttgttgatagtcgttccatacagtttaaagaaaaactttcattgttagagaaatacatagtaggtgaacaacctctttcagtaaatgaagtagagtgtgcagttagcagtatactaatttcatacaaagcaggaaagaaagttgctgtagttggtacaaggaaaattggaagaagaggaaataaaaaagtggtgcaaacaggaataattattccccggggtcaattgagtgaagaaagtgtttatggtaaaatcaggtccatagaagagaagaaaccaccatatctttttgaaaaccctcacttaattgttaaaccttacattaaaaaattggttgaagaaaggattttgaaatgtgatggagattttaaagcagccctttcatccttgaagaaacaacctatttacttagatttaaaagaaaatattatattggattatgcaacatgctttcgggaagagtatgtgattaagtataatgtagatattaattttagcaaagttgaaaaggtgattgatggagcgataaagcaaattcttcaagcccgattggataaatttaacggaaaagcaaaagatgcatttaaagatgtccaacggttagataaaacaataatgaaatggtacgaagatgaaggtttggctcgcccaattaaatcagttagatgttttactggattatctgcagtagtgccggttaaaaaagatcaacttggtaatgatattgggtttgtgaaaccaggtaataaccaccacattgcaatttattcagatgaagagggcaataaatttgaacatgtatgcacattctggcatgctgttgagcgcaagaagtatggtattcctgtgataattaagaatgttgctgaagtttgggacaaaattcaattgcaacccgagggcatttatccggaaagttttttagaaagacttccaaatatgaattggaatctaatattaagtatgcagcagaatgaaatgtttgttttaggtttagaaaaagatgaaattacaaaagcaatatcaaataatgattatagaactattagcgacaaattgtatagggtacaaaaaatgtctattaaaccaagtagcggtcaaattgatatcgtcttcagacatcatttggaaacccagataatagatgatacaaatacaaaaacaagtaaacgttttattaatgttcagagtcttggtgctatttttaacttatatccattcaaactcaaaattgaccgcttaggcaatatctcaaactaaacttcgcaaccgtaatcaagttagggtgcgactccaagtcacaaagtaactagcgatagaatccaactgaaatagtatattagcagttaagagaatgtattttgaacccggcggcatataccatatttataaccagggcaataaccggcagctggtgtattacaatcgtgaaaactatatttattttcttcgtaagttgaggattcatattatgccttttgccgatgtacttgcatggtgccttatgccgaatcattttcatttgatggttgaggtaagggaagtggaggttgagtgcattgccccggcttttagtgagggtttcactttaagtgaagccctcactaagccaagtgaagttctcactaagcagaagccagttaaaactgacctaaatcactcaattggtatactgctacgctcatacacccgcgctatcaacgcgcaggaagatcgcaccggctccctttttcgcaaaaaaaccaaagcaatctgtctgaacgagatcaacggaatttcttcccattggtacacttcattcggagtaacatttatgaaagttgatattccggaataccaatatcaacaggtctgtttcaattatattcatcaaaatcccgtaaaagccggattggttgtaaaagctgaagattgggagttctcatcttatgctgacctggtaggaatgcgtggtggaacatttgttaacagggaaagggtggaggaactgggattactatgcggatagaatgcttttagtgagggcttcacttgctgatagtgagggcttcacgcaaagtaaacccccactaaagcaaaagcttatgataaaacgtaccctttattttggcaatccctgctacctgaagaaaaaggatatgcagatgaatatcgaatttccggaaaaggaaaacaagcctccggcatccgttcctattgaagatattgggattcttgttcttgacagtccgcacattactctgacaaacgcattaattgccgagcttaaccagaataatgtggctgtgatcagttgtgatgcacagcatttgcctttcgggttaatgctcccaatgttttcgcatcatgcgtttactgagaaaatgtaccagcagttggaaagttccctgcctttgaaaaagaatctctggcaacaaaccattgtcgctaaaatcagcaaccaggctgccatgttgagaagtgttggaataaatgatgccaaaatgcaatattatatcgggttggtgaaaagcggcgatcctcagaatgtggaaggcagggcagctgcattttattgggaaaaactgtttggggcaaatgcctgtttcacccgtgatcgcgaaggagatggtcccaatgccatgcttaactatgggtatgctattttgctggctattgttgcccggtcgctggttgccagtggattgctccctgcggttggcatacatcaccggaataaatacaatccgtggtgcctggcttcggatataatggagccttaccggccttatgttgatatggttgtacttcaaattgtaaacgaaaatcctgaaatagaagatctcacgccttatattaagaagaaacttctgcaaatcccggtagttgatattataatagatggcaacagcagcccccttatggttggagtacagcgaactacggcttcactttcaacttgttttgagggatcggcgcgaaggatactttatccggaatttaattagtaatcgtggaatcagacttaactgaacggctaaaccaataccgcattttgtggatcttcgtattttttgatttgcctaccgataccaaaaaggacaggcgcaattatgccttgttccgaaaaaatcttcagaaggatggctttgccatgatgcagtattctatttatgtacgccattgcaacagccgtgaaaatgctgatgtacatatgcgccgtgtaaaaggattcctggctccgaaaggtgaaattattgtattttcattaactgataaacagtttggtatgatggagtttttcagggggcgtgacctgaaggatcggccggggacaccccagcagctggaacttttctaatgccaggaataaaaaagtccttctctttacgttggagaaggacttatctgaacactttttttattcctgatttccgacctattttgctgtggtttaattgattgaacaggggtatgttgtgttcagtcaatcaaagatacaatctaaaagcaattcacaacagccacggtaattggtattcca

SEQ ID NO: 1757 - DNA, 14632 bp, synthetic construct
  misc_feature 1..14632: note = Synthetic
  source 1..14632: mol_type = other DNA
ttaacgataaaaactacacaataactctttatacgttgaataaaatttgtgaggctagaaatttgaagctttcagatttttttaaattaattgataaatagcgtttgccataaatcaaataccactgtaaaagatgcctaagcatctttttttgttttaagcacttgtcaaatcgggagtaaaagttgtcaattcaggagtaaccttctttaggatgctgaaatattttttatacagtctatttttgaggaatggagtggtataaaatcataggagcaatagtaatttggttagtggggctttacctaaggggtagattttatgaatcatggaaagactataataatggcggttggaaaataagggaagagataagaaataagttaaaaaactcaattagtttattttgtaattaactactcctgttgataacaatgtgttttcttcaattctagggagatttaccattaaatcaaattctttttacacatacctttttaaaaccagacaatagatccttaattgacaaaatcaatgtagaagtacagattcagatctacttgatgatagtcttagtacaatcacgtatcccgctaaaaataacaaataaaaaaaggcgagtccccccgccttaaatgttttcacaacggaataatccttattgtgaattgcttcaaaattgtgttacaataatacaacaaaagtttttgttttcaaatgataaaaaccgtaaaataagtatttttttttttgttaaatttaaacggttattttagataacaagaaaaatcattaaaaacacatataataatgaagaaaatattaggattggatttggggacaaatagtattggatgggcgttgatagaagttgacgaaaacaatttccctattcgcattattgcgatgggttcaagaattattcccttatcatcaaatgataaagatgaatttcaacgaggtttatcaattacaaaaaaccaaagtagaacggttagtcgtacccaaagaaaaggttatgaccgaaaacaattgaaaaaaagtgatgattttaaatacagtttaagaagaatattaaataagtataatattttcccttcggaagaattattaaaacttccaatgcttgatttgtggaagttaagaagtgatgctgttaatcctaatgaaaatatttctgctgagcaattaggacgtattttatatatgctcaatcaaaaaagaggttataaatctgccagaagtgaagctaatgccgataaaaaagacacggattatgttctggcagtgaaaggacgttatgcgcagcttaaagatagaaatcagactattggtcagtatttttatgaagaactacataatgcaaaaacgaccaattcttatttcagaactaaagaagaagtttatccgcgagaagcttacattgaagagttcgatacaatcattaatgctcaaaaaagcaaacacgattttcttactgacgaagttgttcatcaattaagaaatgaaataatttattttcaaaggaaactaaagtctcaaaaaggattagtaagtatttgtgaatttgaaggctttgagaaaactattttcgacaaggaaaaagacaaaaacaaagttgtgtttgttggaccaaaagttgcccctaaaacttctcctttatttcaactgtgccgtatttgggaagtcgtgaatacaattactttaaaaataaaaaatcctgaaggaagtaaatataaatggggcgagaaaattccaaatataaaagaaaaagaggcattagccgattatttatttaaaaatgaaactttaagtttcaataagcttcttgatattttagaattaaaaaaagaaaatgtttatgtaaataagcaaattattaaaggcataaaaggaaatgaaacatattctgctcttcatcgtattttaggagataatgaacttctaaagtttgatgtgtctatcattccatcaaatcatacttcaatgttagtggataaaaaaactggagaaattctggaagaaagagctggtctagaacttgatgtttcgctcgagaaggagccattatatcaattatggcataccatttattctataaaagatttagatgaatgtaaaaatgctttaattaaaagatttggttttgatgatgaaattgcagaaaagttatctcatcttgattttaacaaacaggctttcggaaataaatcaaataaatcaatgagaaaaattcttccttttctaatggaaggttacaattattctcaatcctgcactttagctggttataaccattctaattctttgaccaaagatgaaagagaacaacaagttactttagacaaattagaacttcttccaaaaaatagtctcagacaaccaattgtcgaaaagattttaaatcagatgattaatgtggtcaacgcgatccttgaagaatacggaaagccatctgaaataagaattgaacttgctcgggaacttaaacaaagtaaagacgagcgacatgatgctgatttacaaaattccaaaaataaaaaactcaatgaagaaattggtaaacgattaactgaattgggactgcctgtaaccaagcggtacattcaaaaatataaattcatttttccatcgcttagtaaaagtttgaaagatgctcaagtaaacaatcaatgtatctattgtggagaaacatttaatttaacagaagctttaagcggtgatgcatacgatgttgaccatattgtaccaaaatctttattgtttgacgattcgcaaaccaacaaagttttagtccatagaaaatgtaattctacaaaaaccaatcaaaccgcttacgattatatagctagtaaaggggaagaagaagttcagatatattcagcacgtgttgatgattggttcaaaaggggcattatttcttatagcaaaatgcaaagattaaaagtttcacataaagaatatctggaacgtaaaagtttaaataaagaaacagaaaccgacaagaaactttgggaaaacttcatcgacagacaattacgggatactcaatatatttctcgaaaatcaaaagaaattttacaaaaagtatgcaataatgtaactacaacagaaggtggagttaccgcaaaacttcgtgatttatggggctgggatgatattttgatgaatctgcaaatgcctaaatacaaagaactcagacaaacggtcatcaaagaatggacaagcgaacacggtaaaagaaaacatcagaaagaggaaatcgaaaactggactaaaagggatgaccatcgccatcatgccattgacgctttagtaattgcctgtacaaaacaaggttttattcagcgaataaatactttaaattccagtgagacaaaagatttgatgcaacaagaaattaatgaagcaaaaaaacttttgggagaaaattataaagataaagaattcgaaaatagcaatgaattagtaaaaaatcacaaaggaagattatccaaattagatgattatttgcgtttacagaaacctattaaattcaacacaaaatatgtagaaaaagaagctgataaaattttgatttcttttaaagcaggtaaaaaagtagctacaattaccaagtttaaagcaacaggaaaaaataaagatactggcgtaattgttccaagaggagcattgcacgaagccggactttatggagtcagaactatatactctaaaggtgggattgcagaaaaacatattataaaaaaatacaaagttggagtttctgcacaagaccacatttttacaggaaaagaatcttattctgttaaaaaagataaaaatgggaatgaaaaagtcgatgacaaaataaaagtagttttagacagtatagttgatagtaaagttaaagagattgttttaaataggttaaatttcggatttagcgatggtgaagattataaaaacaatgtcaaaaaagcattaaacaactttaaaaatcttgatgagtatccattatggtataatgaaaacaaaggaataaagattttatcaataaaattaaaaacaggtttgaaagattctgttgtaccgcttcgcttgaatgaaagtaatgaggttataactttagtgaaaacgggaaacaatcatcatattgctatttatgaagataaaaacagtaaaccagttcaacacagttgtacattttggcacgctgtagaaaggaaaaaatataatattccagcagttattaagaaatcatctgatgtttggaatcaattattagataaggaacttcctgaatcttttttaaataatttaccagaagataacctcaatttaaaattcagtatgcaacaaaatgaaatgtttgttctgggtttatctcaagaagaatttaaagaagctattgaaaataatgataaatctttattaagcaaatatttgtatttggtttggagtgtttctgaaaataactattggttcaggcatcatttagaaactaaaaattctgatttaaagaaaactgaaggagctaaggaaagtaaaagactttataatattagaagtgtgagttctttattttctttaaaccctgtaaaagttagattaaaccatttaggagagattactaaaataggagaatattagttatgataaaacgtacccttttcttcggtagccccgcatatttgagcaccaaaaatgagcaaatagtcatttcttatcccgacaaggaacaagaaaccaaaacggtagctattgaagatattggggtgattgttttagaaaaccagcaaatcacgattaccaacggtttgctagaaaaactaacccataacaatgtggcattaatcaattgtgaccaataccacttgcctataggtttgttaatgcctttgagtgggcatacagagcaaacagagcgttttaaaaaccaaatcaatgcttctgtgccactcaaaaagaatttatggcaacaaaccataagcgtcaaaatctcaaaccaagcgggattactcaaagaaaaaggaatcccttgccgaaaaatggaaatttgggcaaaagaagtcacctcaggagatgcaggtaatcacgaatctagagctgctgttttttactggcaaaatctgatcaaagtcgaaaattttacaagaggacaaaaaggagtaccacccaataacttactcaactatggctatgctattttgagagcgattactgcacgagccttggtaagttctggaatgttgcccactttaggaatcttccaccggaataaatacaatgcctattgcttggctgatgatattatggaaccctatcgaccttatgtggacttaattgtttgccacattatggaaaccgaagattcgtatgaggaactgactatcgaaatcaaaaaacaattgttaagtattgccactattaatgtatttatagacggaaagaacagtccgctgatggtggcaatgagcagaacgacacattccttacacgaatgttttgaaggaacagcaaggaaaattttatatcctgtttatgtatgacgaacattacacgcgcttaaaccaatatagaagtttgtggatattagtattttttgatctgcccactgaaacaaaaaaagaacgtaaaatagctggcttgttccgaaagcggctattagacgatggcttttctatgtttcaattttcaatttacatgcgattttgtgccagtcgagaaaatgcggaagtacacaccaaaagaatcaaaaacagtttgcctgaacacggaaaaattggtgtgatgcaaatcacagacaaacaatttggaatgatggaacttttttatgggaagaaaccagtagagcctgaaaaaccatcgcagcaattagaacttttttaaactaggatttaaaaaaaggatatgcttttgaagcttagtacaaaaataatactttttttggttttaaaaataacttataactaccaacataccagttgattaaatcgatgtatgttgggaatcataagtaaaaatacaattttgaaagcaattcacaactaatctgccttttacaaatctaatttccttgttgggaatcataagtaaaaatacaattttgaaagcaattcacaacccgctcgttaatagcttcaaagcattctcggttgggaatcataagtaaaaatacaattttgaaagcaattcacaacggtaaaatactgcctcaggcgatagagttagttgggaatcataagtaaaaatacaattttgaaagcaattcacaacctcttgaaatagagaaacgtttttgaattggttgggaatcataagtaaaaatacaattttgaaagcaattcacaacgtaaaattaaacattcaaaagattgaagatgttgggaatcataagtaaaaatacaattttgaaagcaattcacaactagatgttcatcttccttaatagctagtaagttgggaatcataagtaaaaatacaattttgaaagcaattcacaacggatatggtgctgccacaacatctgaatttgttgggaatcataagtaaaaatacaattttgaaagcaattcacaacataacgaccttaccgaaagtacaaccgctcgttgggaatcataagtaaaaatacaattttgaaagcaattcacaacttagaacgtaagaaaatattatgtctatttgttgggaatcataagtaaaaatacaattttgaaagcaattcacaacctgccgatgacaatggaggtataacattaagttgggaatcataagtaaaaatacaattttgaaagcaattcacaacttacggcgcgtaatctcgcggtaatgctcggttgggaatcataagtaaaaatacaattttgaaagcaattcacaacgtcattgcgatattaccgataagctcgttagttgggaatcataagtaaaaatacaattttgaaagcaattcacaaccataaggcgcgtaggctggtaagtcgtatcgttgggaatcataagtaaaaatacaattttgaaagcaattcacaactcgtactcgcacggcgtattatttaaaaagttgggaatcataagtaaaaatacaattttgaaagcaattcacaactcgttgcttacagtggtatcccaccatgccgttgggaatcataagtaaaaatacaattttgaaagcaattcacaactataggtatttcgttatttattagtccctcagttgggaatcataagtaaaaatacaattttgaaagcaattcacaacagagtgtataagtttcctcatcgtaggctcgttgggaatcataagtaaaaatacaattttgaaagcaattcacaactggcaaacgctcctgctcctatcgtagcttgttgggaatcataagtaaaaatacaattttgaaagcaattcacaactttttcttcttgtttgtttgcatagtagttgttgggaatcataagtaaaaatacaattttgaaagcaattcacaactcattgcttacagttgtatcccaccatgccgttgggaatcataagtaaaaatacaattttgaaagcaattcacaaccgtaactttatggtagaaccaataataaagttgggaatcataagtaaaaatacaattttgaaagcaattcacaacgatacaacataactgccgtttactattgtgttgggaatcataagtaaaaatacaattttgaaagcaattcacaactcaattgagttaaatgttaaaaccaataaagttgggaatcataagtaaaaatacaattttgaaagcaattcacaacagaccgcgaaacaatttattttcatagaagttgggaatcataagtaaaaatacaattttgaaagcaattcacaacaagagagaagttacttcggcagatgaagcagttgggaatcataagtaaaaatacaattttgaaagcaattcacaactaggcattaggcttgatttataaattgtttgttgggaatcataagtaaaaatacaattttgaaagcaattcacaactcatccacattcaaccctaaagacaataagttgggaatcataagtaaaaatacaattttgaaagcaattcacaacagtagagacttattattataaccaactcaagttgggaatcataagtaaaaatacaattttgaaagcaattcacaaccgacgaaggaggtaatggcaagaaagcatgttgggaatcataagtaaaaatacaattttgaaagcaattcacaacaaactggtcttagttctggaggcaattcatgttgggaatcataagtaaaaatacaattttgaaagcaattcacaacgacgaacaattgcgattgatttcggaattggttgggaatcataagtaaaaatacaattttgaaagcaattcacaactggtagatttcttttgccacaaggaccagggttgggaatcataagtaaaaatacaattttgaaagcaattcacaacttggtatttagttttcaaatcattcaaaccgttgggaatcataagtaaaaatacaattttgaaagcaattcacaaccatcacaatcgctttcaacgcatcaaaactgttgggaatcataagtaaaaatacaattttgaaagcaattcacaacaagaaaacaaaaaggaatcacccagcaagagttgggaatcataagtaaaaatacaattttgaaagcaattcacaacccggtagtgtcgttaatgcgaattaagtaagttgggaatcataagtaaaaatacaattttgaaagcaattcacaactacccgtaacaaacggcttaatgtttttaagttgggaatcataagtaaaaatacaattttgaaagcaattcacaacccattggctccaaggtcgttgatggcagaagttgggaatcataagtaaaaatacaattttgaaagcaattcacaacaatggcaaaatgatgattaatgccacacaggttgggaatcataagtaaaaatacaattttgaaagcaattcacaactataggaggacttaaaactataattgagtgttgggaatcataagtaaaaatacaattttgaaagcaattcacaacctcagtaaaagaatatatcactacagatgagttgggaatcataagtaaaaatacaattttgaaagcaattcacaacactgacgatgatttaaatcaagcgttacaagttgggaatcataagtaaaaatacaattttgaaagcaattcacaacttccaccgcatacattgtgttttctatcgagttgggaatcataagtaaaaatacaattttgaaagcaattcacaacgttggatggatgtggccaactcggttccaggttgggaatcataagtaaaaatacaattttgaaagcaattcacaactcggtatctgatagtaagcttttgcctgctgttgggaatcataagtaaaaatacaattttgaaagcaattcacaacgttggatggatgtggccaactcggttccaggttgggaatcataagtaaaaatacaattttgaaagcaattcacaacattccgtgtttcatataccttttgttttttgttgggaatcataagtaaaaatacaattttgaaagcaattcacaaccaaatcgttttaccaaaacaattacttgagttgggaatcataagtaaaaatacaattttgaaagcaattcacaacgtagaacgattaaattctataggttatgaagttgggaatcataagtaaaaatacaattttgaaagcaattcacaacctgaaatgtagcgattgttataagctgtttgttgggaatcataagtaaaaatacaattttgaaagcaattcacaaccagccattctatccttattggcttttatttgttgggaatcataagtaaaaatacaattttgaaagcaattcacaactaagcaaaacaaagaatggattattgtttagttgggaatcataagtaaaaatacaattttgaaagcaattcacaactgtaaagggtaaaaggttcaacagttccagttgggaatcataagtaaaaatacaattttgaaagcaattcacaacagtgtggttttgttataaaacttttgtactgttgggaatcataagtaaaaatacaattttgaaagcaattcacaaccaagatcatgataacatgaaaatagttttagttgggaatcataagtaaaaatacaattttgaaagcaattcacaaccttccacatgatatgatgaactacataaaagttgggaatcataagtaaaaatacaattttgaaagcaattcacaaccctcttcgtcttcatccataaagaatccttgttgggaatcataagtaaaaatacaattttgaaagcaattcacaactgtcgagctagtgtttttggtaatccaccgttgggaatcataagtaaaaatacaattttgaaagcaattcacaactagtagagagccaatttgaccaagctagaggttgggaatcataagtaaaaatacaattttgaaagcaattcacaaccccgttttggtttgggttttcttagcgtctgttgggaatcataagtaaaaatacaattttgaaagcaattcacaacctgaatgtgatagcttcttcaactgtttttgttgggaatcataagtaaaaatacaattttgaaagcaattcacaacccacacgcaaaagaagggttaaaagatacggttgggaatcataagtaaaaatacaattttgaaagcaattcacaacaattgtatatttatttccacttggcccttcgttgggaatcataagtaaaaatacaattttgaaagcaattcacaactgaagtgcatcaattattagatcggctccagttgggaatcataagtaaaaatacaattttgaaagcaattcacaacctgaattcattaattgaggaagcagatttgttgggaatcataagtaaaaatacaattttgaaagcaattcacaacacaaggattgtgattttatagtattcaatgttgggaatcataagtaaaaatacaattttgaaagcaattcacaaccagaggttagaaatggagcgagaaccatgagttgggaatcataagtaaaaatacaattttgaaagcaattcacaacgtattgatggtttaaatcaaatctagagcgttgggaatcataagtaaaaatacaattttgaaagcaattcacaacttgccggtatcggtcattgaaaaagatatagttgggaatcataagtaaaaatacaattttgaaagcaattcacaacctttataccttgtggacgaaaagcgaagcgttgggaatcataagtaaaaatacaattttgaaagcaattcacaacctctagaggttgtggcttcgccattattggttgggaatcataagtaaaaatacaattttgaaagcaattcacaactaccaataaaagatcaatatgttgatggcgttgggaatcataagtaaaaatacaattttgaaagcaattcacaactacaatcagtttgtaagtctattggtgtcggttgggaatcataagtaaaaatacaattttgcactgataaccatcgaatacctttaaaatgtatatcaaaaatgttataatgatgcaatactaacgtgagcggacaggtcacgacatgtctgttggaaaccacaagtaaattactaattttttaacaggattcattagtaagaagtaaaatagtatttggcgttgtgacggcttggtttttcttttatcatttattgctacgatgcttaactgctatatagaattaatgcttagttaaaataaactaattggattaatataaggattctcatatttttgtaacttaaaaatttaaaacgagaatagtattatgaaagatttagtagcaagaattaacgctgaaatggaaaacttcaaaacagaatcagaggcacttgttgaaaaaggagtaaaagcagctggagctagagctcgcaaatcaagcttagtaatagaaaaattagtaaaagaattcagaaaagtttctattgaagaatctaagaaataattatttttaatggaacctaaaaatggggttttacaccccattttttcaagcttcaatgcatcaacgattcaacctttaaccccccttaaacaatttaaacctacatctgacttctgcttctgccttctcactaaattaaacctttaaaccaccttaaattttaaaccatttaaactacatctcatttctctcgtcttctgaataatgatttgattatggcgaatattcggttatgtattacagttattacttatacgtactaaatatccttttcttgttttactttcaaatattaggaaaagattgttctgtaaataaaacagtaacaagctaacttaaatgaccttgatgttagtgtaatttttttgaaaaaaatcaaaaagtaaattttaaaattaagctagtaaaactaccctgatggcctacctaattgaataaacataatatgataaaaaacttttttctttcactttttctagttccactagttattacggctcaaaatataactgattttaataatgattcagctggtaatcgagtcttggggcagatttgtataagttgctcggctaaaaacataaaaccttttaatgaactaaaacaggaggatttgcaagtaatagataaaatctcgttctatactaatccggtctctcaagaattatatcttacatggaaaatagaggaggacaaaaaagtagagcagattcaattgctatcatcgggaggtaacgctatggtaacctttatgcgtattagtaattggcttacgatgagatttcagggatatccaagcggtcattattttatagtctttacctatagtaatggtgataacaaaacaatcaaaattgtaaagaagtagtgcgaggtaacacaattttattggagttagatggtataagatataaaaacttcctatcctttttaatttcctttcaaagttttgttgttggtatttatgatttaggtattagattttagtcattaggtttttataaatttgagattactattcacttctcacattttcaaattttaaattctcccaatttatccacaagcttcatgacagtatgcccatgaagaaacacttaactataaacaatcttaacccaccacaacctatacctcacaacaattcaacgattaaacttttaaacaactttaaactttaaaccatttaaagctaatacctcacaacaattaaacgattcaacaagtaaggataaagaggaagatatttattgattcaatggaattggatttcttttacttcactaataggaacgactctaacgcttttgatagaatcgttatacacaaaaatataatctgtaaccctgccaataaaatagtctttgtgatttatagtagtatcttgttgtaaggcataggttttatcgtttaggacaattgtaaaattaggtttattttttttaacaatagcagcttctagatatgctagcttgatcgtgtaggcaaagtacaagaaaattaacgcatagtaagttattcgactttgtttttgcataatagcaactccaaaaagtaagaaactcgatataagtaatatataaaaatctgtcagctttgtagttaacaaataagaaagtaagactgtaaataggaacaaaccagataggagaatatttggctttatttttaataattgtgtggtcttgaaatttaatactaattgaataaacaaaaagccaatcaaaatagagaatgttaacagttttatattgttagaataaaaaacatatacaaaatcaatagggttaaaatataaaaaatatgaaataccaaaatttaaataataatggcataaatacagattaccatgaataggaataataacaataaaagattttagtaattcatcaagagaaagattgttatttataggttcatcattataaaaccattgttttatagtgtcttttaaattaaggaaaaaccgttttgttgggtttactttatcgtccataattacactttaattttttttaatttgtttgagttaaattaatttgaagagaataagaaaaaaatattgctctaaatattgaaattgtgaattttaaagttgcttggctacaaaaaaacataccaaatatagtttttttgtagtttttgagtttgtatgttctttacgttattcatagcaaaaaaaacaattcgagttcatgtaacatcttaaatacctcatgactcatgtcgtttacaacagtttaaaaattaaacaattaggatttaagatttaggaattgggtattgggatttggaattcaggattttggaattcaggaatttggaatgtaagattcaacaatcacctgattcaacaataaacctttaaaccaccttaaaccttaaaccatttaaacctactgaacgcatctcacttctaccttctcacgaaagtaaacctttaaacaaccttaaaccttaaacaactttaaacaatttaaacccccttaaaccttaaaccatttaaacctactgaacgcatctcacttctaccttctcacgaaagtaaacctttaaacaaccttaaaccttaaacaactttaaacaatttaaaccccc

SEQ ID NO: 1758 - DNA, 12722 bp, synthetic construct
  misc_feature 1..12722: note = Synthetic
  source 1..12722: mol_type = other DNA
ctttaccatacaatacaactaccggatcaactccgtcaagcttgaagcgccctacaatccccgtcccatttccatggcaaagcttgcacaggagactgtaccagccgtgcagaataactacatcatgacggccatcggtaatccatggtcgcccttgcttgaggcaagctttaacagcggacggtcgggcaatagcagctggggttttctgttccggcacacttcggcccagggttcggtacccctgcaaaactcatctacacgcatcgatgctccatggaaaaatacgctggccgcttttcagggtaaatatctgaccaaaaagaccgcttggcagacccgactaagttaccagtccaatacctaccaatactacggaatcgatccggtggccgctccgttatacgatgccgataccttcagacaacacctgcagtccggctgggcttctctcagcctatcttcccttaatcccgacagcaaccgattgctgtacgacggaggattacagtaccgtttcatggccgatcgttacgattatatggaaaatcaagtcacactcaatgcccgggtgggaaagatgcttactgctttttacggtgggatcgaatttaataatcgatacctcggcgctgccggcgaaaacgattcctcgtatgtcaacctctttaccctgcgtccttttgccgaaaaatcgggcaaagaatggaaaatatcgggcgggttgaatatcacctccgacaaacatttcggtgggactaccctgtatgtctttccttttgccagcttcgactttgtggtggtaccacgggtaatgaaaatcaacctgatatacgacggttatgtcgtgtccaacagctataaccaacttcttgaggaaaatctgtacatccgccccggtaccttcggcaaaagcacaagctgcaacagtgccatcggtgctacccttgctggcatccttaacgacgaaattcattatagcctcagcggtagatatgaaaatgtgaaaaatcaggtattttttgtcaatgcggtggattcgcctttttacaactggtttgtgcccgtgtacgacgatgtggaggtaatgaagatggctgccagttttagctttaaaatcagttcaaaagcacagctaaaccttatggctcaataccagcattttgacttactacggcagaaaaaaccatggggcttgccggcgatcacggccagcagcgcactggtatataatatccgtaataaaataatctctaccacacaactgtattttgtgggtacacgttatgcgcagaagcctgtcaccgaggctactgtaactctaaaaccttttgtcaacctgaatgaaaaaatcgaatatcgatataccgataaattttccttatatttggagttgaaaaatattacggcctcgaagtatgcctattggaaccagtataccagctatcgttttcaggcattcctgggggcaatgttcttgttctaatgaattaatttattcaacaatcattttataattacggatgaggggacgcaaaaacagaacctggttgtggatgggattactgtgtttggggatattgtgtggtacgctggaatacatgtatcgttatacccaacgccggacaatggcttatatttattccagcgtgcagagcattcctgcaaataaggtcgccattgttctgggtaccagcaagtatacaaaaaacaaaacacctaatccctacttttacaagcgcatagcagcagccgagctgctttaccgggcaggcaaagtacattacctgatcgttagtggcgacaatcttcaccgttcgtacaacgaaccgatgatgatgaaaagggagctcaaccgaaggggaatacccgatagcgtcatctttctcgattatgccgggttgcgtaccttcgattcggtaatcaggggatataaaatttttggccagaggagttacattattgtctcccagcgttttcagcttgagagggcggtatatattgctcaccgctttggcataggagccattggatttgaagccgatggggtagacgaaccctcgcactggcttatggttgtgcgcgaatattttgcccgcgcattgatgtactgggatatcttcacaaaccgccaaccccgttttctgggaccagcagtcgaaattccctgagtttatccctttttctgccggttgactatggtccgtacaaagtcaacgaacaaggggtgtggcgctaaaaccgtactctgatattcggggtgaaactgtacccccacaaaccacggatgcgaaggtatttcaactatttctaccaaattgctatcggggttaatgcccacagcatgcatgccggctttttcaaaatcagacaggtattcgttgttgaactcaaaccggtgccgatgacgttcggagatatgcgtggttccataagccttatgggcacggctgcctttttttattacgcacggatatgcgcccagtcgcattgttccgcctttttcggttacccctttctggctttccatcaggtcaatcaccggatgttcggtacttcgtaccatctcggtcgaatgtgcatcggcccaacctatcacgttacgggcaaactcgatgaccgcacattgcatccccagacagataccaaaaaaaggtatctgatgctcacgcgcatattttaccgacaaaatttttccttctatcccccggtcgccaaagcccggtgctactattatgccttccatgcctcccagtaggctgtcgatggtctgatcggtaatcttttccgaatgtatacatgtaaggtctaccttgcaatcatttactgcaccagcatgctgcaacgactcaattatggatttgtaggagtctttcaattcaacatacttgcccaccagcgctactcgtacgcaatgtttgggatttttcagcttatcgagaaactcgatccatttggccaaatcgggttcttggccttccttgaggttgagctttctgaggacagtaagatcgagtttttccttgagcatcatcaggggtacttcgtagatggtactcacatcgatcgattgcactactgcatcgagctctacattgcaaaacagagcaactttcttgcgtatgtcttgagtgagttcgtgttcggtccgcaacaccaaaatatcgggctgaatcccgttttcgagcaaaattttaacgctgtgctgcgtaggtttggtttttagttcgcccgaggccgaaagatagggcaccagcgtcagatggatgacaagggcattggtcggtcccagctcccacttcagctgacgaacagcttcgatatagggcaatgattctatgtcgcccacggtaccgcctatttcggtgataacgacatcatacttaaaacgcgaccccagcagttttatcctgcgcttgatttcatcggtaatgtgtgggatgacctgtacggttttgcccagataatcaccgcgccgctccttagtgatgaccgtttgataaatttttccggtagtaacgttattggcctgtgaagtaggaactcccaaaaaacgttcgtagtgacccaagtccaggtcggtctctgccccgtcgttggtgacatagcattcgccatgctcatagggattgagcgtccccgggtctacattgatgtaaggatcgagtttctgaatggttaccgaataaccccgcgactgaagcagtttggccagtgatgctgagatgattcccttgcccaacgacgaggttacccctcccgtgacaaaaatatacttcgtattgcttgcccctgtactcatgatgatcgatctttgccttttaatcgtttaccatgttctcgatgatgcgaattttctcctcaagtacttttatctcttccttggcactatcgattttttgctgaacttcccggatcatggcctcggcattcttggttttggcaaaaaatccaatattattttcccacagcacaatatcgctttcgagctttttcagacgggaaatgagccggtcgcgttcacggttaagctgcgactcactttttctttgcgccacctgttcaatcttcgatttaaacttctcgatccgacgcttgccatcatccatccgtagtccttcgaacagacggtcgatagccttcttgtaacgctgttgaacctcttgtttgtttttaaggggaacaaatcctatttcggaccaccggcgctgaaattcctttagcttgttaaaattgacttcggcatcgctatcgaactgatagttttcgatttcttcgatcaaggccagcttggctttgagattatcctcgtattttgaatcaatctgcgcaaaataggcagccttgttgttgaaaaacgtgtcgcaggcggcacgaaaacgcttccatatctgatcgctgtacttgcgtggaacaggccctatttccttccagcgtttctgaatgttgataagatcctcggtggtctttttccattcggtactgtctttcagagcctcggcctgaacgcacagatcgagcttgagttgcagattgttgttctgttcttccttaatcttgttgtaataagcccgtttatgggcaaaaaattcatcacaggccttgcggaaacgctcgtatattttgttgttatcctttttgggagcaaaaccaatagtacgccataccttttgaatctctacaatctcctgggtgcgttcttcccactccttcatgtgctggggcagattctgcaacatggcttctaccttctcgcagagcacagtcttggcttccagatttttcaactgcgaagccttaaggttgtcgtagtactcctgatgacgtttgttgatttttgcagttatttccttaaaccggttccatatttcggcacggttttcgacgggtacgggaccaatttcgcgccacttgttgtgatattcttgcagcattttaaaggccttgacagccgaaggttcgagcagcaatgcctcggcctgctcgcatagctcgatcttggcctccaaattctttttcaggtctaaatcgcgtagctctttgttgatctttatgtagtcgtaaaatttttcgacatagtaattataactttcccacagattgctgacctcgtgttggggcaccggacctaccgaacgccattgtttctgcagctctctgaactggtggaaggtttcgttgagcgactcggtagtgttggtaagagccttgatttgttcaataatctcacgcttgatgcgtaggttctccatcttctcggcctcggccttacgggtatattcggccttagcctccttgtattccttcagaagggctttcagcttttcttccagtccgtcgggctggggtttgaagtcttcggggttacccccttcgtcgagaaattgcttgcgtaaacgctcaagttccgacttgtgttttttgtaaaattgtatttttatgttttcgatatcgacacggatggcttcgacctgaccctcttttaccagcttttcggctgtggctaccagttcttctttcgaaagctggctgtagtcggtggcttcgcgcagagtttcctcgtcaatttcttcatcggccagttcctcgggcaccgccacatcttcgggcagtatcacatgttcgtgggcatactggggctcgtcctcttccatagcaatagtggcttcggtagccacttcttcaccggccggtaataccgttggggcttcctgcgtatgaccggccattgcttctgcattgccggtttgttctttctgaacagtattcacatgggtaggttccatacactaaatattgtattttttgaaggtacgaaaatagatatttagcccttaattctcaaaggttttttaaaaaaagtgcactctcatctgccgtgatatcggaaaacgtgaaaggcctgcaatcgtggagcgcttttggggacgccggtgggttcctccggccgatctgtaagcacacgaggcatgagtagtggagctggcgggattcgaacccgcgtccaaacaagaaacagaaacgctttctacatgcttagccaattcttgattttcgtgcggaaactggcaattggcagcctatttccgccttagtcctgcaattctgaccgacccgtcaggacaccaggccggcgagcccaaactcacgagcgccgcttgaccaacgagcgtcgggcttgctcattgagcgacgtcttgtcccctgcaccttggcaagggataagcccatctactatacttcgattaggctgcaagagcgtagttatattcgccttttattctttgcaaccctggttaaggccgttgttgcctgggcctgcatgcttacatttccatttgccttgctgtcaaaaccagtcagccccgcattggttatttctctgcaaatctcgtgcaaagatacaacaaatcaaagaacaatttgcatccctcccccaaaacttcgccccaactacacccttcagacttaccttattgctaactgcctttactcccaattccccatagcacaacccctaccaacgacatctctgtacaatatgctcatatacaatcagttgataaaaaataaaatttttttatcaaaaaatttttaaacgacagaacctgtcgttttggcggggtagttttggggggtgaaatgttcaaacacaattatctaacctacattaatgttcacacaaatagtcattaacttaaaaattaaaattatgaaaaaaataggattatttatggttatgttgttaattgtcggttgtggcatacaacacacgggaattgtcaataatactcagagtattacaactatcaatctttcgggtaacaattacagaataatcgataagataagcgcaaaagcaacagcaacttatattatgggcattgggggactaagaaataaggctttgattgaaaaggcgaaagcaggtttatacgaaaaagccaaccttacagggagtgcccgggctattgcctacatagcatatgatacccattattcttttatttttccgttttattaccgggtaacggttactgcgtcggggtttgtccttgagtataaataatataaatgattttatactgtttataattttaggaaggtgttcgttgctgttatagccttttgccttcctaaaattttatagtatgcacatagaactattgaaaagaattttatatttttataacaaaaaaggcgagtcaccccgccttagatgttttcacaacggaataatccttattgtgaattgcttacaattgtgttacaaagttataaaatattttttaaaaacaaaatcttatgagcggaaaaaaaattttaggtcttgatttaggaactaattctattggttgggcgcttattgaagtggccaataatgaaagaaaaattattgccatgggaacccggataattcccttgtccactgatgaaaaagacgagtttgatagcggaaatagcatttctaagaatcagaaacgacgccaacgaagagcccagcgacgaggatacgatcgctatcaattgcgacgaaaagctctaacagaagtattgatgcaaaataaaatgtttgacccacagctatttaatttagataaactcactttatggggtataagggcaaaggcttgtactgaaaaaattgaattaactgaacttgggagaatactgtatcatcttaatcaaaaaagagggtataaaagtgtttccaaaaatgaaaacaaaaaggaaacagagtatgtgagtgaagtaaaaaatcgataccaattacttaaagaatcaaatttaactataggtcagaaattttatcaggagttaagtgctaatcctttttaccggataaaagaacaggtatttccccgtgaagcatacatggaagaatacgataaaataatggcttgtcagaaacaattttatcccgaaatattgaccgatgaacttataactaaaatcagggatgaaattatatactatcagcgcggacttaaatcacagaaagatttggtaagcgtttgtgattttgagggtaagtggataaagcataacaataaagagatttttattggacccaaagtagcccctcgtacctcgcctttattccaggtagctaagatttgggagactattaataatcttgagattaaaaataagaagggcgacaagcttttcctaactattgagcaaaaacaaaagatttttgaatatctcgataataatgaaaaattaacacagacagaactttttaaaattctgggaataaaaaaagaagaaggatggtacggatctcggcaactgacaaatggactgcaaggtaatattactaaaacaaagattttaaagattctgaataatcataaagaatatgcacatttaatccgttttgcactgaacatcgatgaaaatgaacaaaaaacatatctttatgacagaaaaacaggggaagtgttagacgaaagacctcaaaaagttattaatgcttcatttgagaaagaacctttctaccagctttggcataccatttattcaattaaggacgaaaaagagtgcgctgaagctttagttaaacgttttgcgatagatgaaaatactgcttttgagttagcagcgattgattttgttacccccggttttggaaataagtcggcacgggctatccgaaaaatattgccatatttaatggaaggatataaatattccgatgcatgtcagttagctggttataatcattctttctcccttaccaatagcgaaatttatcaaaaacagctaaaagataagttagagttgttgcccaaaaatagccttcgacaaccggtagttgaaaaaatattgaatcagttaattaatttaattaatgccattatcgacgaaaaacaaggttgggtaacgcgtgaagaaagacttaataatcagtttgaaataagaattgaattagcacgtgaactcaagcaaagtaaagatgaacgatatgaaacatacattagacaaaggcgaagagaacgtgaaaatgctgaaatagtcaaagaactcgaaacatcatatggactgagaccaacccgtaacaatattatcaagtggagattattccatgaaataaacaacgaggataaaaaaattaatgcagtttgcctatattgtggtaagacttttggaattaatgatgcgctcagtggcgaaatggtagatgtcgatcatattatccctcgaacacttttctttgatgattcgcaaaacaacaaaattttggttcaccgggcatgcaatgccagcaaaggcaatcttacggcatacgattttatgaaattaaagggagaacaagcctttaaggagtataccgaccgtgtcgaatttttacataatcaaaaaataatctcaaaagtaaaacgagataggcttttaactccggggaatgaaatccctgatgattttattgaaagacagttgagggaaacacaatatatttcaagaaaatcacgtgaaattttaaatcagatttgttataatgtttggagtaccagtggtggtgttactgaaaaacttcgtaagttatggggatgggacgatatattgatgcaactgcaattgcctaagtatcgcgagttgggcttgaccgaggaaattgtaatagaaaattccgatggaacgctacaaaagaaagaggtaattaagggttggaccaaacgaaatgaccagcggcaccatgctatcgatgcccttactatagcatgcactgaacagggatttattcagcgcattaatactttatcctctgagaaaacacgcaatgagctttacaacgaggtaaaggatataaaatttaacgaaaaacttaccttgctcgaaaaatacctaattgctcaacgaccgtttactacggaatatgttaaggataaagtttcccagatacttgtttcctataaatccggtaagagagtggccacaaagggcagacgaattattcaaataaatgacagaaaaattgtggcacaggataatatactggttccaagaggccccctttctgaagagtcagtttatgggagaataaaaataatagaaaaagataaacctatttcctacttattcgaaaatccccatttaattgtagaccttcggataaaagaactggttgaaactcgtctgcagcaatatcagaatgatgtaaagcaagctctcaaatctgtcaaaaaggaacctatttttatcgatgatgaaaaaagtaaagtcttggaaaaggcccattgttatgtagaaaaatacgttattaaatatcctgttgaatccattaaacaaaaagaggttgacgacattgtagacgaaaaaataagacaaattattaggcaacgttttctgtcggtttctaaagaatctgacgcatttaaggaacctgtgtattttgacgagcagaaaaaaattcccattcgttcggtgcgaatgtttacaggtttaacttctgttgaacccatacgttgggacgaaaacaataatcctattgcatttgtaaaaccaggaaacaatcaccacattgccatttatatggatgaaaatggaaattatcaggaacatgcttgtactttttggcatgcagtagaacggaaaaaatacggttttcctgtaatcattgaaaatactgcagaaatatggaataggatacttgccaaccctgacaaatatcccaccagttttgtagaaaaacttcctgccgacaaactgcagttggtttatagcatgcagcaaaacgaaatgtttataatgggcatgcaatcagatgattttcatatggcgctacaaaaaaaggattatagactgttaagcaaccatttatatagggtacaaaaactttctgcttcgtattatgtatttaggcatcatcttgaaaccgaaatcgatgacagcaaggaagctttaactagtaaaagatatataagaattcaaagtttgaaagcttattttgaatataatccttataaagtaaggataaattaccttggacagattgtgatataaacctcaataagtaatcagcttgattaagcgaacaatctacataggaagttctgcatacttgtgttgtcggaacgatcagcttgagtacgaggtccccgaggccaaaatgcttggggaaaacgaccggatacggcatgtacctatcgaagatattggggtgattattcttgataatacccgtattaccatcacccatcatttaattcataaattattagagaataatgtggcgtttattgtgtgcgacgataagcatatgcctgttggtctgatgctgaatcttgaagggaatactctgcagcaggagcgattcgagagccagataaatgcctcattgccgcttaaaaaacaactatgggcacaaaccatttcggccaaaattcgtaatcaggctcaaaatttaaaagagataggcgtcaatattgaaaatatgctgtattgggccaattctgtgaaatcgggcgacagtacaaactacgaggcccgtgctgcagcctattattggaaaaatattttcccctctattcccgattttatacgtcatcgtgagggcggatatcctaacaaactaatcaattatgcctatgctattttaagagcggtatcggcccggtcgcttgtgggggcgggattgttgcccacccttggcatacatcatcacaatcgttacaatgcttattgcttggccgatgatataatggaaccctatcggcctattgttgaccgtcttgtgattcaggcaattaatcagtaccctgggtgcgaagaacttacccctgaactgaaacggctgtttctttcggtgccggtaatagatgttactatacaaaacgaaaaaagtcccctaatgattgcaatgcaacagactgcggcttcgctggtaaaatgttttgagggagaggctaaaaaaatattatttcctaccctataggtactgcgcatgcaaaatcgtctaaatgcttatcgaataatgtgggtaatggttttttttgatttaccaaccgaaaccccaagggagaggaaggctgctgccttgtttcgaaaaaatctgcaaaaagatggttttagtatgtttcaatattcgatttatgtgcggcattgtgcgagtcgcgaaaatgcagaggtgcatgtacgtagggttaagtcgtttttacccgatacgggattcgtagtaatattttgtattaccgataagcaatttgcctctatggagttattcaataagagtaagccgatacggggtccacaggatccgcttcaactggagctctggtaatattatgcgctatggtaaaacaaaaaaaacctcacttgtgaggttttttttgtaattgaatgcagtttttttgtttttattttccgtattaaaatattgaataacagcatcttgatcctacctgtgctgcattcaatatttcaaagatacaaattgtaagcaattcacaacctcttccgttaacttccaattcatgttcgtgctgcattcaatatttcaaagatacaaattgtaagcaattcacaaccccgttttattgataattatcacgcacatagctgcattcaatatttcaaagatacaaattgtaagcaattcacaacttgtccgagaacatcgtttttaaagtaatagctgcattcaatatttcaaagatacaaattgtaagcaattcacaaccgattaccttctcgtcaacgacgccgaatggctgcat

SEQ ID NO: 1759 - DNA, 12147 bp, synthetic construct
  source 1..12147: mol_type = other DNA
  misc_feature 1..12147: note = Synthetic
tccttggaatacaattcgaagattacacataaaaatgagcattttcatttattgatatcatactcccaacactatattagcatcaatatttaacttcctactaatctcacgggcaacttttaaggttggctcacatttcccggagatatagtcactaaggcgtgaaggactcaccccgattagtttggaaagagatttctgattaaggcccatttcaaacatgcggagtttgaggacatccaccaaagatggttcacccagagcgaaatgttcctctgaataatcagcaactaagttagaaagaagctccaactcgatgctgttcgagtcattcaaaggggtttcgtctgtcacaagcggaagaagttcctctactcttttgagtgcccattcatattgggcttgattttctatctttgtcataactttaaatattagaacaatctatcttatcatattctttgtgagtaccaataaagcgaatatatacgaactttactgtaaatttaataacaactaccaaacggtaattattcccctttatattgaaaacatagtgctggttacctacactatccacgctattaaatgttttcttcacatcagcaaaacaagtccacttgctttgttttattatcatagcccactcttgtaaagctaccttcacatccgggtgactctctgcgtactcttgtagtgcttgttcggtaaatattctcatcagttactcaattatcatgtcgcaaagataatgtttgtgttctgattttcaaaataaaattttgattttcataattttaattatgaaaatagctgcttaaatggttgcttgttaaaatgttatttgtactttttacatagtaagcatgcgtgttgactaaattttcggcggttatacggtatttttattgcttaatcgttgaaggtgtttttataccgttcgtagatattgtgatttgctgtaattattaatttgtatcattaaaaaagcagccatttgttttcttggaggtaggaagatctttaaaaacagatgatgatttgttcctcgttaccgtatctcagttagaatgcatcttagaaacaaaacagattgagctggtaaaattataagcgagatgggcagatgaccaaaagctaatttttaggatatatgagtccactttaaaaagtgtattttagcacttttactcccattcagaagcgtctgcaggacgttaatttttggtaaaaaggactttttaaagtggactcatatatcaatacctaaaatgtactaatttgagagcgaatcacaaccataaaatctataggtaataaaaaataggttacttctaatgattcattgtcaggatagctgcaaataataaaaaagaatgagtttttcgtttttaaatattttcgctgtcggagaatgattcttatcatgattagaactaattgattgcacgaaattgaatcaaaagattggaaaaagaatgtttttaacagaaaaaatgtatagatttgaggaaaatatatgtaatgaaaaagatattaggattagacttgggagtcgcttctattgggtgggcccttgttgaagaaggggatagcattgtaacaattgtagcattaggaagtcgtattattccttatgatagtaccgaaggacaagattttgtcaaaggaacaggtgagagtcgtaatgcacaacgaacgaaagcgcgtacgattagaaaaggttatgatcgttatcagttaagacgaaaatttcttgttgaaatgcttgttaaaaataagatgatgcccgatgaggcacttaaaaacgctcccaaaatgcacctttgggaattacgcagtaaagctgtgactgagaatatatctaagcaagaattgggacgtctattgctttggttcaatcaaaagcgtggttataaaagtggtcggagagacataaatttagataagaaggacactgattatgttaaagaggtaaagagtcgctttgataagattaaagatttgaaagttacaatagggcagtatttttatgaagaattgaaaaaaaatgaatattttcgggtaaaggagaatgtttttccgcgtgaggcgtatatggaggagtttgatgttatttgtgcaagacaaaaggagcatttggggttaacggatgaacttatttctaagattcgtaatgaaattatttattatcagcgtccgttgaaatcgcaaaaaggattggtagctatatgtgagtttgaaggtttttgggtaaaaaaagatggaaaggagttttttgtaggtccaaaagttgctcccaaaagctctcctctgtttcaactatccaaaatgtgggaaaatataaacaatattaagttgagttctaagtttggtgaaatagtagaattaactcaggaagaaaaacagaaagtatttgaacatctggataataacgagaagttgacagcaacagatttatttaggattttaaagaaaagtaaaagggaatacacaattacgaagcagttagaaaaaggaattcaaggaaatattaccaaaaatgccataacgaaaatcttggataaaaatggaaagtataaagatttgctgcggtttgatttaaatacagttgagacggataaactttgctatttgtatgcaagggatacaggtgagattttaggtgaaaagagattgaaatatactgatgccgtggtcgaatatgaaccattttatcagttatggcatacgatttattccattgatgatctgcaagaatgtagtgctgctttacaaaagcgtttcgggatagatgtcgaaacagcagataaacttgctgccatagattttaataaatatgcttttggaaataaatcggttaaagctattcgtaagatattgccgtatttgatggagggagataggtacagcgaagcaatgagttatgctggctataatcattccaactctttgactaaagacgaaaacttcgatcgcaaattacttgataaactaaaaccgatagataagaattcattacgtcaaccaatagtagaaaaaatcttgaatcaaatgattcatgtagtaaatgccgttattgatgaatatgggagacctgatgaaatacgtattgaattggcacgggaattaaaacaaggaaaagaagaacgtaatgatgctgacaaggcaatgagcaaacgtcagcgtgaaaatgaaaatataaaaaaacgtcttgcggaatatggtttgcgagctaccagaaataatattattaaatggcgtttatatgaagaaattaataatcaggataaaaaactcaatgcgatttgtatttattgcgggcaaccaatttcggttacagaagcaataaaaggagaagatgttgatgtagagcatatcattccgaaggctaaactttttgatgattcacaaagtaataaaacacttgcgcaccgtcattgtaactctaataaaagagatatgacagcttacgattttatgaaaacaaaaacacagcaagaatttagtgcttacgttgagagagtaaataaactatttgccgataaaataataagtaagactaaacgggataaattgttgatgtcggaagataaaatacccagtgattttattgatcgtcaattacgtgaaagtcaatacatcgcaaaaaaagcgagagaaattttgcaaactatttgttataatgtttggagcacaaccggaacaataacagcagaactacgtcatttatggggatgggatgatgttatcatgaatcttcaaatgcccaaatataaagatttagggctgacgaaaattgtggaatgggtaagcgaacatggtaaaaggatacattcaaaagaagttatcacggactggaccaagcgtgacgatcaccgacatcatgctgttgatgcacttaccattgcttgtacaaaacaaatattcattcaacgtttcaatacgttgagtgcaagcaagacgcgtgaagatatgcaatgggaaatagaaaaacgatccaaacagtataaagaaaagctttcgttattagagaaatatattatatcgcaatgtccgattgctgtaagtgatgtggaaaaggctgtagctgaggttttggtttcttttaagtcaggcaaaaaagtagctgttataggaaaacgaaaggttgggaagcggggaaataaacaagtagtacaaaagggtattgttgtgccacgaggagcgttaagtgaagcaagtgtttatgggaaaatcaggatgattgagaaaaataagtctgtaaagtatttgtttgaaaattcatccttgatttttaaaccatatattaaaaaattagtagagcaacgtttggcgaaatttgagggagactcaaaaaaagcacttgcttcactcaaaaaagaacctatttatttagatgcggaaaggtctaaaatattggagtatggtacttgtttcaaggaagaagttgtgataaagtattctgtcgatacgaattttaacaaaacagacgatgtaattgatggaaaaacgagagagattcttcaaaatcgattgaataaattcggaggaaagcccaaggaagcttttaaggacgtgcaaagaggtgagaaaaccttgaaatggtatgaagatgaggagttggaacacccgattcattcagttcgttgttctacagggcttgttgctgttgttcctgtaagaaaagacgagaacggtaatgaaataggatttgtgaaaccgggaaacaatcatcatgttgccatttatgtcgataaagaaggaaataggttggagactgtttgtactttttggcatgctgtggaacgtaaaaagtacggttttcctactattattaaaaataccaatgaagtttgggataaagttacatcgatgaaagatgatacttatcctcaaagtttcttagatcaacttccttcgtataatttggaattggagttaagtatgcagcaaaatgagatgtttatcttggagatggaagaagatgatataaaaattgctattgaaagtcgtgattatagaacaattagcgaacatctgtatagagtgcagaaattagggagtaatgattatactttcagacatcatcttgaaaccaatttaattaatagtgacatttcgaaaatgagtaaaaggtattttcgcgtacaaagtttgaaaactttattttcgctcaagccatttaaagtgaaaattgattatctgggaaatatcaggactttacagtgaccatgttttgaagcaaaaatcccgttcttatacgggggggggcagatacggtatttataaaggtatacaattgacgggtagcatgatatagtgagaaaatcgcacgtctgattttaacattgttaatccagttttcggcatatcgtttctttcatcgcaaaacattaatttctttacctgtaaagaagcgtattcttaccgacaagaatacgtatttaacacagtattaaaagcgtattcttacaggctaagaatatcagtttaattgtttattaaataaatgattaattctttgatatacagtgattagtaccatttgtatttgtctcccggtattgaatatcccctattggttcgaaaaatgactctttcctgtacttgtcaaattagcaacttcagttgtaccaagttgcttttatcattacttataaaagtttctcatatgccatgcggcttcctctttgatataatatttcaccacaataactgaatcctaacttttctaacattctgtgcatatagaaattatcaaaattggtatctactttgaaactatgaatgccttgactgcggctcagctcttctactttctgcatgaatagagaggcgattcctttttgtttcatttcatcggcaacggccagccgatgaacaactacataaggttgtttgcttaaccagctaccgtcaatggaattgtaggcaggctccccgtcaaagactactgcggcataagctatgatattggcttcactgcacaatacataggcataaccgttacgaatgtcattggctatattttccggtaaaggatacgtttcgtcccattgctgtttattttgccgaagcatttgtgctttggcttgcaagatgatttcccatattctggcagcatcttcggtggttgcttttcgaaatgtcagttgcatattgttttataaataatgtcttactgtgataattctttgaaatgaaaaagtcttgttgcaaaaataggaaaaaagaaaggaatcttaccctataatagtaaaaatagcacctgcacttgccgataatttaagcaggcaggcacaggtgttgtttgaggaattttaaaaaaagttttaagtttcctgtttaatcgaatgtgaataattgattcaggacttcgctcatactcggatgcgtgaaaataaaatcacgcaggaagctgtaatgttgtccggacttcatggctacattgacgatattgatcatttccgatgcatctgcacagaataaagtacatcccatgatttttccggtgtgcgcatcgacgattgccttcagcatgccatctaccttttgtaatgtgcgggcacgcgctacggctgttgccggtaaacgggatactttgaatgaataacctttttttatggcttcctcttccgtgagaccgacgtgtgccaaaggaggatctatgaatacagagtaagcaatcggagcgcgatcttccgttgtccgttctttgtcaccgaatagcttgttacgaataatccggtaatcgtccaaagagacataagtaaattgcgggcctcctttcacatctcccatcgcccatatatgcggagtggtagtatgcagatgtacatctgtgatgattgccccttgtgaatcgacttgtacgcctgctgcttgaagatttaatccgtcgatcatcggtttacgtcctgttgccaataatatggcatctccatctataaaataaggagtaccgtccgaagcgtccgtataggccagcgtaacgccgtcggctgtgtcatgaatcgattgtgcgcgggcattcaagcggatttcaataccttttctttccagaacctcccgtacactgttggcgatatcccggtcttcacgcggcatgaagagcctgcctccttccaggatggttactttacttccgaattcggcatacatagatgcgaattcaagtccgatatatccaccgcctacaataatgaggtgttggggaagtacttccatatccagtaaggttgaactggtatacacccgcttactatcacggataccgtcgatggcggggataatactcgtagaaccggtattgatgaaaatttcttttccttgcaattctatttcttcatcggggagtgttacttttactgtgtcaggacatataaaggaagcagttccggtatagatcgttacgttcggacggttggccaggtcatcgaaattcttgtcacgcaggaatgaggttaatttgtctttacgggcaatggctaatttataaaagttactttgctttttgtaatccccctgatacataattccggatatttctgcttcgtgtatcaaagctttggttggtatacaagctacatttatacacgtaccgccatacattttgtcagagcgctctatcagggctattttccagccacgattggccagttcggcagctaatgtctttccacctttgccgaaacctataataattgcatcatattgtttcataattcttgtctttttaagaggttattatttagaacataacatttggaagatggcatttgtttcgattgttgaatgagaacggtgagtgtgattgaagtcagttcgatgaataaaaggtatttttaaccataataaattaaattcattaaataactgtgtatcaataagaattgtttgtgtaagcatttaagatgcgaagtaacggtgaaacgtagatgtgaaatgataattgtatggttaaaataatatacaatatttgtagattgtaatgtcttggtttatagtatgttatataaaggtgttttttctcgtagaggggccggttgaaactcgtagagaaaccactcgttcctcgtagagaaaagatgtgtttctctacgagaaaatgatgggaactttataaaaagttacaatatgtgtgggttcgacgtaaaagagaagccttttattgtatgatttgttgaatatctataaatcgtttccgacttctttatttgtgtaatttctattctactatttttcttgtttttcagcttcattacggaattgaacggtgctttgtccggtcatattcttaaaaaagcgactgaatgaagactgatcttcaaaacctaacagatcggctatttctttggaactctttgtgctgtataataagagacgtttagcttcagcctctatccgttcatgaatgacacggagtggggaggggagtttgcaagttgaaaaaatattcgatagtgttttcggggatttatgcagcatatccgcgtaatcctgcacttgtttcttttcccgataatgggtatctaccaaaataaagaactggcggataatttcgaaactatactctttttcctgagtaatattcaatcgatggcgtgcaatgcgtgtactttgaataatgaaacgtttcaattgtatacgaagcatttcctcctgcaaattgtctgtgacagaaaactctttactgagagtatcggcaatgtcattcagggttttctgttccgcttcgtccaatgtgaaacgtatcacatgcgaagaaccgttgaataagaatccactacaagatacttcgtggtcattgccataaatacagtaaaagttgctgttgaacagcaaagtcagatagtctccgtcaatagatttaaattccagatgctgcaagttggaaagggagattatctcattttttgcaagcattatttcctggtggtctatttccagcgttatgcttccgcttcttacccagataaatttgtaaaggctcttttccttttgcagagctttgtctgcgtgataagaatcggtaagaacgagcttaccttttaatttggtattgaattgttgagtcatcatactttcattgctgaggcgtcaaatgaaagaggcaacagtatgccgatactttttacctcataaatggcttttttcccataaagaagaatgcgaatgggttgttggtaacgtttttcagtttccagtatcacctgtcggcaagctccgcacggtgggatcgggagatcaataaaatctttttccgttcgggcggcaatggcaagcgtagttaccggctgatccggatattgtgagttggcatagaacaaagtagtgcgttcggcgcacaatcctgatggataagcggcgttttcctgattggttccggtcactacggtgccattggcaagaagagcggcggcacctacggaaaacttggaataaggagcatagctacggccggttgcctccatggcagccgtcatcagagcctgatccgttttattaagttcatcaaactcatatactttgatagtgctggtaatcgtcaggtctttcatctttatcaagggtttttgttctacaattaatgttacaaagttaggaaagagattgataatcccaattatttttcacatttttgtggcatttaactcacattatctatttataaaatggacaaaagacttctcagacttatcgtagtgactattgtgcttgtttgctctgtgggtgcacaggctcaacgccggaattcacgttatgtggcttatatcgataaatacaaggatcttgccatagagcagatgaaagaacacaagattcctgccagcatcacgttggcacaagggttgctcgagagtggtgccggaatgagtgaattggcacgtaagagtaacaatcattttggtatcaagtgtgggggaagttggaaaggccgtacggtgcgacacgacgatgatgcccgtcaggaatgttttcgtgcttacaaaaatccgagggattcttatgaagatcattctacgtttcttacccggggggctcgttatgcctttctttttaaactcgacataaccgattataaagggtgggcacgcggattgaagaaagccggttatgccacagatccttcctatgccaatcgtttgattacgattatcgaagattatgatttgtataaatatgattctcagggagtctactcaaaacggaaattaagaaagcacccgtggttattgaatccgcatccggtatacatcgccaatgatattgcttatgtggttgcccgtagcggcgacacttttaaagaactgggtgatgagttcgggatcagttggaagaaactggtaaaatacaatgatctgcagcgcgattatacactgacacagggggacattatctatttgaaggcgaaaaagaaaaaggctccgaagcggtataatgtatatatagtgaaggatggagactcgatgcatgccatttcgcagaaatacggtattcgtttgaagaatctttataaaatgaaccgcaaagacggtgactatattccggaagttggtgaccgtttaaggttgagatagtcggttatttatgccttatgattctctaaattcgtacagggtgttcgttttcggacaccctgtctttttcttttttatcttgttttcagatgattacgaatttggcacggatttggtatccctgatagcgaatgacgactgatgatttataagccatcattcataaatcataattcctaaaataaatataagatggacagagaaattcccaaagagatacgcaagaaagagcgtaataaaaagattatccgtttttcagctattgctgtcacgactgttgtggttatcagtattctgatttccctgatgcgtacgggagtgaagaaaaaagacattatactctctgccgttgatcagggaacgattgaagtcagtgtcagtgcatcggggaaggtggcacctgctttcgaagagattatcacgtctcccatcaatagccgtattgttgaagtctatcgtcgtggtggtgacagtgtggatgtgggaacaccgattttgaagctcgatttgcaaagtacggaaacggagtataaaaaactgctcgatgaagaagagatgagacgttataaattggagcagcttcgtgtcaataaccagacgaaactttctgatatggctatgcagattaaagtgtctgccatgaagttgaaccggatgaaggtagagcttcgcaacgaacattatctggatagcctgggtgccggtactaccgataaagtgcgtcaggctgaactgagttataatgtagcccaactcgaatatgaacaactcaaacaacagtatgataatgaaaaggaagttgctgccgccgagctgaaagtgcaggaactcgatttcaacattttccggaagaatcttgccgagatgaaacgtacattggatgatgcgcagattcgttcaccgcgtaaggccattctcacttatattaataatcaagtgggtgctcaggtgcctcaaggcggccaggtagctattatttccgatttaagtcatttcaaggtagagggtgaaatagcggatacttatggtgaccgtgtggctgccggtggaaaagcgatcgtgaaaatcggtacggaaaagttggaaggagtggtcagtagtgtgactcccttgtctaaaaacggggtaatctctttctctgtacaattgatggatgacaacaaccgccgtttgcgttcgggattgaagacggatgtatatgtgatgaatgctgtgaaagaagacgtgatgcgcattgccaatgcctcttactatgtgggacgtggtgaatatgatttgttcgtaatgacatcggatgatgaaattgtgaaacgcaaagtgcagttgggtgattcgaattttgagtttgtagaggtggtgagcggattgcagccgggcgatcgggtggtagtgagcgatatgagccagtataagaataaaacgaaactgaaagtgaagtgaaaaaaaataattggagtgtaatgaaatgatgagataattaccaaaaaatgtataaataaaaaactacaggatttcggttttatacttgaaatcctgtttctttcgttttgttccaatcatcttc

SEQ ID NO: 1760 - DNA, 11687 bp, synthetic construct
  source 1..11687: mol_type = other DNA
  misc_feature 1..11687: note = Synthetic
gcacccggttgtgccgcaccactaagcatccggacagattgcacagtaccttgaatccgaggcaactgaatgatctgcccggcaaaggagtccatgacaaaaagatacagcttgttgtcttttgtagtcacctcgccccacgggaagatgtgaccaaaggggttgggttgtgtgccgtaaatggccgaactattaacacggatccatcggcccatttccaacaggacattttcttcaaatggcaccaggctgccgtcggaacgcggccctatgttcagcagaaagtttccgcctcggcctatgacatataccaagcttttgattttctcgtccactttcggttgcaacgctccccgctcctgccagcgacggtacccccacgtttccttaaaaaccgaggcgggggtctgccaaggcacggccaggtggtactccggaatctggttgtcggccatcacgctgaaatcgccaaaatcgttgcccaaccggccactcaccatgcacgaaggctgcaaatgcgtaaccaaattgtacaattcccggctttgctccaccgtcagagaccccatatcaaaccagatttccgagatgggcccgtagccggtcaaaacctcttctacctggctcatattcaagcggtggtgctccggcgtaatgggatctgcgttgtgcccggacataggattggcttgcggaaaatgccaatcgataagcgaaaaatagacaccaaaggctatccctccctcccgacacgctgcagccaaaccggccataacatcgcgaccgtacggtgtagcctccacaatattaaaagacgtatgtgaagagtggtacatgcaaaatccgtcgtggtgcttggccgtgaacacgacagaacgcataccggccttcttggccacctctaccacatggtacgggtcccaatgctcgggattgaactccttagctgccgcctgatacacatcggccgaaataggtgcaaatgcctgaatctgttcgctgtaaccgctcgtgacgggctgccccttgtactctcccccaaagtgcgaatacaagccaaaatggatgaataaagagtacttattatccaaccaccggggagtaggcttttgttgtgtggacacggtacaacccatcaagaatgcaagaaacaaaagacgaaacttcatacatccaaagatacgtaatgtgtttatttcataaaatttattatttttgtgagacacatttaaatttaactcaaaatgaaaaaaattgttttaaaaggagccctgctgatcacagttgcccttctgatgacctcctgctactcacttacattcacagtaggacagggtgctagaacaggtgttgaagtagttgaaagaaaccattatctgataggtggtttagctcctatcaaattggctgatcccaaagcaatggccggaggtgcaaaagactataccgttactgtagaacacaccatccttgacggtttgctggctgctttgaccggtggcatttacactcccaccacagttaaagttagaaagtaaccactcctaaatgaaaaaagttttactggtaattgtactggtaataacactgatattaggaattgccggaatacttgcaacccttgttggcttctttcaaggcttcaactacattttaaattacaagaccttgaacgaatacggtttgagccaattcggcaaaggacacgtttggggttcaatattattgttttttataggtttgggcatggcttattttgggttctcgactttcaaaagacttaaaaacaagaaagccaaaccgtaactacgtgcaattgcttatttttattgtatggcgcgtctatctatgatacggcgcgctatttctattaccccttccagaaaaaagttaacccatccgtccatgtcattgtgcgtgcgaactcttgtgagatgttcctggtacaagcctgcgtatttctcaaaaaaacccgacatatccaaaaccggatgctgaaggacgtccatgctcattagatagagcggaatgagccatcggcccatctcctcattcccctcccaaaaaggagatatggtaataaactggtaatagacaatggccactcttaccaagtccggaagtggaacgtacaagttgttagcaaacttctccagatcggacatcagctccggaatttctgtaggatacggcggcacaaatgtgtccctttcagtgtcagtatcacccgacagactacaggcccaactttgactgctcctgtacgtaccgggcactttgaagttgcctctgccctcttgccccaacagctgatgcacttcctttataagccgagaagaaaaaggcagcctctccagcagctttaccacttcttccacgctctcttcgacttcgtcgtacttaaaacgctgaaagcacatatccaacctacccaattggtggctggcctcactcaagagtgcaatcaactccatatcatccatctcccaaacccggttaatgaaacttgggctaaagcttttgtagcagccgtggtcaatatagcggcccgattgaaagttattcataatacagtttgtcaattaattcctttttcacaaatcgatatgcttcttctacattgtaagtctcctcagggcgaatcaaactattcatatcctccaaaaaatccggattactcattttcttttccatattcagaatgaattgtttgtatgttggtggtttattaacagaaaaacttatatatcgtttgtaacagcgaataatcatttcaatatctacgtctgaaatattaagggctttatataaatcgaaaagatctcttccttttgcacgttggtataaagctcgaagttttgttcccaacaattcttctaaagcataggtggttaattcacaactgccggagaaccaactgttttctatagaaaaaggaactttcacaaatccgagttcgctaaaatgctcaaagcaattaatctcaatttttaggcgcaagggtacgacagggggtatctcagattccatgcgaaacatcataatattattgtatcgcttttgtttgacagatttaccaggtaaaaaatccagcacctctcctaaacgataaagaatgggttttataggtcctgcattaatttgaactaaatcgatatcctctgaatacctactttgaggagaaagatataatttatgcaatgccgttcctcctcggaaagccaattggtttgctaaaaactcatcactgaatatggcaattaaagtgcgagagattatcaaatcttgttcaacctgctctcccgtattccaaggagcctgcgttctccactggagtatagctgctctatttatcataaatcatcaacttctatttttctattgacgtatattttccagcgggtatcttttttataatctctatactcagaacctgtactcaacggaacataatgcagacgttttccgtaattacgcaacttttgatataaaatgtcagcctgtttattttcttttaaaatatgctctaaaataaaccccaaacgttgtactgccgtcacagatgtgaaatcaaaaagctcatcagatatttttgtaaaatccgttacttctgttagttctgctaaaacggttgccgctcttgacaaacctcctatatgtctttggtattgcactatatctattgctgttaactccggattcgaaaaatggattatcccggtttccgaatttgtttgttgtaaaaatttttctggaatctctttcctatagatccagttaagaatactaccttttgttttggacacagttgaagaaggatacattgtcattacagagaaacgttgcgaacgctgatgggctgctccatgcaattcagcagcatttagtaaagctatataataaggctttcctatatattgcatcaattggtctatataataagaaggaacaacagtaccctttgcagcatactgtggaggaacaataacatagaaacctttgtaaacagacaaaactcttttttttacggtcaatcggtaaagagaattggaaagattttgctccattacatcgggaaatgcttcacgcacattctcaaaagaaaaagtaaagaaaccgtgaatctctaaatctctaatccatttgctaatagtaagagcactcataacttgccaaattttatgcgaatataatcatattatgattagttcagcatgttttttagcaaatttgctccaccaactgcaccgtaaagccgttggggtctttgatgaatagaaaacgcagatgcggattgggagcaatggggccttctatgtgccctatcccctgctctttcaaatgggccatggtcgcatgcaaatcatccaccagcaatcccacagacacatctgcaccgcaattcacatctgttttgctgggatcgtagatcagttccaggtccgctccttggccgtccaaaaagtgtatgttcacacctcctccgcccgtaaacgagcggcttaccttcatacccaggatttgtgtgtagaaggccagggactcttccatatccctgacataaatagttatccaagcaattttcatggtataaagataaccatcttctaagacagcttgacagattctgacttctttttcagtctatataatagaaacaaaccctaccagatatgaaaaagaaaatttacaacctcattgtcctggacgaatccgggagcatgttcgacatcagtcaggccaccatctcgggcctgaacgaaaccatccaaaccataagcaatggccggaagaagaataagaatcaggaacatttcctaagccttgtaagcttcaacagccatcgcatgctctatcattacgacttgacaccggtagaggaaattgaaacatttgatggccaaaaatacgatcccaacttctgcacaccactatacgatgccatcggtttttcactatccaaactccgcaggcagattacggacgacgatatggtcctggtaaccatcattaccgacggcctggagaacgattctaaagaatacaactacgactccgtgacaaaaacgatagactcccttaaagcaaagggttgggtcatcacctacataggtgcaaaccaagacgccatagcagaagcacacaagatgcacatagatcacggcctttcttataacgctactccggagggtgtggaaaacatgatggcatttgaacgttcaaaacgagatgccgtgtacacgctcatggaacgctgtattgatccaaaagagctgagcgaacttgattattttgcgtaactttagattcaccatgagcaacataacccgcaagacagccttggaactagagcctgagttcggaaagattccggacaaggctcttgtcctgcgtataggccaagggatggatgaaagttggaaaatactcttctaccttctctttggtcgttacgtatctatgctagaggctgtattcgtcaaatacgcaaaacagagccttgactttgatgactttatgctggaattgcatgtaaagatgggaaagaaccatttctccgccatcaccggctacaagggtaccgcccaattcaagacctatcttagtaccatagccagaaatctgctgttcgatatgggaaaacgagaaaagcccaccatagatatcactgcagcctatgacctcccttgtgaagatgatcaggaacgagagcggattacaaggttgattgaactgataaacgcctaccccgatgacaatacccgttttatcctttttaagacaatagaaggctactcaagtaaagaaattgcccccatgctttcagaacgttccggtaaagaagtaaagccctcttacgtggacacccttcgctcccgtgcttacaggaagctccgctttcaagttgactctatcgccatatgtagagatactatctctgtctacaacttggagcataccatcactccaaccggttataagtatacaatccttcctgctctgcgacggattttaggttaagatgacaaatacagcatgtatcacatttttggcaatttatactgtttattgccaaatttgtgataatcatcttctgattagagctaatttctttgggtttttattcaaagaagactctgtaacttgtccaaaatcagtaaataaagtaactttaagacattaataagattattatttactacgtcatgttttgacgttaagaaactataagtttacccaatagtacaaaaacaaaaacccccgttaaggacgagggtaacctaaatgttttcacaacggaataatccttattgtgattcgcttcaaaattgtaaagcaaagatattcaaattttaacaaataaaaaatcattatgaaaaacaaggtgttaggtttagacttggggtctgcttccattggatgggccttgatttctgaagataaagtaaaagaaagtacagaaattattgatttaggatgtaggattatcccctatgaaggcacagagggacaagagtttgaaaagggtacaggagaaagtgctaatgcaaaaagaacagcttatcgtagagcacgtaggaactttgacagataccagttgagaagggagtttttagttaaaactcttgtaaaacacaaaatgatgccaggagaagatttgataaaactccctaaaatggacttatgggaattacgttccaaggcggttacagaaaaaataacactacaagaactgggaaggctgttacttcttttaaatcaaaaaagaggctacaagagtgcacgcagtgactcaaatctagataaaaaagatactgaatatgtagctacagtcaaaggacgccatgaatttataaaagaacaaggtgttactataggccagtatttttataacgaattaaaaaatgatgagtttttcagaataaaagagaacgtattccccagagaagcttaccaagaagaatacgatgctatatgtaaaacacaacaaggcttccatccggaacttaccgacgaactaatcaataccataagaaacaaaataatttattaccaaagagaattaaaatctcaaaaaggtttagttgcaacctgtgaatttgaaggctttcaagtaactagggatggaaaagaatattttgcaggtcctaaggtagcacatagatcttctcctttattccaagttacaaagatttgggaaagcataaacaacttgcgtattaggacaaaaacaggggatgaaatttacttaacacctacagaaagacaacaactttttgattatttaaacgaaaatgaaaaactgacatttaaaaaaatgtgcagcctgctttcatgggatgagtcaaatctttatgtggacagaaaactatataccacggggctacaaggaaataccacaaaaactgttattggtaaattgctaaagggatcaccagataaagaacaattattaaaatttgatctcaaggttattgaagacttggaaaagcagacatttttagttgataaaaatacaggagaaattctggaaggctcagaaacaaatgtaaaacatattgataaagcgatagaacacgaacctttatttaggctctggcataccatttattctattccaaatgcacaagattgcataaaaactttaatcaaaaattttcatatagataagactacagcagaggctttgaccagtcttgattttaacaagtacggatacagcaacaaatcttcaaaagtacttagaaaaacattgccttatttaatggaaggatatggttattcagaggctatggcacttgccggttacaatcactcaggtagccttacaaaagatgaaaatctagcgcgtcttcttctagataaaattccacttcttcctaaaaactctcttagacagcctgttgttgaaaaaattctcaaccaaatgattcatctgataaatgctataatagaagaatacggtaagccggatgagatacgtgtagagcttgcccgagaattaaaacaaagcaaagaagaaagaagagatacagagtcgtttattagaagaagaacaagagaaaacgatatcatatcaaaagaactagaagaattcgggcttagggctactagaaataacattataaaatggaggctctatcatgagattaaaaacgaagaaaaaaaacttaacgcagtatgcatctactgcggtcagcctatctcttatactgaagcaatacgtggagcaaacatagatgtagatcatattatacccaagtctagactttttgatgattcacaaagtaacaaaacattagtacatagattttgtaacagtacaaaagggaacttgaccgcatatgattttatgaaaggaaaatcagaaaaagagtttctaacttatgtggaaagagtgaactcactttttcaaaatcatctaatatcaaaaacaaaaagagacaaacttttgatgtcggctgataaaatcccgcaggattttatcgaaagacaattacgagaaactcagtatatagctaaaaaggcccgagaaatattaagtgaaatttgcagaaacgtttggagtactagtggatctgtcacttctacactaagatatctttggggctgggacgatattactatggatttgcaactccctagatatagagaagtgaatcaaacagaattagtttcttgggaaagtaatcatggtaagcacacccatactaaagaagtaatagcggggtggactaaaagagacgaccacagacatcatgccattgatgctttaaccattgcttgcacaaagcaagggtttgtgcaaagaatcaacactttgaattcaagccaaacaagaagaaaacttcaagaagaagtggccgatttcataccggatgaaaaagaaagatttacactcttagaaaaatacttaatctctaaacagcccataccggtaaaagatgtacaagatgcagttgcagacatcttaatctcattcaaaaggggaaaaaaggtaaccacaccaggtactaggaaagacaagcttaaagggaaaaaacaagtagtacaaaaaaacattcttgtgccacgagggccattgagcgaagaaagtgtatatggaaagattcaggttttacaaaaagaaaagcccataaaatatttatttgaaaatcctgacacaattctaaaggattatatcaaacagctgataatggataggcttaaaggacatgacaatgatgcaaagaaagcagttgcttatactaggaaacatccaatatatttagacaaagacaaaaagcaagtattggagtatgcaacttgtcttcagcacgagtatgttataaaataccccgttgatactacatttaataaagtagaaaaagtaattgacgaaaaaataaaagagttgcttcttaccaggcttgaaaaacacaataacaaccccaaagaagcctttaaagatgtagttaaagaagataagaccgttttgaagtggtatcaagacgagggtttacctacgccaatccacagtgtcagatgctccactggtctttctgctattgttcccattagaagaaactcagatgggaaagatattggctttgtaaaaccgggaaacaaccatcatatagccatatatcaagatgcaaatgggaattatatggaacacgtatgtactttctggcatgcagtcgagcgaaaacaatacaacattcctgtaattgttaaaaactcaacagtagtatggaataaaataaattctttagagcaaagcaatcttccactatcttttattcaaaatttgcccccagatggattgaatttacagtactgtatacaacaaaacgagatgtttgttttaggtctcacaagagaagaggtgaacactttaattgatacacaaaactataacactcttagcaactgtttatacagagtacaaaaaatttctactcgtgattattattttcgacaccatctggaaacacaggtaattgacacgaaagaaggtcacaaggccaacaggtttataaggactcaaagtataaaagcatttttagcgctaaatcctattaatataaaagtcaatcttttaggcaagccttatctatgattaagcggacgttatactttgaaaatccggcttatttaagtgcttctctttctcaattaaaagttaagttacctgccgtagagaataatatgccggaaatcttaagagagaggtttactcaatctatacctatcgaagatattggggttgtcgtcttagacaatcctcaaatcactatcacacaaggggcattggaagctttgagtgaaaacaattgtgctattgtggtctgtgacaaaaaacgaatgccttcagctttattactccccttatcaggtaacacgttgcatacaaaaagaattcgcttacaagcacaagcagcacttcctttaaaaaaacaattatggaaacaaacggtacaagctaaaattcaaaaccagacagacttactagactataaaggagatgttgaaaccggaaatatgaggcaatggaaaaaagaagtaagaagtggggatacaacaaacctggaagccagagctgctgtatattattgggcaaatttgttcccacaatcgttgcactttaatagagaaaggtatggattacctcccaacaatttattgaattacggttactccattttacgctctattgttgctagagctttagtaagcacaggcttgtcaccagcacttggaattcatcacaaaaataaatacaacgcctatactcttgcagatgatattatggaaccctacaggcctgtagttgacaaactggttttagacatggtgctgaaagatgaagattgtgggaaaatcagtaaagaagctaagatcagacttttaacactgcctattcttgatgtgaaaattgatgaaattacacggccacttatgatagcagccggtgttaccgcatggtcattacaaaaatgttttgcaaaggaaagtaaggttattgcttatcctcaaatagtgctatgagtacatttgaccgttttaatcagtatcgtataatgtgggtattggtattatttgatcttccaacagacacaaaagaagatagaaaacaatatacagtatttagaaaaagactgataaaagacgggtttgccatgtttcagttttcaatttatataagaaattgtcccagcagagaaaatgcaaatgtacatataagacgagttaaatcttttttaccaccaaaaggagagatagggattctttgcataacagataaacagtttggagaaatggaactatttgtatctaaaagattaacaacaggacctccagtgacgcagcaattgcaattattctaaataaaaagcccgctatttataacgggctttctaaataatacagcatttttctaaccccacaactcctgtttcttgctgattgtctgacacttacaggcgtcttgctgtgttcgattagctaaagttacaattttgaaagcgaatcacaactaaaaggcgttgtttcattggttcgtctttgctgtgttcgattagctaaagttacaattttgaaagcgaatcacaacttcctgcctcgttggttgcgtaagcacgccgctgtgttcgattagctaaagttacaattttgaaagcgaatcacaacgcacctccggccat

SEQ ID NO: 1761 - DNA, 9605 bp, synthetic construct
  source 1..9605: mol_type = other DNA
  misc_feature 1..9605: note = Synthetic
ctgacattccaattattttgctaagtgccaaagttactgcagaagagactgaagaaggattaaaagcgggtgcaattgattatataaaaaaaccttttaacaaaattgagttactcgcaagaataaattctgcaattaaattcagagaggctaaacagcttttaatagaagccgaaaaaattgataccttcgccgctaccgttgttactgcaaatcataaaataaaacaaccgctaacaataattaaactctcgttaaccggaattaatcggctgctaaataaagatgatatctccagaaatgaaataaaaagtaagctaacatatatcgaaactgcagtgaatgatattgtaaaaattcttgatcaacttaattcgattgagattccaaagacctcagaatatttaggaaagatcagaatgattgacatcgacagcatccaacaacaaacgaataaaaaaatttttaagtaagtcgtttaaccgtttcaagcattgagtcaaaatcatatggcttattaattattgcatcgattctaacttttgacaaatcatatctgctcccaatattcatacttccactggaaagaattacaggcaaatttatttttaattcttgcaattttttcaaacattcaattccattcattcccggcatattaaaatcaatgatgataagatctcctcttatctcttcagtcatcaatttaattacctcttccccactttgaacttttatcacttgataattaaccgactccaacaactccgccaataaatcttgcaacattacttcatcatcagcgaggataataattttttcttcctgcttagatttagaaacattcactgcttcatattgtggaatataaactacaaattttgtccctcttcccacttcgctaaaaacttctatatgtcctttgtgtgctttaataataccgtatgaaatgtataacccaagtcccgagccacttttttcttttgtagaaaaataaggatcaaatatttttatcaagttatcgttttcaattcctttgcctgaatcaattacagaaattctaataaattttcctaacggcaaaaaatttgacaatctatcttcttcatttatttcgattggagttgcatttattatcaacgcgcctccatctgacattgcatctcttgcgttaacacataaattcaaaatcacttgataaatctgtgtgctgttgccaaggacctcgggaagattttcctgaatttcagacttaaattttatgttgcccggaaaagtttgcgaaattatttttgatatttctcccaacaataaattcagcttaataaattctttctgtttcggtgtcggctttccaaagcttagaagatttgtagttaactcctttgcacggattgaacattgctcaatattttcaagcaagcgcagcgcatcactgttgcccgctatttttttctttaaaatatttacgctaccaaaaatgctcgaaagtaaattactaaaatcgtgagctatgccgcttgttagtttcccaattgtttcaagtttttgtttttgcaaaagactttgttcaagatttttatttaactcaaaagttctaaaaagtttttctgctaatgaaagtgatttgccaaactgttcaataaactcaagatcattttccgaatattcagaatttttggaaccacaaaaaactaaggtcattcgctgttggtcgaaaaacgtaggtgagataaaaaaatgactgaacattttgttaagatgaaaatttgcaatctcattcttgtgtttaatagaatcaaacgccttcttatttatttcaatccatttcaggatgaaaggaagactaagtaataaatttttttgaaattttataagtgcagcagactcattttcagccgcatgattgtagatattaaaatttttattgtccgattcaattaacaaaaagatcgcgtcactctttgtaacgtcaatacttctaaccaaaaactcgtcataaattttttcaattgatttttccccgaccaacagtgtaacaaaatcagtaaaaaattgttgactaactattgaagttttctttttcaattttttgaatattcgctttcttgtggctttagatttaactgttttattttattgtaaagagtcttttgacttatccccaactgcaaagcggtttttgttctctcccaattatttaactcaagcactttttcaatatattttttttcaatctcttctaatgtttgaacttcactttcacttattgttgacttaggaataaaaattttctgttcgtcataaaaacgaattgaaggaagaaataaaaattcctcttcaataatatttccttcagaaaaaattattgctcgttcaattatgtggtcaagctctctaacgttgccagggaaattatacgacttaagtttttcaagtgcgccaattgataattcttttggagatcttattggcgatttttttttgagaaaataatctgcaagcaattcaatatcttcaactcgctcgcgcagtggtggaattgtaagagtgataacattcagtctgaatagtaaatcttttctgaacaattttttttcagcatcgtgaataagatttttatttgttgcaccaattactcgaacatttgaacttaaattatttattccaccaactcttctgtaatctccattttctaaaaagcgtaaaatttttggttgaattgataagctcatctcaccaatttcatcaagaaataaagttccgccatcggcaatttctaccaagccttgtttggctgatttcgcatcggtaaaagcgcccttctcatagccgaacaattcactctcgattaatgagtcgggcaatgaggcacaattaataacaacgaatggtttattttttcgcgaagaattttgatgaataaattccgccaacaattcttttcccgttcccgtttcaccttcaatcaaaatattagaatcagaagcggcagatttttcagcgagcaacatcaatttttttagattttgactttcgccaattattttattcgaataagatttttttactttttgtgtgagcaactcattttgaagaactaaatttttatgttcaagtgctctttggattgttagataaagatcttcaaaatcatacggcttaaccttgtaatcaaaggctcccattcgcatacattcaatagctttcccaacttctgattgaccagtaataacaataacacgcagtgacggattgtaatctttgataaacgccaagacttcttcccccgaaacatatttcattttgaggtcgagcagaaccaagtcataatttttctttttgattaattcaatcgcctgtttgccatctaaaacagttgaaacgggaattcctttttcaaatagttgctctttaagtagataacagagcgactcatcatcatcgcagacgagtattttaaaattttgattaatcatcggtaaaaattacatataaagtttattcaaatatagaaaaatttttgaataggtgcaggattaatcaactctattaaactctgaaatttattcgttactcgttggaatgataagagcagaaaagaatgaaaattgagaaacaatccttgactttgaggaaaattttcaaaatgttgcagtaattaatatttttttttctcacaaacaggcgagattgaaaactacatacgaaactacttctctaattttacaaattgaaataataatttgatacttcagaattatttttaagttcatcttgtgtgaagcagaacaactcgattttttttattgcgttgcatcattcaaagtgaaagcattaagagatttttcagaagttaaaatttgtattcaataaattttcatttgcttaaactccgtttaaaagaagtttaaaaaacattaaaatattttgcgaacgttgattagaattgaacttagttaaggaaagctaaacaagaaaattatttctgtttaaaacaacaatcccgacgagtaaacatcgggactatagtaaatgttttcacaacggaataatccttattgtgatttgcttaaaattgttatccgaaatataaaaaacatttttctaatacaaaaaggaattagttatgaaaaaaatattaggacttgaccttggggtttcttcaattgggtgggcgattacggatgaagattatacaaaaattttgggctggggaagcagaattgttccgcagtcaacagatgaaaaagaagaatttacaagagggaatgcaatatcaaaaaatcagaaaagaacgctgagaagaactcaaagaaaaggttatgaccgctatcagttgcgaagaaaagtcctgattgatcttttgaaaaaaaataatatgctacctgatgaaagcttaattcacaccaataaaatagcactctggaaactccgtgcagatggcgtgaatgaaaaattatcactaatggaaattggaagagtgctgctgcatctcaatcaaaaaagaggttacaaaagtagtagaagcgaagctaatcttgataaaaaagagactgaatatgtcgccgccgtaaaaagtcggcacgataaattaaaagaatcaggtttgacaattggacaaaaattttataatgaattgctcaataaccaattctataaaattaaagaacaagtctatccgcgtgatgcttacatcgaagagttcatgaaaattatgcggactcaacaaactttttatcccgatttaattactgatgatttaatcaagaaaatttcttcggaaacaatttattatcaacgcaatctcaaatcacaaaaaagtttagtttcggtttgcgagtttgaaggattttggacaaaagtgaattcaacttctaaagagaaagaattgtttgttggaccacgtgttgcacacagaagctcccccctttttcaagtttgtaaaatttgggaaaacattaataacatttcgttgaaaagaaaaaatggtgcgcaactcataattccaatcgaaaaaaaacaggaaatatttgaacatttagataagaacgaaaaacttactcttactgatttgctaaaaattcttgaactaaaaaagaatgatgtttatgggaacaaacaattgacgaatggcttgcaaggaaataaaacaaaagttgaaatcttaaaatgttttgaaaataattccgactataaaaatcttttccaatttgatttaagtattattcaaacagatgaagaagtttttttgattgataaaaaaacaggcgagataactaatacaaaatttaaaaaaattatttctccgcaagttgaagaagcaccgttctataaactatggcacacaatttattctgttcctgaaaaagaagattgcaaaaatgcacttatcaaaaaatttaatttacccgaagctatcgcatctaaattggctgcacttgatttcacaaaacaagatttcggaaataaatctcacagagctataagaaaaattttaccttacttaatggaaggcgatttttatagcgatgcttcttcttatgcgggttactctcattctttctccttaaccaaaagcgaaaacttagagagaaaattacttgagaaacttaagccaatcgaaaaaaatagtttaagacaaccagtggttgaaaaaattctgaaccaaatggttaatgtcgtgaacgctgttattgataaacatggaaagcccgacgagatacggattgagcttgcaagagaactaaagcaaagtaaagaagaaagaaatgaaacctttacttatatgaatctacgaacaaaagaaaatgaagagatcgccaaaagacttgaagaatatggcttaagagcaactcggaataatattattaaatggcgactttatcatgaacttaacaatgaaaaaaaacagataaatgcaatttgtgtttactgcggaaaagtaatttctttttctgcagctatccgaggcgaagaagttgacattgaacatatcattccaaaatcacgcttgtttgatgactcgcaaagtaacaaaactttggcgcacaaaaactgcaacacgaataaaaataatctgacagcttttgattttatgcattcaaaatcagaaggagaatttaatgactatatcgaaagagtaaatttattatacaaaaaccaactgattggaaaagcgaaaagagataaactcttaactccgggcgataaaattcctactgattttattgatagacaattgcgagaaactcaatacatctcccgaaaagctcgcgaaattttacactcaatttgtcataacgtctggtgcacaagcggaaatgttacttctgaactccgacacatttggggatgggacgatgttctctcaaacattcagttgcccaaataccgtgacttgggtttaactacatttgaggaaatcaaagttggtgaacaattaattaaaaaggaaaaaattattggttggtctaaacgcgatgaccaccgccaccacgctattgatgcgcttactattgcttgcaccaaacaaggatttatccaacggcttaataatcttaacagcagcacagttagagatgaaatgatgcgcgaaataaaagaagcaaaaataaaatttggtgaagaaagaaatctcgtcgaaaaaaatattctcactaacaaaccatttttaacatctcatttggaagaagaagcgaaaaagattttagtctcttttaaggcgggtaaaaaagttgcaactatcggaaaaagaaaaattaaaaaaggtgggaaaaaagttgtagtgcaatcaggaataattgtgccccgaggtgctttgagtgaagaatctgtttatggaaaaatctctactttagaaaaagaaaagtcactcaaatttttatttagtaatccaactttaatcctgaagccatacatcaagcaattagttgaagaacgactttataaacataacaacgatccaagagaagctttcaaatctctaaaaaaagatccaatctttttagataaagaaaaaacaattgaactaactcatgcaacttgtttcaaagaagaagttgtaattaaaaaacagttgcaaacactgaacgaaaaacaggttcttgatatagttgacccaatcataaaacaaaaagttattgagcgtttagaaaaatttggaggcatagcaaaagaagcttttaagaatcttgagaacgatccggtctggtatgatgaagagaaaaaaattccgataaattctgttagatgttttacgggactttctgcaattgaaccaataaaaaaagatactgctggaaaagaaattgcatttgttaaaccgggtaacaatcaccatctcgctttatacttggatgaaaatggaaataaacaatttcaaatctgttcattttggcacgcagttgaacgcaaaaaatatggcttccctgtaataataaaaaatcctctcgaaattatagacgctatacttggtgctgaaactgaagtcgaaaaatatcccgacagtttccttgaaaaattaccaaatgcaaaatggaaatacttagaaagcttccaacaaaatgagatgtttctacttggggcaactaaagaaaaaattgaagaagctctggcaaacaaaaattatagttttttaagtgagtatttgtaccgcgttcaaaaggtaacttatattggaaaaacattagatatattttttagacatcatttagaaacgctgcttcatgataatgaaaattctaaacattctaaaagatatcatagaatctcgagtttgggtgcattggagttattgaatccttgtaaagttaaaatcaattgcattggagaaattgtaatgagttaaaaattttatcaaaaatctttttcagagtttatgagaaaaaaaatatttaggaatagttgtttcaaacttaattgaagttaattggcttaggagactgttatgattaagagaactatctacttcgggaatcccgcttacttaagcaaaaaagatgaccaattattaatacgttttcctgaagagaaatctgaaaaggaaaaaagttatgaagacttgattattgacaagaatgagaaatatagggaaagaagcaatcagaactccgcacctattgaggatatcggagtcgtaattctggacaatagtcaaattacaataactcaagggctgattgccgcactacttgaaaacaatgtagcgatgataagttgcaattattcacacttaccgattggtttgtttttgccactcgaaagcaacattacacagtctgaaaaatttcaagcgcagatatcagcaacagagccgttaaaaaaacagttgtggcaacaaactatttccgcaaaaatttttaaccaagctcaagttcttagcaaacagaaaaagaagagtgaaaatatgaaacgctgggcaaagtctgttaaatcaggcgacagcgaaaatattgaaggtagagctgcagtctattattggaaaaatttatttccaaccgaattggaatttactagaaatagagttggcgcagctccgaacaaccttttgaattatggctatgcggtcttaagagcaattgtggcaagaggtcttgtggggagtggacttcttccaacacttggcattcatcatcacaacaaatacaacgcattctgtcttgcagatgatattatggaaccttatcgtccttatgttgatgagctggttttaagcatcattaacaatggagaagattatgaagaactaactccctcaataaaaaaacaacttctaacaattcccgtaattgatataataattgaggatgaaaagagtccactaatggttggcttaacaagaactacatcttctcttgcaaaatgtttttcaggcgaaacgagaaaaattatttatccaaaaattttttagcacaagatgggaaaacttatcaatgtacttaaacgcgtatagaattatgtggatacttgtattttttgaccttccaacagaaaccaaaaaagagagaaaagcatatacaagatttaggaacggattgcttgatgatggtttttcgatgttccaattttcaatttatgtgcgtcactgtgccagcgttgaaaataaaaatgttcatgtaaaaagaataagaaatatgattcctgaaacaggacacgtaggaatattgagcataacagataaacaatttggaatgatggaaattttttgtgggaagaagaggacagatcaaggatttaaagagccgcaccaacttgagttgttttaagaaatgccaacttttttttgaagttggcattttaggttatttgaaatcaacttgaattttttaatcctacaatagctgtaagttgttgtaatataaagcttagaaccaacatcagttgattcaaacttaacaaagaacaattttaaagcaaatcacaaccatcattagcttcaccagcttcggcagctttgttgattcaaacttaacaaagaacaattttaaagcaaatcacaactaaatgaacagttgccgttggattaattgtgttgattcaaacttaacaaagaacaattttaaagcaaatcacaactgatttacttggagaagttgaaaaaaata

SEQ ID NO: 1762 - DNA, 7908 bp, synthetic construct
  misc_feature 1..7908: note = Synthetic
  source 1..7908: mol_type = other DNA
aaatattggctggtcaaaagaaaaaggctcaagtaatagctgtctgaattatggggtacttacattattggctcaagtatgctttcgtgcattgaatattttttaagatagtgctgggcgctataatgtacccaacactataaattaaacttttacagccataccaatctgcccattcgggtattgtgctcgtgctattttttgagcttcagaagaagttgaagcttcaacaatggggtaaattgttcctgttgcaagtctaacagttactttaaacttctgtgttgtggccataatttttaagttttaataagttaaaaaaaatatatcagggacaaatataatacacatacctgtatgtgcaaaataattttcacaataacccttctttgtattataaacaagaagttatgtctgataagccagaaatcagtccgattgaacaatatgtaattgatgaagttaaaaggagaagggttgcgaaaggtatttcacaacgaaacttggcatatatgctggatgtatctattggctttatagggaatgttgaaaatccgcgttatcgtgcaaaatataatattgcacatttaaatgagcttgctaaagtgctaaactgctccccacaagattttttacctgaaaaatcattatagcaatatttaaaaagaaacaaggggcacacttgtaataaagtagcccttgtgcaatcttgtatataattaccaaaaataattaaactggcgacatacattgtcgtaccaggtatttagtattacagggaaatcagaaggaaggataatatccggaaataaaaaatgcctcctggttgtggacaagaggcgatccaaatgttttcacaacggattgactccttattgtgatttgcttacaggacaaaggtaggaaatattttttatttcctgaattgttataatagttttattgtaataatttattgtaataaaaggtaaatattggcaaaattcatcattgcctattgtgaaaaattattgtagccttgattatatgcttaaacacaaattacctcaataaaaataaaagtaatttattttatatttgctcaaattatattaatgttttatttaaataattaccatgaaaactattttaggactggacctgggatcaacttctattggatgggcccttatagaagcagaaaaggatgaaaaacaaacacctgtgcgcattattagtatgggctcccgtatcattcccctatcttcagatgacagggaccagtttcagaaaggacaggctatcactaagaaccaggacaggacaagggcccggacccagcgaaaaggatatgacaggaaacaattaaagaagcgttggttaaataaagtattgaaggagcatgacatatttccttctgatgcattgatgaagctccctatgctggacctgtggaagctgaggagtgatgcggctgatcccggtaaggatatctcagcggagcagttaggccgtatcctgtatatgctcaatcaaaaaagagggtataagtctgccaggagcgaggccaacgctgataaaaaagatacggattacgtacaggccgtaaaagggcgctataagcagcttaaggacaggaaccaaacgatcgggcaatacttttatgagcaattggcgagtgcgcacaataacaatacatatttcaggataaaagaaaaggtgtacccgagagaggcgtatatggaagagtttgataccatcatcaatgcccagaaagcaaagcacgattttttaacggaagaaacgatcagccgcttaagagatgagatcatttatttccaacggaaattaaagtcccagaaagggctggtcagcatttgcgagctggcaggattggaaaagacagtttttgataaggaaaagaactgtgaaaaaacggtgtttatcgggcccagggtcgcacctaaaacatcgccgatttttcaattatgtaaaatttgggaaacggtgaacaatctctctttaaaagttaaaaatccggaaggaagcaaatataaatggcgggattatattccgacgattgaagaaaaggaagcaattgccagtcatttatcgcaaaatttaatattgacctattcggatttattaaaaattctaaaacttagaaaagacgatgtttttgccaataaacaggttcaaaaaggaatccagggaaatataacttaccacgaaatccataaaatattaggtgatagtgagttgcttcaatttgaaatatctgtaattgaatctgatgaacaagctttattagcagataaaaagaccggtgaaatcctgtatgaaagacaaagattaatcgttgataaatcttttgaatctgaacctttataccagttgtggcataccatttattcaatcaaagatttggatgaatgtaaaaaggcattgataaagaggtttgaattaaatgaggaagtagcagataaactttccaaaatagattttaataaacaggcattcggcaataaatcggcgaaagcaatccggaagatattgccttacctgatgcagggctttgattattctcaggcttgcagtttagcaggttataaccattcaaacagcctgacaaaggatgaacaggagcaacgtgaaacaaaggacagattgacattattggcaaaaaatagtttaagacagcctattgtagaaaaaatcatcaaccagatgattaatgtcgttaatgcgattattgatgaatatggaaaacctgatgaaatacgattggaattagcccgcgaattgaaacaaagcaaagatgaaagagatgaagcggataaaatgaattcaaataataaaaaactgaatgagatgatttctaagaggctggaagtaatggggattccggctacaaggaaatatattcaaaagtataaattcatttttccggctaaagataaaaaatggagagaggccaatgttgtgaaccagtgtatctattgcggagagcattttaacctggcagaagctttgaccggagataattttgatgttgaccatattgttccgaaggctttattgtttgatgattcacagacaaataaagtattggttcatcgtcattgtaattcaaataaactggacaagactgcttatgattatatttccaaacagggagacctaaagttagaggaatatattcagcgtattgatgattggtttgcaaaagggattttatcttatggtaaaatgcaacgtttaaaagtttcatttgaagaatatttagacagaaaaaaacagaaaaaagaaacagaagcagacaaaaaactttgggagagcttcattgacaggcagctaagagaatctcaatacattgcccgaaaatcaagacagattttagagcaaatttgtaaaaaagttactgtaacagaaggtacagtgacggcaaaacttcgtaaagtttggggttgggacgatgttttgatgaatttgcaattgtcaaaataccgagaaatcgggcaaactcagataaaagaatggacaagcgaccacggaaaaagaaagcaccaaaaagaagaaataagcaattggacaaaaagagatgaccacaggcatcacgcaatagatgctttggttatagcctgtaccaagcaaggctacattcaacgaatcaacactttgaacgcaagtgatgtgagaaacgaaatgctgaaagagattgaagattcaaaaattaaatacaatgaaaaactatcgttgttggataaatatctggttgcagaaaagccatttacaacttcacaggtagcaagcgaagcagataaaatcctggtttcttttaagccgggcaagaaagtggctacgattacaaaatttaaggcaacagggaagaataaggaaaagggagtgatcgttccgagaggcgctttgcacgagcagtctgtatatggtaaaataaaggtaatagagcaggacaagcctttaaaatacttgttagagcatacggataagatcatagatccacgggttaaggctttggttacagcaaggatcgctgagcatgggaacaatatcaggcttgctttatcatcattaaagaagagcccgatctatttagacgagcaaaaaacggaaatcctggaaaaagcgtcctgctataatgatgcaacagtgctgaaatacaagcttcaaagcttaaaagccagccaggtggatgatattgtggatgaaagagtgaaagcgcttgtaaaagaaagattgaatgaatatggcggtaaggaaaaagaagcctttaaagatgtgctgtggtttaacgaggaaaagcagatccctatccgtaccgtcaggttatttgccaaaccggatgccaataacctgcagcctattgcgaaggacgcaaatggtaaagacatcggttttgtgcttaccggcaataaccatcatatcgctatttatgaagacaaagatggtaagcttatgcagcatcgctgcactttctggcacgctgttgaaaggaagaaatataaattgcctgtcgtgataactgacacttcggaattatggaataatttattaggggaaaattatcccgaaacttttttaagcaaattgcctgctgataacctgaaattgaaattcagtatgcagcagaatgaaatgtttattttgggcttgtcacaggaagaatttgaagatgcattaagtaccaataataagcctttattaagtaagtgcctgtatttggtttggcgcctggctgataatgactattatttccggcatcacctggaaacaaaaaattcagaattagaaaaaattaaagaggcaaaagaaagtaaaaggtattatagagttcaaagtttgaaagtgttaacaagtttaaatccaataaaggtccagctaaatcatttgggtgaaattattaatgtttggcgctgattaatattacaggtctgcttatgagcagctttttcaatctatccttgtggttttaaaactcttgtaagtatgttgaaacgtaccctttattttggtaacccggcttacctgagcacccgtctggaacaggttattattgaaagcccgggcagtcccaatgagcataaggtcatacctattgaagatattggtgtcctgatcctggaccataaccggataaccattacccagccgctgctgaacaagcttctggagaataatgttgcagtgatcacctgtgaccagcagcaccatcctttgggtatgttttatgtattggaaagccataccctacaaagccagaagttcaggcaccagatagcggcatccctgccattaaaaaagcaattatggcagcaggtcatcagggccaagatcgccaaccaggccgggctgctggagcgtcagcggcagaatgctgcttacctgcataagctcctgcccaaggtcaggagcggtgatagcggcaactgtgaagcgaaagcggcgctgtattactggaagtgggtatttcccgatttcctgaattttagccggttcagagaaggggcgccaccgaataatttgctgaactatggttatagcctcttaagagcgataactgccaggagcatcgttgctgccgggctgatgcccacattgggcatttttcaccgcaaccagtacaatgcctactgcctggcggatgatatgatggaaccataccgcccttatgtggatgcagtggtatgtaatattatcaggagcaacggggcttatcttcatatgaccccgggtattaaaaaggagcttctccagattcctgccatggatgtccgcattaataaccaggtaagtcctttgatgatcgctgttcaaaagaccattcagagcctttcaaaatgcctggagggggagagccggaagctgcagctccctgaatgggtataatatatatgagttatgatatcttccgaacgtttaaacgcctacaggatcatgtggttacttgttatgtatgatctgcctacggaaaccgctgccgaccgtaaaaatgcacaaaaattccggaaagacattcttaaagatggcttccagatgtttttgttcagtaagtatatcaggcattgtgtcagtaaggagaatgcggatgtgcacgtagccagggttaaacggatcctgcctcctcatggtactatcggtattttaagaattacggacaagcaatttggtgaaatggaagtatttaccaacaaaagagaagtaagtaagaacccgattgtacagcagctggaaatgttttagcctttattttctctaaaaattatacttgttcagaggtgattttcctatttttttgtttccgggtattctctgaaacacagacaggataagcgtttgggcttatcctgttgtgtattaccaaaggtaagaaagaaattgtaagcaaatcacaacacacttttagcagcttcacaaatagaccgtgttgtgtattaccaaaggtaagaaagaaattgtaagcaaatcacaacgagtacttttcggaattttcccggcaggcgttgtgtattaccaaaggtaagaaagaaattgtaagcaaatcacaacggaaaggtggtgttgtttcaaacctttcccgttgtgtattaccaaaggtaagaaagaaattgtaagcaaatcacaacaaaaactccactacttcggtttctctcagggttgtgtattaccaaaggtaagaaagaaattgtaagcaaatcacaactgcatcgggtacgcggaggcgggcaccgacgttgtgtattaccaaaggtaagaaagaaattgtaagcaaatcacaacaaaacggcatctactccgcacgcgtagacagttgtgtattaccaaaggtaagaaagaaattgtaagcaaatcacaactaatactgatacgatcgtgtcgcgcgtttagttgtgtattaccaaaggtaagaaagaaattgtaagcaaatcacaactccctgagagacaggctttttatgaagatggttgtgtattaccaaaggtaagaaagaaattgtaagcaaatcacaacagcgtggggatcctggaagatcatctgcatgttgtgtattaccaaaggtaagaaagaaattgtaagcaaatcacaaccgctcttcttgtctacgcttctccatcaggttgtgtattaccaaaggtaagaaagaaattgtaagcaaatcacaactacaattcatcacttctttgttccgtatcggttgtgtattaccaaaggtaagaaagaaattgtaagcaaatcacaacaggaaactcactggctgcaagacaataaaagttgtgtattaccaaaggtaagaaagaaattgtaagcaaatcacaaccataatcgttggaagtaccattaaagtaagttgtgtattaccaaaggtaagaaagaaattgtaagcaaatcacaacccttttcatcactttaacttatgctcctgttgtgtattaccaaaggtaagaaagaaattgtaagcaaatcacaacgtcaatgactgttcgcgatatgatcgcccggttgtgtattaccaaaggtaagaaagaaattgtaagcaaatcacaactcatctacaacaccgtcacaaacaattaatgttgtgtattaccaaaggtaagaaagaaattgtaagcaaatcacaacggtaaaccaacaggccaaacaggccgttgagttgtgtattaccaaaggtaagaaagaaattgtaagcaaatcacaacaggcgggaggttcttccgcccctgctgctgttgtgtattaccaaaggtaagaaagaaattgtaagcaaatcacaacgggatgatggagatatcctcgatggcgttgttgtgtattaccaaaggtaagaaagaaattgtaagcaaatcacaacagatatccgaggttttgcagacttcacaagttgtgtattaccaaaggtaagaaagaaat

SEQ ID NO: 1763 - DNA, 7703 bp, synthetic construct
  source 1..7703: mol_type = other DNA
  misc_feature 1..7703: note = Synthetic
aaaagaacggcatggacaatgccgaccatatcattacggtaagcaacctgacccggcagacggttattgaaaagtatcatcaaaaccctgccaaagtaactaccgtccacaatgccgtagaacctctcagtcctgaaatacttgccatacaggacaagaaaggggtcaaagacaaggtcattactttcttgggacgcatcaccatgcaaaagggacccgaatacttcgtagaagctgctgccaaagtattggctaaagctcctcacgcacgtttcgtcatggcgggcagcggcgatatgatggacaagatgatacgcttggcagcttcccgcaacatagcggacagatttcacttcaccggatttatgaagggtaaacaggtgtacgaaatattgaaggcgagcgatgtatatgttatgccttccgtatcggaacctttcggcatctcccccttggaagccatgcaatgcggcgtaccgactattatatccaaacagtccggctgtgccgaaatattggactatgccgtcaaagtggactattgggacatcgaagctatggctgatgccatgtattccatcatttcctatccctccatgcaccaattcctgaaagaagaaggaaaggatgaggtggacaacatcaaatgggaatatgccggacagaaagtgagaaacatttatgaacaggtaatgaggtctaactactaattcctaaaaaaagagatatgaaaactatttgcttttactttcaaatacatcagccgtttcgcttgaagagataccgcttctttgacatcgggaacgaccattattattatgatgacttccaaaacgaggaaatcatgcaccgcatagctgaacgctgctacctgcctgccaatagaacaatattggaaatgatcaaggcaaacgggggcaagttcaaggttgccttctccatctccggcgttgcgctcgaacaattggaaatctattcgcccgaagtcatagatagcttcaaggaattggtggcaacaggcaatgtagaatttcttaccgaaacatacgctcactccctttcttccctcggcgatgcggaagagttcaaggaacaggtggaaaagcataaagagaaactgcattccgtcttcggtatcgaacccaaagtgttccgcaataccgaactcatttattccgacgatatagccgaccttgtcgccgacatgggcttcaaaggcatggtcaccgaaggtgccaagcatatcatgggatggaaaagcccgaactacatttacacctccgccgtacagcccaaattgaaacttctgctgagaaacggtcgtttcagcgaagacatcgctttgcgcttcaacaactacagctggaacgaatacccgctgacagccgacaaatacatctcatggatagccgacacccccgcttcggagcaagttattaacctctttatgaactatgaagttctgggtctccacaatcccgccgaatccggcatcttcgacttcctcaaagcccttccccgttttgctgccgaacggggcatctctttctctaccccctcggaagcattcaaactgctcaaacccgtggataccatttccgtcacgcaccctatctcgtgggcggacgaagaacgcgactgtggatcttggttgggcaatgtcctgcaacaggaatcattccgtaaaatcaacgacataagcgaacgggtacgcctcgcagaagaccgccgcatccgtcaggactggaactatctgcaaagcagcgaccacttccactacatgaacactcgccaccgccacggcagtttcttcagtccctacgacaacccctacgatgctttcaacaactacatgaacgtcctgtccgacttcatcgtccgtgtcaatgcccaattccctgaaaccatcgaaaatgaggaactcaacgcgctcctcactactatccacaaccaagaggaagagatagagacgctgcaaaaggaactgggcaaacagaagaagaaagcaaagtaattttacttcgtatatatattgagagttttagataaagaattgcggcttaatctggtaaggattgagccgcaatttgtattttgtgctttcagcacaaaaaaagagggcgagtttccccgccctaaatgttttcacaacggaataatccttattgtgaattgtttcaattattggatgcaaatatagggtgtatttttgaataagcaagccggattgcttttttccgcaaaaaaaaatgaggacttgagtttttattgattggatatagatattacacaattgtccatgccgtcatcgttatatcaaaaaaaggtcaaaaaactttgatagtctcaatctttatttacgacctttaccgattcttttcaacatgcatgtagttagagtagtggacagaaacaaaaaagaaaagtgatttttattttgtggaatcaaagaatagtataatacagtaaaacaaagtgtcatgacaaaggtattgggtttggatttaggagcggcttcagttggctgggcaatgatagaagaagaggaaaagtcgcataagattttgggattgggtagtcgaattattccttatgaaggaacggagggaaatgattttgcaaaaggaacgggggaaagtcggaatgcattacgaacaaaagcccgtactgctcggaaaggatacgatcgttaccaattacgaagaaaatatttggttgatacgttggtgaagaatgagatgatgcccgatgaatatctgagaaaactgcccaaaatgcaactttgggagctaagaagtaaagctgttacaactgaaattaccaaacaagaattaggaagattattcttgtggttaaatcagaagcgaggttataaaagcagcagaagcgatgccaatttagataaaaaagatacagaatatgttgtcgaggttaaaagtcgtcatgagaagattaaagaatcaggttttaccatcggacaatatttttatagtgagctaaaaagcaacgaatattttcgagtaaaagaaaatatttttccaagagaagcttatattgaagaatttgatgccatttgcaagcagcaaaaaaggcatttgactgataagctaattagccggataagaaatgaaattatatattatcaacgccctttgaaatcacaaaaaggattggtttcagtttgtagatttgaaggatttttcaaaaaagggataaatggaaaagaatattttgtcggacctaaagtagctcctaaaagttctccattatttcaaacagtaaaaatatgggagaatataaacagcatcagattaagcgaccgtaatggaaaggaaataatgctgtctttagaacaaaagaaatgtattttcaatcatttagacaataatgaaaagctaacaccgaaagatttattcataattattggcgtgaaaaaagaaaattgcttcgtaaataaacaattagaaaaaggaatacaaggaaacgtcacaaaatctactatactaaaatgctttggagaaaataatgattatgacaaatggttgaaattagatttaaatattattgttaaaaaagatacatttggttatttgtatgacaagaaaacaggagaaataataggagagaagttgattaaacatgtagattctgctgtagaaagagaaccgctttatcaattgtggcataccatttattcaattaataatacagatgagtgcagtgctgctttacaaaacaaatttggatttgacagtgaaacagcagataaactttccaatatagattttggcaaagccggattcggaaataaatcggcaaaagtgattcggaaaattctgccttatctaatggaaggtgatgactacagtcagtccatgagttatgcaggatttaatcattcggattctttaaccaaagatgaaaatctgaaaaggaaactgttggataaactgagaccaattgagaaaaattcactgcgtcagccaatagttgagaaaattttaaaccagatggtcaacgtcgttaatgcgattatagacaaatatggaaaaccggatgaaattcgtattgaattagcccgtgaattgaagcaaaataaagaagaacgaaataaaactgacaaggatatgagcaaacgccagcgggaaaatggggaaatctcaaaacgtttggctgaatatggattgcgtgctacacgaaataacattataaaatggcgattgtatgaagaaatagacaatcaagacaaaaaattaaatgctatttgtgtctattgcggacaacctatttcgttaacagaagctataaaaggaaatgaggttgatgttgaacacattataccaaaatcaaaattatttgatgattctcagagtaacaagacgttggcacataggcggtgtaactctactaaaggggatatgaccgcttacgactttatggaaaataagccggcacaagtattcaatgcctatatagagcgggtaaatatgctttatgacaataagataataaggaaagtaaagcgggataaacttttaatgccggaaagtaaaataccggataatttcattgaccgtcaattaagagaaagtcaatatatagccagcaaggcacgggaaattttgcaaactatttgctacaatgtttggagtacgagcgggacagttacagcaaggttacgtcatttatggggttgggatgatgccacaatgagtctgcaattaccaaaatatagagaattaggactgacagagatggttgaatgggaaagtgagcatggcaaacaaaaacattcgaaagaagtaatttcagattggtcaaaacgggatgaccatcgccatcatgccgttgatgctttgactatagcatgcaccaagcaaggttttattcaacgttttaataccctaaattccagtaaaacaaaagaagatatggaatttgaaattgcaaaatgttctattgaatatagggagaatctttctaagcttgaaaaatatattattgcgctacgacctattcctgtttctgaagtcgaagatgctgttgcaaacattttaatttcatttaaatcagggaaaaaagttgcagtaaaagggaaaagaaaaataggaaaaagagggaacaagaaaataattcaaaccgatattatcattcctcacggttcactaagtgaagaaagtgtatatggaaaaatcaagactattgaaagggagaagcctcttaaatatctttttcagaattcgcaattaatatttaataataagataaaaatattagttgaggagcggttggcgacgtttgaaaatgatacaaaaaaagcattagcatcacttaaaaaagtacctgtttatttggatgaagaaaaaacaatagttttagaatatgcaacatgttttaaagaggaatatgtgaagaaatatgatgttgatacaaatttcagtaaaacagataaagtaattgatgataaaattaaggaaatacttcaacatcgtttaggtaaattcggcgggaaggctaaagagaaagaagcctttaaagatgttcaacaaggggataagactataaaatggtatgaggatgaaggattagagcgacctattcattctgttcgatgttttaccggactgtcggcaattgtccctgtcaagaaagatgaaaatggaattgatattggatttgtgaaaccagggaataaccatcatattgctatttattcagataaagacgggaacagatatgagcatatatgtacattttggcatgcggtagagcgtaaaaaatatgatattcctgttgttatcaaggatagcaatgaaatttggaacaaaatttggtcaaaacctgaaggttcttatccgcaaagttttttggataaacttccacaagagaatttgactttggatttaagcatgcagcaaaatgaaatgttaattttagggatgtcttatgaggatattaaaactgctattgacaatagtgattacaaacaattaagtagcaatttatacagactacaaaaattagcaaatgcaaattatatgtttcgccatcatttagaaactcaaattattgatgataataattcgaaggcaagtcggcgatttattaatattcatagtttaaaagccttattcgcttggaatccttataaagtaaatataaattgtttgggagatattcaaactaatagcagatgattaaaaaaacattatattttagcagtcctgtctatttgagtactcgaaatagtcaattgattattaaattgccggaagtggagaggaatgatactctgccgaaggattttaagcaacaatcggttatcacgaaaccgatagaggatattgggataattgttcttgataacagacagattacaataactcacggggtgttggagaaattgctggagaatgatgttgctttgattacttgtgacagtcggagcttgcctgtcggtttgatgttgcctctttatgggaacacgacacagagcgagcggttcagagatcaaattgacgcttcgcttcctttgaaaaagcaattgtggcagcagaccattcaatataaaatcaagaatcaggcagcggctttaaaccaattgcgcggggagacggtgaaaaatatgttggtgtgggcaaatgatgtcaggagcggagactctgataatttggaagcgcgggcggctgcatattactggaagaatctttttccgtctgtttcagattttacgagggacagggaaggggtagcacctaataacttgttgaattacgggtatgccattttgagggcggttgttgcgcggggattggtcgtaagcggaatgttaccaaccttaggtattcatcatcataatcgttataatgcttattgtttggcagatgatattatggaaccttaccggccgtttgtggacgaactcgtagtcggtatagttgacggcggacaagactatacggaaattacaaaagagctgaaagcaaaactgctgaccattccgacattggatgttgtaatcggcggacagcgtagccctttgatggtagcggtaagccaaacgacagcatccctttataaatgcttcaaaggagaagtccgtagaatcagttatccggaaaaataagtgtggaacggtttagtgaatatcgcattatgtgggtacttgtttttttcgaccttccgacggaaacaaagaaagagaagaaagtatatacggattttcggaaaagactgcaaggtgacggttttacaatgttccaattctccatttatttgaggcattgcccaagtcgcgaaaatgcagatgtgcatataaagcgggtgaaatcctttttgccggacaaaggtcatatcggaattttatgcataactgacaaacaattcgggaacatggaactgttcttcggtaaaaaagaagcaaatccctctacacccggacaacaattggaacttttttgaagcaacagaaaaagaaaagcctactgctacggtaggcttttcttctctaaacaacctcatttttccaccctaaatcttcgcttaccaatctgatactcaaacaaaagcagataataagttgtttatggtagcaaaggtaataataattgaaagcaattcacaactgtgcatggatgtaccatgatttgccttcagttgtttatggtagcaaaggtaataataattgaaagcaattcacaact

SEQ ID NO: 1764 - DNA, 7700 bp, synthetic construct
  source 1..7700: mol_type = other DNA
  misc_feature 1..7700: note = Synthetic
gtccccattggaaaagatttccgctttaaactccgtccttccctttttgcacttcctgatttccttattctcagcctccatagcctgccaacggtactgtattctcaggtcctgaagcgcatccttgaactctttctgcacatgaaaccggtctataatctgcttggctaacggaaagcattttttcgcaatgcgcgacatgcttcctgacatgtccagggttatcgtcttgactttacgccgtttgccgacaggtagtttacggagcagccatctgcacacgtcgtcgcttttggtacctttaatcatggctatcagactgcccttcttcccatgcccgtccttgtttgttacgatagtatacaactcaccgttactgaatgaggtttcgtcaatggagagatgctcgccaagattggatgggaagcacatgtattcatccgcatgcccggcgagttcccagtccgtaaagccgctcaggtgattcctgtagtaatctgtcagttgggaacttttgagcttacaaattcttgcgacactggtgatgtcagtctcggtgttatcaatgtaactcttttaaaaaagcaccaaattccttggtgatacgtgtgccttcagcaaccaaatcccagttgcggctgtaagtcttgccagtcaatggatcctcccagcgacgacggcgaatcttgagatatacattacggtcacgggcggggaaatctgttatgacagtttcagggaaaaagccttttgacactaatttcatatgtgaatgttctaatgggataactttttgttcttccaggctgatgagataataagaacccatatcggaatagtcgactatgtcgaaataatccaatattccctgaggaagaaaaagggataataccgatttataatctacttgtttacgttgcataacgcaaagatacacttttatggcaaattgttaaatccccaagaataataactgagcccataaaaaaaacccaccgataaaggacgatgggcaagagcctaatgttttcacaacggaataatccttattgtgaattgcttcaatttagtatcagcaaaataatcaaataaaagtcgtattagcaaatatttacgataaaatatttatatatttgagaaaattataatcaaatagctatgaagagaatattagggcttgatctaggctcagcatctattggctgggcacttatcgaagaagatgaaaaagggataagaataatagcattaggtagtcgtataattccttacaatggtacagaaggacaggattttgccaaaggtgctggcgaaagtcgtaattctttgcgtactcaagcacgtacgactcgaaaaggatatgaccgttatcagttgcgacgcaaatatttaatcaatgtacttgagaaaaatttgatgatgcctagtgaagatttaaggaagatgcctaaaatgaatctatggcaattgcgtagtaaagctgttacagaatatatatcgcgtcaagaattaggacgcttattgctttggctaaatcagaaacgaggttacaaaagtagtagaagcgatgctaatttagacaagaaagatactgattatgtaaaagaagtaaaaagtcgttttgataagattaaagagaaaaatcaaactatcggtcagtatttctatgaagaacttcagcgtgacgagtattttcgagtaaaagaaaatgtgttcccacgtgaggcatatattgcagagtttgatgctatttgctcaagacaaaaagatcatttaggactttcagaagaacttatagctgaaattcgtaatgagataatctactatcagcgtccattaaaatcgcaaaaaggtcttgtttcagtttgcgattttgagggaaagtggatgaatcagaacggaaaagaattgtttatcggtccgaaggttgctcataaaagttctcctttatttcagttagcaaagatttgggagggtgtgaataatatcaagttgagcactaaatatggcgatactatagaacttactcttgaggaaaagaagcagttggttgaattcttggataataacgaaaagttaactacggcagcattattcaagattttgcgtaaggataaaaaagaatatatactgcccaagcaattggaaaaaggcttgcaaggtaatattacaaaatgtaaaatagcagatatattaggtagcaaatacaatcagttacttcagctgaatctagagaaacaggaagtaggaactccgtgttatctatatactaaaagtacaggtgaagtacttggagaaaaacctttgcaatatatagataaatcggtagagaaagaattgttctatcagttgtggcatactatttattctatttcagacgaagacgaatgctgtaaggcattacaaaaacgctttgacatagatgcagagacagcatgtcgacttgcccaaattgatttcagtaagtatggttttggtaataagtcagctaaagccattcgtaagatattgccttatcttatggaaggcgataaatacagtgatgcaatgtgctatgctggttataatcactctaattcattgactaaagaagagaatcatgagcgaaagctgaatgataagttaaagttgttagctaagaattctttgcgtcagcctattgtcgaaaagattatgaaccagatgattcaggtggtgaatactattattgacaaatatggaaaacctgatgagatacgtcttgaactagctcgtgaattaaagcagagtaaagaagaacgtaatgatgccgacaaggcgatgagtaagcgccaacgtgagaataaagaggctgaaaagaaacttgaggaacatggaatacgtgctacacgtaacaatattctgaagtaccgtctatttgaagagatgggagagaaaaagcatgaagcaatttgtatttattgtggaaatcctatttcgttttcggctgcaatgaatggcgacgaagtcgacgtagaacatataataccgagatcaaagttgttcgatgattctcagagtaacaagactcttgcgcatcgtaaatgtaatgccaataagaacgatatgactgcttacgattttatgaagactaagtcaaagcaggattttgataagtatgtagaaagagttaatcaattatatgcagatagaattataagtcgttccaagtacaataagttattgatgtcagaagacgatatcccgagtaattttatagatcgtcaattacgtgagagccaatacatagctacaaaggcgcgtgagattttgcaaaccatatgttataatgtgtggagtacaagtggaactgtcactgctgaattgcgccatttgtggggatgggatgatataactatgaacttgcagatgccgaagtacaaggaacttgggctgactgaaatggtggaatggacaagcgatcatggaaagaatgtgcattctaaagaagtcataacagggtggaccaaacgtgacgaccatagacatcatgctatagatgctttgactatagcttgtactaagcaaggatttattcagagattcaataccttaagctctagtaaaacgcgagacgatatgcagaaagaacttgaaaaatgctctatacagtttagagagaaacgttctctgttagaaaagtatatcatatctcagcgtccgatatctgtaagtgatgttgcggaagcagtgtctcgtattttgatatcctttaaggcaggtaagaaagtagctactatcggaaaacgaaaagttaatggaaaggttgtgcagcaaggtattgttgtaccccgtggagcattgagtgaagatagtgtttacggtaagattcgtacgatagttaggaagatgcctgtaaaatacttattcgaaaatccggatttgatatttaaaccatacatcaaagcattggtaaaagaacgcttggcagagtttgataacgacaagaagcaagcccttgcttcactcaagaagaatcctgtttatttggataagcagaaaacaaagctattggaatatggcacttgctttaaagatgagtatgtaaagaaatacgatgtcaatcctaattttaccaaaattgctgatgtgattgatggcaaggttaagcagattcttgaagatagacttggcaagtttggtggaaaacctaaagaagcgtttaaggatgtggtaaaaggtgataagaccttgaaatggtatgaagacgaaggtttagagcgtcctattcgttccgtacgttgccttacaggtttgtcagctgttgttccggtaaggaaagatgagaatggtacagatattggttttgttaagcctggcaataatcaccatgtagctatttatgtggatgctgacggcaaaggacaagaacatgtatgtacattctggaatgctgtagagcgtaagaagtacggtttaccaattataattaaagatgcgaatgatgtttgggataaaataactatggccggtgatgatgtatatcctcagagtttcttaagtctgttgccaaaacctgattggacattgaaattgagcttgcagcaaaatgaaatgcttattttaggaatggaagaagatgaagtgaaatacgctatagaaagtaaagactataagttactgagtgatcatttgtatcgtgtgcagaaattatcaagtagtaattatgtgttccgtcatcatttagaaacgcagattgtagataatgatgagtcgaaaatgagtaaaaggtttttcaacacacgaagcttgaatgctttgtttgcactcaagccttttaaagtacgaattgactgtctggggaatataataccatctagcctatgataaagaaaacactttatttcggaaatccggcttatctatcgcttcgtaaccagcagttggtgatcaagcttccggaagtagtgaaaagtacttcaattccggatgggtttaagcaacagacagaagtgaccaaaccgatagaggatattggtgtactggtgttagataataaacagattaccattacacaaggagcattggaggcattgctcgaaaataactgcgcggttataacttgcgacagtaagagtatgccggtaggattgatgcttccgctgtatggtaataccacgcagtgcgaacgctttcgacagcagattgatgcttcgcttccgctgaaaaaacaactttggcagcaaaccatacagtataagataaataatcaggccatggtgttggagcaatgtgtaggcgagaaacataagtgcatgtacgtgtgggctggcgatgtaaggagtggcgatcctgataacttggaagggcgtgcggctgcttattattggaagatactgatgcagcatatccccgattttactcgcgaccgtgaaggtgttcctcccaataacttgctgaattatggatacgccatattgcgtgcagtagtagcgagagcgttggttacgagtggcttgcttcctacattaggcatacaccatcataataggtataatgcctattgtttggctgatgatataatggaaccgtatcgtccgtatgttgacgagttggtatatggattgattaagcagaaaggacttcctcacgaagaactgactaaggaatggaaggcggcaatgcttgctgttcccactttagaagtgaaagttttgggtaaacgaagtcctttgatggtagctgtggctcaaaccacggcatctctctataaatgtttcagcggagaattacgaaaaatcatttatcctgaacggtaagtatggacaggtttagcgaatatcgtgttatgtggatattagttctttttgatttgcctacagaaactaagaaagacaagaaagcctatgcgctttttcgtaagaatctgcagcgagatggatttaccatgtttcagttttccatctacgtacgtcattgtgccagtcaagaaaatgctgcggttcatataaagcgtgtcaagtcgttcttgccagaatatggtaatgtcgggataatctgcataacagataaacaatttgctaatatagaattattctacggaaaaaagcctcttcctccagaggctcctggtcagcaattggaactcttttaaatataaaatcccaccgttgagtgggattttatatttaggaacatcttaaattttaatttctaattttctttgtaatatactgtggtacagaagataataaataatctggtgttcctagtaggacaaagatactaaattgaaagctattcacaacttatagctgggacttctgtgtcttgctgaaagaattggtcgaagaaggtgaggttccgatgacccgcatagatgatgccgtacgtcgggtacttcgcatgaaataccgtctaggcttgtttgaaaaaccttataatgactacaaggattatccgttattcggtagcaaggaacatgcagctgtcgctctgcaagcagctgaggaatcgttggtcctgttgaaaaacacagaccagatattgccgttggcaaaaggcaagaagattctggtaacaggtccgaatgcgaattcaatgcgaaccttgaacggaggttggtcatattcttggcaaggtgacaaggctgatatgtgtgcggaggaatataacaccatactggaagcctttgtgaataagttcggcgcagagaatgtgatatacgagccgggtgtaacttacaagcaaggcggtttgtattgggaagaaaacactcctgacatcaagaaggctgtagaggcagcagccgatgccgattatattgtggcatgtatcggcgaaaattcgtattgcgaaactcccggtaacttgacagacttggacttgtcggtaaatcagagtgacttggtgaaagctttggctgcaacaggcaaacctattgtcctgatattgaacgagggtagaccccgcatcttgaacgaagtggagtctttggctaaagttgtggttaatattatgttgccagggaactatggtggtgatgctttggcaaatcttgtagcaggtgaagtcaatttcagcggtaagatgccatatacctatccgaaagaaatcaattcattgattacttacgattacaagccttgtgaacatattggaaccccaatggaaggagcatataattacgatgcccaagtgtctgtgcaatgggctttcggatatggtttgagctatacctcttatgaatacagtaacttgaaagtcaacaagacaaagtttgactcagatgatgtgttgacttttacagtggatgtcaagaattcgggacaaatggctggaaaggaaagtgtcttgctgttcagcagtgacttggtagcttctctgactccagataatcgcagattgcgtgctttcacaaaaataaatctgcagccgggagaaacaaagaccgtgaccctagatgtcaaggcttccgacctggcatttgttggttatgatggaaaatggatcttggaggctggtgatttccagattcaggtaggcaaccaagttgtcaatgtaacttgtaatgaaacttataaatgggatacgccgaataaaacgttctgatcattgttatcttcaaggtacatagatttttgttcttgtatctcgaaaagaagagttcctgattctagacttagaaaaaggaactctttgctttgttcgcccagcacgaacgtactctaacgggtgcaagt

SEQ ID NO: 1765 - DNA, 7454 bp, synthetic construct
  misc_feature 1..7454: note = Synthetic
  source 1..7454: mol_type = other DNA
gggaaaatcctgataaacttgtttcatcaggggaaaatcctgataaacttgtttcatcagggcaatggtcggggtttccgaactaaaattggtttgtggatgagattctatttagtcttgtgtgtatatttatttaggtattttggacccttgagcggaactgaaacgatgctctactttaacaaaaattgctattttataccctactatttatttcaataaacaacatagtttaaaccaactcagtaggagttaaatactattaacacaaaaaaggcatttaaatgcagttaggtgtgacagataaaaaataagatccaaatgatattgtattgtatatgattttaaatttcttgtggtaaggatcatttgatacgtgattgaatccaatttctaatttcatcaaaacgcatagtgcccgtacttgctgaaataaccatttcatatttttcgtcttgttttgcttcaatatcataaccaccctcaaggagaatgagtctcatgagtacataagcagttcttttattaccgtcaataaaaggatgattgattaaaacactttccaaaattgcagctgctttttctggtaagcttggatataactcagaattgtcaaaggttgcatatggcctatttatagctgactcaagcaaaccctgatctcaaatacctttaatccctccaaatttatcaattaggatatcatgaatattaagaactactttcaattcaatcattgagccaatttttcaagtagttctttgtcttctgaaagaatttgacgtaagctatttgagagtctatgtttatcctctggctggtttttaaattctttcagaaaatccaaaacatcttgtaatacattttcaggaacactgtcaagcgctttttgaatttctgattttaattgagttttggtcatattcaaatataataaaatgtaattatattgatttcatgttttccatgaatgttctatcccaattgggaacttcaacagttccgaaaccattttgtatttaataatttggtaatgtctttcgtaaagggtcttgcttaattgttcaattataaatcttcagtaatcaattaacggtatttaataccaactccgtaggagttgaatactattaaccctaaaaaaaggccatcacactccgttaggagtgtaatttaatagcgaagcctaattgtattttagaaaattcttctgtgaatggtctaatgtgagtagttaattgatgctaccttttttcttgataaaaaaggtacccaaattttaatatccagacaaactagtttcatcaggggaaaatcctgataaacttgtttcatcagggcaatggtcggggtttccaaacattaattggtttatggatgaaaatttattttttgtttgtgaagtgttgttcgcgaactattgttcaataggacggcttagcggagccgaagccaatagttgtgtaaatgaaatcattttaagaattcaacacaaaactccctaattaaattctggcataatttttaaattatcaattatatttaataaattgataccctcattgcctgttttattattaattaaattaattatttttggaaatacctttatctacctagcttatgaaatctaccaaaataaaaatcaattccacttatttcaaatcatacgaaacaagtatcaatttaaatctgtaccccttcattcaagatacatttacaggaattttaaaataaaaaaaagcgaacctttcgacccgctttaaatgttttcacaacggaaaaaatccttattgtgatttgcttcaatttgtgagacaaatatataacaatatttaaaaaatcaaattatgtcaaaaattttaggtttagacttgggtgtttcttcaattggatgggctgtaatagaggaaacagaatcaaaaaattcaatattaggaatgggggttcgtattattccattgtcaacagacgatgccgacgaatttacaaaaggcaatgccatttctaaaaatcaaaaacgaacacaacgcagaacacaaagaaaaggatacgacaggtaccaattaaggcgctatacactcaccagtttgttaaaagagaagggaatgctccctgacgaatctctcattaaattacctcaattggaattatggcaattaagagcaaaagccagaacccaacaaattagtttaccggaattgggcagggttctttaccatttgaaccaaaaaagaggctataaaagtagccgtgccgatgaaaatcaagataaaaaacaaaccgattatgttcaagaaatcataaacagagacggttctttaaaagcaaacaatttaactatcggcgagtatttttaccagaaattacaagctaatacaaacacgagggttaaagatgaaatattttcaagggcaacctacatatacgagtttgatcaaatcattgccaaacaaaaagaatattaccccaatttattaaccgaacaaacaattcacaggttaagaaatgaaattatatactttcaacgcaaacttaaatcgcaaaaaggcttggtaagtatctgtgaatttgagggcaaatacattaccaaagaaaacaagaaaatattagctgggccaaaggttgcacccaaaagctctcccctttcacaagtttgtaaaatatgggaaaccattaacaacattactttaaaaaacaaacggggagaaacgaaagaaattacacttgcacaaaaacaagccctattccaaaaattagacaatgctgaaaaactatcagaaacagaattgtttaaaattttagagcttgacaaaaaagaatactcaggcaatcaacatactgaaaaggggcttcaaggcaatacaaccaaagctaaactgattaaaacaattggaaaacatcctcagttaaatgaattgcttcaattcaatttacactcagctgaatatgaatttacaaataaaaacaccggagaattctttaatagattaaaagtagatgcttcatttgaacaagaaccattgtacaaactttggcatattatatattctattaatgacattgaagaatgcaaaaacacccttattcagaattttggatttgaaaacgaattggctggaaatttagccaaaatagattttgcgcttcaaggatttggaaataaatcggccaggtatatgcgtaaaattattccttatttgtctgctggttatatgtacagtgatgccgctcagatggctggatttaaccactctaatagccttaccactgaagacaacttacaaagaaaattattagacaaattgccattgcttgaaaaaaatagtttaaggcaacccattgtagaaaaaatactcaaccaagccattcatgttgtaaatgctgtatttgaaaaatatggcaaaatggacgaaataagagttgaattggccagagatttaaaacaaagtaaagaggaaagaaataaaacaactgcaaacataacaaagagagaaagggaaaatgaaaagcatgccaaactaattgctgagttaggtattagaacaacaaaaaacaatattcagaaatatagattttacaaagaaattaataatgatgaatcaaagcttggtgcattatgtatttattgtggtaatcatattggaatatcagaagcattatcaggcgaccaagtagatattgagcatatcattcctaaatctatgttgtttgacgactctcaaaacaacaaaactttgtcgcacagaaaatgcaaccaagaaaaaaacaaccgaactgcatttgattacatgtctcaaaaaccaaaagaagtatttgaggcgtatttagatagggtaaatcacctttataacactaaagtaattaacaaaacaaaaaaagataatcttctgaccccagcaaataaaatttctaccaattttattgagaggcaattaagagaaacccaatacatcgctaaaaaagccaaacaattgttagaacaagtttgcttcaatgtttatagcaccagtggctctgtaacagctcatttgcgcaatgtttggggctggaatgatgtgttaatgaatttaaacttacctaaattcaaagaagctggtttaactgttattgaagagcgtgttgataaaagtggtgttgttcataaaaaagaagttatacaaaattggagcaaaagagacgaccaccgacaccatgccatagatgcattaacaatagcttgtaccaaacaagggtttattcaaaagctcaacaaattgagctcagaacatacccaaaaagaaatgtatgaagctgttaaaaattctggaacaccttacaataaaaagttgagcaaccttgacaattacttggtaaagaacaaaccctttactacccatgaaatagaaaaagaagccgctaaaattatgatttcatttaaatcaggtaaaaaagtggctactattggttccagaaaagtaaaaataaacggcaaaaaaactgttgtacaaaatggaattgtcattccaagaggagccttaagcgaagagagtgtgtacggtaaaattaaagtcatgaacaaaaacatgcctttaaatgaattgttcaaagaccctgaaaacatcgtttcacccaaaataaaagccttggtattggctcgcatacaagaattgaatggtgacactaaaaaagcaatagcctccttaaaaaaagaacccatttaccttgacaatgaaaaaactcaagaattaagctacggctctctttttagcatagaaacagttctaaaatacccaattgcaagtatcaaagaaaaagatttgaaagatgtagttgatgatcatatcagaaaaatattacaagcaagaatcaatgaaaaaggagaaaaagaagcctttaaagaaccgctcttcattgatgccaacaaacaaattcaaattaaaagtgtacgaattaaaactggtttagattctgtagtaccagttcgtaaaaatgagcaaaatgaagccattgcatttgtgaagccaggcaacaaccatcacatggcattttacaaagacactgatggaaaggatgaagtacatatttgcagcttttggcatgcagtagaacgcaagaaatacaaattgcctgtggttattcaagagcctaaagctgcatgggattctgtttttcaaaaccctgaaaaataccctgctgaatttaccgaaaagttgccaaaagacaattggcaatttgtactaagcatgcagcaaaatgagctgtttgtattgggtttggaacaagcagcatttgatgaatatgtagcaagtaaaaactttgaagaaattgcaaaacatttatacagaacacaaaaaatgtcgattataagttcgggcgctattgacttttggtttagacagatttatgaaacaaatttaattgatgataaagcagctaaagacctgaaaagattttatagaattcaaagtattaaatccttcatggctatcaatccaattaaagtaaaaatcaatacacttggaaaactgttgttatgatcaaacgaaccttgcattttggaaaccctgcttatttgagcatgcgcaacaaccaattggtcattaaattgccagaggttgaacaaaaccaaactttgccagagttcattaaaaaagaagcaattagaaccatacccattgaagacattggggttgtgattttagacaatcaacaaattacccttagccatgctttgttatccgcttttatggaaaacaatgttgcattgatacagtgtgatgcaagccatcatcccttgggtttaatgctacccttgcacagcaatacagtacaacatgagcgctaccaatctcaattggcatcaagtgagccattaagaaaacaattatgggcacaagtagttgcacaaaaagtaaaaaaccaagcaattgctttggccaaaagcactggtgacggaacttatttagaacagttgtctaaacaaattaaaagtggcgatagcaacaatattgaaggcacggcagctgcgtattattggaaaagaatttttactcaaataaatgattttaagcgcttccgagaaggcagccctcccaacaattacctaaattatgcgtattccttgcttagagccaatatggccagatgcattgttgcagctggcttgttacctactttaggtattcatcaccacaaccggtacaatgcttattgtttagctgatgatttaatggaaccttacaggccttttgccgacttggtagtagttcaattgagcaaacaaattgaaatgcaagagcatctcactaaagaccataaaattgaattgttaaaaataccaagcatggatgtaattattaatgacgaaaacagtccattaatggtagccatgcaaaaaacagcatacagcttggtaaaatgttacgatggacaagccaaaaaattggtcttacctacatttaaaacataatccaattaccatgtataaccgattaagtgcttatagagttatgtggacacttgtcatgtacgatttgccaactgaaacagctttagaaagaaaagtggcggctaaattcagaaaattattaatgaaagatggttttgacatgtttcaatttagcctgtatttaagacacagcccaagtgctgaaaacgccatggttcacaggaatagagtcattcatttattgccagaacatggtaaagtaggaattcttcaaataaccgacaaacagttcgaaaacatggaaattttctatggaaaaaaggcagcccctccccctgcgattatccaacaacttgaacttttttaaataaaaaaatccggtaaataaccggatttcaaaaaaaatcattcgttttttaaatcaacccaatggctcgaaagcctcatcaggcaggcactttggctaaatccgttgttggatataagccaaagatacaaattgaaagcaaatcacaactttaagtgatgaaacatatccatctgtgctgttgttggatataagccaaagatacaaattgaaagcaaatcacaacttatcatggcttaaatgttttgttgtaatagttgttggatataagccaaagatacaaattgaaagcaaatcacaactaaatcaattaaagaaaacacaggcattagttgttggatataagccaaagatacaaattgaaagcaaatcacaactatcacccatgttgtttggtgttcgtgttggttgttggatataagccaaagatacaaattgaaagcaaatcacaactcaccaagtatttgctttgccatgaatcaggttgttggatataagccaaagatacaaattgaaagcaaatcacaacattgttttaatgagttcagcaatatcatatgttgttggatataagccaaagatacaaattgaaagcaaatcacaacttatcatggcttaaatgttttgttgtaatagttgttggatataagccaaaga

SEQ ID NO: 1766 - DNA, 6757 bp, synthetic construct
  misc_feature 1..6757: note = Synthetic
  source 1..6757: mol_type = other DNA
tcggagatgtgtataagagacaggttgtcggacgattaattattgggaacaaagatatagtttttagtaatgcggaggggagggttgggtgagaaatttatagattgcaatgaagtaggtataagatatcgtgtatttctgtctctcaaaaatggtattaaaaacaaaaagggcgagtttccccaccctaaatgctttcacaacggaataatccttattgtgatttgcttcattttagtttggcaaatgtataaaataaatatggaaatgcaatggaagctaatagaactttgattatatttgataaaaaatgtaaataacgtattatgaaaaggatattagggttagatttaggttcagcgtctataggttgggctcttgttgaagtaaattgtaatgtggtaaaaatcatagcattaggtagccgtgttattccgtataatggcactgaaggacaagattttgttaagggagcaggagaaacccgaaatgctttgagaacaaaggctcgtactggtcgtaaaggttatgaccgttatcagttaaggaggaagcaccttgttgatgtgcttgtaaagaacgatatgatgcctaatgaaaaattgaagtgccttcctaaaatgcaactatgggaattgcgtaataaagcagttactcaatatatctccaaacaagaattagggagaatattactttggttaaatcaaaaacgtggttataaaagtaatcgcagtgaggctaatttagataaaaaagatactgaatatgttgctgcagttaagtgtaattatgagaagataagggagaaaaatcttacgattggacagtatttttataatgaattgcgtagtgacgagtatttccgtattaaagcgaatgttttcccgcgcgaggcatatcttgaggagtttgataaaatttgtgagaaacaaaaaaagcatttaggattgactgatgaactggtagctcagatacgaaatgagattatttactatcagcggtcattaaagtcacaaaaagggcttgttgcagtgtgtgattttgaaggtttttggaaaacaatagacggtaaagaacgtcttgtcgggcctaaagttgcaccaaagagctcacctctatttcagtttgctaaaatatgggaaagtgtaaataatataaagttaagtacaatatatggcaaaactattgaattaacattagaagaaaagaggaaaatcgttcattatttggataataatagtaagctgacatctgtagaactatttaagattttacataaaaacaagaaagatttcattgtgtccaagcagttggaaaaaggtattcaaggaaatattgtgaaaactgaaataataaaggcattggataaagaatatgacgaattattgagttttgacttagctataattgaagaaatagacaagtatggttatttgtacgataaaaagactggagaagttttgaatgaaaaaatattgaaatgtgttgattcgaaaatagaagaggaaccattttatcagctgtggcatacaatttattctataaatgatattcaggaatgtagtaatgcattgcagaaagggattattatagctaagaaaacggagacaaatgatgaagtaagaataaaaatcgataaaaaaacagctgataaacttgcagctattgattttaataaattaggctttggaaataaatcagcaaaagccattcgcaagattctaccatatttaatggagggggataaatacagcgaagccatgagttatgccggttatgaccattccacatcttggacgaaggatgaaaatcttaaacgggatttattggacaagttgaaacctatagaaaagaattctttgcggcaaccaattgtagagaagattcttaatcaaatggtcaatttagtaaataccattatagagaaatatggaaagcttgatgagatccgtatagaattggcgcgtgaactgaaacaaagtaaagatgaacgcaacgatgccgatttaaaaatgaacaagcgtcaacgtgaaaatgaggtaatagcagatcgtttaaaagaatatgatttgcgagcaacaaaaaataatattctcaaatggaggctatatgaagaaattgaaaataaggatggtaggttaaatgctatttgtgtttattgtgggcaaccgatttcacttactgaagcaatacttggaagagaggttgatgtagaacatattattcctaaatcaaagttatttgacgattcacaaagcaataaaacattagctcatcgtcgttgtaattcttccaaaaatgatatgacggcttatgattttatgaaaaacaagtccgaacaggagtttgatgcttatgtagaacgagttggtcttttgtatgcaaaaaagataataagtaaggcaaagcgtgataaattacttatgtctgaagatgaaatacctgataattttattgatcgtcaattgcgcgaaagtcagtatattgctagaaaagcccgtgaaattttgcaaaccgtatgctataatgtttgggctacaagtggaactgtgactgcagaattgcgtcgtctttggggatggaatgatattacgatgaatttgcaaatacataaatataaaaagtttgggctaacggaaacaatagagtgggaaagtgagcatggaaaaagaaaacattcgaaagagattattaaagattggtctaagcgggatgatcatcgtcatcatgctattgatgcactaactattgcttgtacaaaacaagggttcattcaacgtttcaatacattgaatgcaagtaaaacccgtgaggatatgcagagtgagatagaaaaatgctcagtggaatataaagaaaagctcactttgttggaaaaatatatcatctcacaatgtccgctgtcagtggcagaggtggaaaaagctgtttctcaaatacttgtatcgtttaaatcgggtaaaaaagttgcagtctggggacaacggagagtctataaagacggaaaaagcaaggtcgtacaaaataggattcttgtaccgagaggcgcattgagcgaacaatttgtatatggaagaattcgtacggttgggaaagagaagaaaactcttaaatatttatttaacaattctcatctgatttctaagccatatattaagatgttggtggaagagcgtttaagccaatacgaaaatgatattgaaaaagcattgacgtcattgaaagacaaccccatttatttgaatgcggataaaattaagatactggaattcggtacttgttttgaggaaaagtatgttatgaaatataatgttgatgtaaactttactaaaacagagaaagttgtagataaaaagattagaaatatcctccaaactcgtttgcagaagtttggtggaaaaccaaaagaagcatttaaagatgtacaacaaggagaaaagactttaagatggtatgaagatgagaaattggaacgtcctatctattctgtacgttgttttacaggactttctgctgttgtaccaataaaaaaagatgagtctggaaatgaggtcggttttgtaaaacccggaaataatcaccatattgctatttatgtggataaagatggtaataaaatagagcatgtttgtactttctggcatgctgtagaacggaagaaatatggcatacctgtcattattaaaaatacaaatgatgtttgggataaaatttgtcaacaaccggatggtacttatccacagagttttctggagcaacttccaactgttaatttggaaataaaattgagtatgcaacagaacgaaatgttcattttggaaatggcgcaggaggatgtaaaggttgctattgaaaataatgattataagaaagttagtgaacatttatatcgggttaatagtctttcctcctttgattattatttttatcatcatttggaaacaaaaaaggatattaaaaatgcagatgcaaagaaatgtaaaagatattttagagttcgaagtgtgaaagcactatttttacttaatccggttaaagtgaagatagattatttgggtaatattatgcaatgaatcggaaaatagtagtttattgaggttacagggaacagactgtgtgatatttgttaatgagataagtgtcgaatagaaaataggattatgagtaatattaaattatttcaagataagaaaattcgttctgtatggaatgaagaggaacagcaatggtatttttccattattgatgtagttgaggttttgactgatagtgtcgatcccaaacaatatataaagaagatgcgttcaagggacggtatattaaatttgaactggggtacaatttgtaccccagttcaaatgacggcagaagatggtaagagaagaaaaatccagtcagcaaatataaaaggactattccgtatcattcaatccatcccctctcctaaagctgaaccttttaaactttggctggcacaggtggggtatgagcgtgtgcaggaaattgaaaatccggaattggctcaggaacgcatgaaagaactttatgagcagaagggttatccaaaggattggattgataaacgtctgagaggaattgccattcgtcagaatttgacggatgagtggaaagaaaggggaatcacggaaaaaagtgattatgccattcttacggcagaaatatctaaggcaacgtttggattaagcccttcggattataaaatatataaaggactgacaaagaagaatcagaatcttcgtgaccatatgtccgatttggaattgatattcacgatgcttggcgagcgtgtcactacggaaatctctcagaaagagaaaccggatacatttactaaaagtaaacaagttgcacagcgtggtggaaatgttgccggagtagcacgtgaacaggctgaaaaagaactgggtagaagtattatttcttccgacaattttttgttggattcagataagcaagatgataccttaaaacttccttttgaggaaaatgatgaatgaataatttgtaaaatctgtatactatgattaagaaaacgctttatttcggaaatcctgtttatctctctttgaaaaatgctcagttggtgattaaattgccggaggtcgtaaaaagctgtgccttgcccgaagggttcaagcaagtgtctgaggtgactaagccaatagaggatattgggatagtggtattggataataaacagataactgttacttcgggagtgttggaggctttacttgaaaatattcttaactctcttaaaaatacacacttaaatatgctataatcaatatgttataaagagggtgattttaatagagaaacaaataaggaacaaaaataggaattaaagtgatttctcgtttttctatttgcactctgtttctttcttttcgtttgtttgctttcagagtgcattccgagcaattttatctgctctcatcattcgaagaatttgctcctaactttaataacaaattatttgcagctcataaagagaatacaaattatttatctcttgaagttgtattgcttgtagcaaagataatcttttttgtacaggcagccaaaaatgcctgcctatatttagtttaatttagtttagcatatataaggctaacaaactaaaccaaactggattttcatgttacttttgtgattttcccattctacccatacagccaaaagagaagataagctcttgcctcttttctcttttcgctgcgatactcttttacttcatagacaccttttacacacatccgtaccgagtaaactcccacatgctcgcatatcaactttcggtctgcctgatgggaattgtgtcgcaaaggtatttgccatgtctttatgtatgcaaggttgtaacctgaaggttcactataaaatctccacgctccgcttcgcagaggtagtattttgtagtgaaaccctgcatacatagccatgccacctgttgaagcgacataatttcaatcaagcccgaaagtaagtgaaatgctacaggagggaaagtaacaaacttaaaacttagtatttatggcaaattatgcaaccaacattttccacgcaagaacggaaaataaaacagacctcgacaaaatagaggatttcttggatgacactttcagcgaatttaccaatcgatatggtgatagtgtagatgcagaattttcctctcgttgggtgtatccagaagaagaaatcaaaaaattggtagaatcgttggaggacaaagataaagtctatatcaagattctaacctatgaatttgaagacgagtacgtgagctttagaatattctctcagggagaatggaaggtcaaattagtaactgaatgagtagaagaagataaagtaaaattatggtctatcctacagcaaagagagattattaaatactgtgacgaagtaatttttacaattttacaacatagaaaccatgacacagatagcaatgaaattcgtccaatgggatgtgcccgaattggaaaaactgaaagatagcaaggtttacaaattacgggaacgtcttgataatggcgacaagttgagtcgggaagaaaagaactggctcacccgtaatgtgaaagagtgctgctatttcaaaagaggtatcgctttaatgggctaccgttttgacttctccgatgttctcaaacggtattttgtgaaacaacacggacatattgccgaatattatgccattgacaaaaccgcactacgttctgtcctatat

SEQ ID NO: 1767 - DNA, 6585 bp, synthetic construct
  misc_feature 1..6585: note = Synthetic
  source 1..6585: mol_type = other DNA
ggggcgggccttgatgtcctttctgttgaacctccttctgataagaatcctcttcttaaagctgcgaattgttttttaacaccgcatattggctgggctacacatgaatcaagatcgcgactgatggatattgctgcagagaatctgaaagcttttctggccggttcggctgttaatgttataactgattagacgataaacagctttcttagaaaaacaattttccccttttctttttttttatatttctgtttttaacagatacttcagaaaaacaacaactctttccgcgccggataggaaaactctttgttgagattaggggaatcgaaactgcttcaaagacttttaaacgggtaggtaatcctacaatttttacagaattacaaaaaaaaattcaactaaatttatttttaaaattcggagtttgatattatggcccaagttaaatttttgatttagggattttcattaatagagcatgttatcttccttttgaatttggttataaaaaaattgttgagcttattgaaaatggatcaaataacgttaaggcttaagttaaaatataatcgattagatttttaacgagaaaagaaacgaatcaacagattaggtctaaaaattttatggatatagcaaactaccaaagttgattttaacgaaatataaaaattatcttaattacataacatttttacgaaagacatacttcattcacgccataatttattaatttctataaaattcgaatttacaggctttggcaaggtttttttgagaagattccttaaatttgagaattagctatttatttaagggaaaaatgcccccgtattataggacgagggctacctgaatgttttcacaacggaataatccttattgtgaattgcttcagattgtacatcaaatatagtaaaaactattaaatactcaccaatgaaaaaaattctcggacttgacctcggttctgcctccatcggatgggcgttagtcaaagaaatcagagaagctgacaaccacaaaactgaaattattgatctcgggtgcaggataattccatatgagggaacggaagggaaggactttgcaaaaggcacaggcgaaagcaggaacgcagtcagaacagcagcaaggacaatacggagagggtatgatagataccagatgcgaaggagatttcttacagacatcctggtaaaacactccatgatgcctgatgagactataatagcattgcctaagatgcagctttgggcgctaaggagcaaagctgctaattcagagatatctcttcaggagtttgggcgcattctattattattaaatcagaaaagaggatataagagtagccggagcgaagcaaaccttgataaaaaggatactgattatgtgtctgaagtgaagaacaggcacgaaatgataagagaacagggtttaacagttggtcagtattttttcagagagctccaaaaggatgagtactaccgagtgaaggaaaaggtatttccgcgggaagcatacatggaagaattcgacaggatatgcaagacacagcaggtatttcatcctgaaatagcgcaagaacttattgacaagattaggaatgagataatttattttcagcgtccactgaaatctcaaaagggattagtatctgtatgtgagtttgcaggcaaatggataaagaagaacgggaaagactatttcatcggaccaaaggtagctcctaagagctcacctctgttccagattgaaaaggtttgggagacaataaacaatatcaagttaactacccgatctggcagtgatctggaattaacgcatgagaataagctggctatcttcctacaccttgataacaatgaaaaactcacagctacagatctttctaaaatacttaacttaaagaaaggaagcatcatcttaaataaacagttttccaagggattacaaggtaatctgacaaagcaccttatatggaaatgcctgggaagcactgataactatactgatctgctgaagttggatcttaaaatcatgaaagctgacggtgaagcttacctctatgaccgcaggacaggcgaagtgctgacctccaagccagttcatgtaattgatccttgtgttgaaaaggaacctctttacaggctgtggcacacgatatattccataagcgatcgtgagaaatgcaagaaagtcttacagaagaatttcaacatcgctgagccagtatcagaaaggcttgctggcattgatttcagcaggcaaggattcggtaataagtcagtcaaggtcatccgtaaaattttgccttatttaatggagggagatggttatactgaagccatgagttatgccgggtataatcattcgaggtccgttacaaaagttgagaaccttggaagaatacttgagagtaagctgaaactattgccaaagaattctctgcgacaacctgttgtcgaaaaaattctgaaccagatggtaaatgttgtaaacactattattgaaaaatacggcaaacctgatgaaataaggatagagcttgcccgtgagcttaaacagagccgggaagaacgtaacgagacagacaagtcaatgaggaaaagagaaagggagaatgaatcgatctcgaaaagacttgctgagtatggtctgagaacgacaagaaataatatcataaaatggcgtttgtatgaggagattagcagtcaggagagcaagctcaatgcaatgtgcatctattgtgggtcagctatatctttgactgaagcaatactcggaaatgatgtggatgtggaacacataattccaaaatcaaaattgtttgatgattcgcaaagtaataaaacccttgcgcacaggcattgtaatagagacaagaatgagcaaacggcatttgacttcatgaaaagtaagtctgaacaggcttttaacgattatgtcgacagggtaaatcttttatatgcaaacaggattatcggaaaagctaagaaagacaaactccttatgcctgaaagcaagattccggatgattttatcgacaggcaactaagggagagccagtacatctcaaggaaagccagggaaatactgcaaacggtctgtcatgaagtctgggctacaagcgggaaagtgacttcggaactaaggcatttgtggggatgggatgatgtgaccatgaatcttcagctgcctaagtataaggacatcggactaactgagtatcgagaatgggaaagtaattttggtgaacacaagcatagaaaagaggttattaaggactggagcaaaagagacgaccagcgtcatcatgctgttgatgcccttaccattgcatgcacaaagcagggctatattcaacgatttaacactcttaatgcccagaagacaagagatgaactacagtcggcggttaacatgagcaaccttttgacaagagaaaaactgtcgcttcttgaaaagtatattgtgtctcagaaacctatcccggtcaaggaggtagagaaggctgtatcaaatattctgatatcgtataagccaggcaagagggtagccgtcagagggacgagaaaaacaggcaggcgcggtgacaaaaaggttgtgcaggctgatattcttataccaaagggagcattgagtgaagaaagtgtttacggtaagattaagacggttgataggaataagcccttgaaatatctatttgagaattctaatcttatcattaatccccggataaaagaaatggtagaaaataggatatctcagtatgaaggggatacaaagaaagcaatcacttcgcttaaatcagatcctttatattttgacaaagaaaaaggaatacttctggagtacgcttcatgttttaaagaagagtatgttataaggtataaagttgatattaatttcaacaagattgacaaggtgatagataattccgtcaggagcatactacaaaagcgccttgataaatttgcaggaaaagccaaggaagcctttaaggatatcaccatcggagaaaataaatctgtcaagtggtatgaagatgaagacttgtccattccaatagactccgtacgatgtttcaccggtctttccgccgtggttcctgtaaggaaggatgagaatggtcgggattcgggttttgttaagccaggaaacaaccatcacattgctatttatgtcgattcagaaggtaacaagacagagcatgtctgtaccttttggcatgcagttgaacgtaagaaattcggaatacctatcataatcaaggattcaagtaaagtatgggacagcatatttgaagctccggaaggaacttatccggattcatttcttgaaaaattacctcagcctggcttggttttggatctcagtatgcaacagaatgaaatgtttattctcgacatgccttccgaagaagtcaatcagtatcttttatcgaatgattataaaacgattggagaaaaattatacagggtgcagaagttagctgaaaggaattatgttttcaggcatcaccttgaaacacagatattagatgataaaaacgctcaggcaagtaaacgttttttactcatacaaagtattggcactttgtattcccactctccttttaaggtaaaaattgattgtctcgggaatatttcaagtactgtgccacatgattaagcggactttatattttggcaatccttgtgcgttaaggaaaaaggatatgcaacttttgataagctatcctgaagaaaaaggcaaggaagaaatttccgttccgttagaggatattgggatggtaatacttgacaatcctcagataacattcacaaatgcactagctatgtctttgaatgagaataattctgctgtaatcagctgcgattcatcacatatgcctttgggattgatgctgccaatgttctctaatactgtcttttctgcaaaactgcatgctcaactgcaggcatcaataccactgaagaagaatctatggaaacagacagtagcagcaaagatcagcaaccaggcagcattactgcgaaaagaggggattgacaccaagaagatggatttctatctcaagaagataaccagtggcgatgcgggaaatgttgaggggagagctgctgcctattactgggataatttattcggaagtaaaatgtttctgcgtcatcgctctggagaaccccccaataaccttcttaattacggatatgcaatactccgggcgattgtggcaaggtcaataatagcctccggattgcttccatcattaggtatccatcacaggaacaagtacaatccttactgccttgcagatgatattatggagccttttcgtccatatgccgattcattagttctcaatattgcaagagaaactacttctctggaagagttgacaacagagataaaaaagaagttgttgcagattcctgtcatagatattgttatagatggcaagacaagtcctcttatggtcgggatacaaagaaccacagcttcgcttgcctcatgctatgaaggagagacaaggaaaatcctttatcctgaaatggaatgaggaatcagctaccatggataaagttcgaatcagccagtatcgaataatgtggatttttgtattttttgacctgcctaccgagactaaaaaggacagaaagaattatgcacaattcaggaagtcacttctgaaagatggtttctccatgatgcaattttcaatttatgtcagacactgtaacagcagggagaatgcagacgttcatatcaggagggtaaaatcatttcttgcccctaaaggtgaaatagttatttttatgttaacagataagcaatatggaatcatggagtttttcaaaagccgtgatccggtacaaagacctgatactccccaacaacttgagatgttctaaatctaatatgccaacctcaggataaaataaaccagcctagcatgttcaactaggctggaaatgatgcattttgctcgattctgattttgatattaatgagcacattctcagcatcttcagttggggtatgttgtgctcaatatatcaaagatacaatctgtaagcaattcacaactctatattataggcataaaaaaggagcactgttgtgctcaatatatcaaagatacaatctgtaagcaattcacaacttcacgctgttcatactgttcaaactgttcgttgtgctcaatatatcaaagatacaatctgtaagcaattcacaactaatgatttttcgctcctggcatatctctggttgtgctcaatatatcaaagatacaatctgtaagcaattcacaacatacctcgaccatgcccaatattgtaacccgttgtgctcaatatatcaaagatacaatctgtaagcaattcacaaccgtatgtggatagttgcggagtagtacatggttgtgctcaatatatcaaagatacaatctgtgtttccttcacttgaaaaccataccactatttcacttcaaaagtataccacttatcaatgcaaggttaatgtttttttttcattgttaaaagaacgttgtttcaatgcacaggagagcgcgct

SEQ ID NO: 1768 - DNA, 6425 bp, synthetic construct
  misc_feature 1..6425: note = Synthetic
  source 1..6425: mol_type = other DNA
tgaagtgacaatagttgtatctgcattttaaccagatctgcatgtagtgccggaatttctttgcgatctaatttaatgacaattgtattattcctttgtccctgcaaatgatcgctccatttactttgctttaattgttgcaaagcaaaaacattatccattgtttgcaattctacaattgtttgagaaggatctaataattcagatgcattaccctcaaccaatttcatacccttgtcgataattaaaactcgggtagcaatttgttcaatctcgcttaacaaatgcgaagatacgatcactgtttttttagactccctacttaaatgaaggattaaattccgaatgtctgcaataccctgcggatccagtccattagtgggttcgtctaaaataatcaaccttggattatgtatcaaagcaataccgattcctaatctttgcttcattccttgagaaaaggttttaaccttatcatgggctcgttgagcaagtcctaccatttctaattgatccatgagttgcaggcgactaggattgataccactgaattttgcaaaaagttggagattatcgtaggcagataaatatttataaacatctggtttttcaataacggctccaatttggcttagtatttctctgcggtgcttggctaagctcatgccgaatatttcgatatcaccactactgggctcaatcagggtaagcatcatacgtatagtcgtactcttaccagccccattttgaccaagaaatccatacacatctccttcattaacagaaaaggaaagctggtctacggctttgaggtttttaaactgtttagataggtcagttacctgaacgatttgttgcatcttcatatataaccacaaaagtagagaagtggttcgggtaagggtaaaaaattataaatagttgtatggggcagatttaacatcaacaaaaatatttatatttatgtcctctcccctgaatactaatatagttgcattaaaaaagccgagttgccccggcttaaatgtttacacaacggaataatccttattgtgatttgctttcagcataaaattataaagaaaaatcatatgaacaaaaaaattttagggcttgatttggggacaaatagtattgggtggtctctaattgaggtgaatgaaactaataaacctattggtataattgctatgggctctaggattataccattaagctctgatgatcgagatgaatttcaaaaagggcaagcaatatcaaaaaatcaaaaaaggacgacagccagaactcaaaggaagggatataacagacttcaattaagaaaagacaatttaaaaagcttactcaaaagacttaatatatttccatcaggggaattaatgaatttaccaagtttggatttatggaaattaaggagtgaagctgcatcatcaaaaacgaatattacacctgaacagctaggcagaatattttatatgctcaatcaaaagcgtggatacaaatcagctagaagtgaagctaatctagataaaaaagatactgattatgtagcggaagtgaaaggaagatatgctacactaaaggaaaataatcaaacaattggcatacatttttatgatgagttattaaatgcaaatcaggaagataaatacttccgtactaaagaaaaagtatatccacgtgaagcctatatagaggagtttgataccatcattaattttcagaagcaaaagcatagttttttaacagatgacgttatagcaaatttacgtaatgaaataattttctatcagcgtaacttaaaatcacaaaagggtctcgttaatatttgcgaatttgaaggtttcaatgtttcctacatagataaagaaacaaataaaggaaaaataacttttactggtccaaaagtagcaccaaaaacttctccattatatcagctttgtaaaatctgggaaaacgtaaataatatatctctgaaagtaaaaaatcttgatggtagtaaatataagtggggtgataaaataccaacacttgatgaaaagaaacaaatagtgatgcatctaagtaaaaatgcaactcttagtttcactgatttattaaatattctgcaactgaaaaaagagaatgtatttgcaaataagcaaatattaaaaggcatacaaggcaatattacttattctgaaattcagggagttttaaaagaaaacaagcaattacagtttaacataaatattatccctacgaagaagccagcgattctagtggataaaaaatcaggggagatattagaagagagggagggcttacaaattgaatccaaattagaactggagcctttatatcaactatggcataccatctattctataaaagatctgcaagaatgcaaaaatgctctgataaaacgtttcggatttagtgaatcaattgctgaaaagctgtcgaaactagatttcaataaacaagcattcggaaataagtcaaataaagcgatgcgtaaaatcttgccttatttaatgcaaggttatgactattcaaaagctagcagctttgccggttacaatcattcaaacagcaataccaaggaagagcaagcagaaaagcatactgctgaaagattagaattattacctaaaaacactttaaggcagccaattgtagaaaagattatcaaccaaatgatcaatgtggtaaatgcaatacttgaaacttatggtaaaccagatgaaataagagtggaattagcgagagaattgaagcaaagtaaagaagaacgaaatgatacagatttacagaatacaaataataaaaaactaaatgaagaagttgcaaaccggctcacatctttaggtttaccaacaacaaaaaggtatatccaaaaatataagttcatttttccaatcaaagacaggaagataaaggatgctcaagtatttaatcaatgtatatattgcggcgaacatttcaacctttcagaggccctaagtggagataattttgatgttgatcacattgtacctcaatcattattgtttgatgattcacaaacaaataaagttctagttcacagaagttgtaacgctaataaaaccgataaaacagcatttgattatattaaaactaagggggaagatgctttgcagcaatatactgatcgtgtagacatttggttcaaaagagggattttatcctatggcaaaatgcaacgtttaaaagtttcttacttagattacttagaaaggaaaagatcaaataaagaaacagaagcagataaaaaattgtgggaaagctttattgatcgccaattaagggaaacacaatatatagcgcgaaaatcaaaagaaatcctacaggaaatatgtaacaatatcacctctactgaaggaacagtaactgctaaattaagagggttatgggggtgggatgatgttctgatgaatttacaattacctaaatataaagaacttggcaaaaccgtaataaaggaatggacaagcgaccacggcaatagaaaacattataaagaagaaatagaaaactggggcaaaagggatgaccatcgacatcatgcaattgatgcactaataattgcatgtacacaacaagggtttattcagcgcataaatacactaagttcaagtgatgtaaaagatgaaatgaaaagggaaattatatcgtctgccataaaattcaatgcaaatttagatacacttgaaaaatatttaattacaaaaagacccttctctacagcagaggtagaaaaagaagcggataaaatattagtatcctttaaggcaggaaaaaaagtagcaactattggagttagaaaagagaaaaaagatggtaagaagcaaatagttcaatcaaatataattgttcctcgcggggcattacatgaacagtttgtttatggtagaatcaaaacagtagctaaagatttcaaaactggaactattctgaaattccccgttaaacatttatttgaaaattcagatttaattgctgataaagtaattaaacaaaaagtttcagaaagacttttggcatttgaaaatgatgcaaaaaaagcaattgaatctttgaagaaattcccaatttatcttgacatagataagactatacctctcttgaatgcaccctgctataaagatgaatatgtaatcaaatacaaaattaccgacataaaaaaagaagacgttaaatatatagtagataagaaagtaaaattacttgtaaacgaaaggttagagcaatttcatggaaaagaaaaagaagcttttaaaaatactttgtggttcaatgaatcaaaacaaatacctattcgaacagtaagatgctttacaggtctttcaaatgttgaggttattaaaaaagatgaatttggaaacgaaatagggtttgccaaacctggcagcaatcatcatattgctatctacaaagaccctaatggtagcctaactcaacacttgtgtactttttggcatgcagtagaacgaaaaaaaatcaacatcccttacattattaaaaatacaaaaagcctttgggaatctattcttgtaaaagattttccgcaaccaattcttgataaacttccagaagacaacttgatgttacaaattagtttacaagaaaatgaaatgtttattttaggattatcaaatgaactagctcaagaagcaataaaaaacaacgataagcttctgataagtaaacatctttatttggtttggagtatttcaataaacaaatattggtttaggcaccatttggaaactaaaaattcagaattgaaaaaacttgaaggtgctcgagaaagtaaacgatttcatgaaataagcagcgttaagggtttaattgatttaaacccaataaaagtgcgacttaatcatttaggggagataacaaaaattggagaatagtgattaaacgaaccctttgcatagagtccccttgccaccttaaatgtaacaacagccaacttgttgtgagctacagtcatgtaaagggattggaagatcgtgcagatagatctgttccgattgaagacattggtatgttattattagagcatcaacaaattacaatttcgcactaccttttagacacgttaatgaataataatgtagcggttattacctgtaataatacccaccatccaagcggcttatttcttcctctagaaggtaataccctccaaagcgagcgattccgggcacagatagaagcttccgagccattgaaaaaacaattatggcaacaaacagtaaaagccaaaatcaccaaccaagcttttatttttaagaaatggaatttaaagcatcaaaacctaatcaaattggcaacaacggtaaaaagtggagatttggataataatgaagctgtagcggcagctttttactggcaaaacctgttgcccgcaacttggcaattttttagaagaagagaaggaccacctccgaataatctattaaattatggatatgcaattgttagagccggaatggcaagggcaattgttggcgctggtttattgcctactatgggaatttttcatagaaatagatacaatgctttttgcttagcagatgatctgatggagccctaccggccatttgtagatatgattgtaagatcgatggttgacagaacgagtaattttgacccaattacaccagaattgaaggcagaattactgaaaatcccaactgtagatgtatttctgaatggcgaaactagtccacttttaattggtatgcaaagaacagcagcttctttagcaaagtgctatttgggggaacaacgaaaaatactttaccctactatggaataaagtttaaatataacagcatgaagtccgaacgtcttaattcctatcgaattatgtggatactcgtattttttgacttacctacggaaacaaaggctgaacgacgcactgcccagggctttagaaaaaaaattatgggtgacggatttgcaatgtttcaattctcaatctacctcaggcactgttctagcatggaaaatgcagaagtacatattaaacgagttcagaaaatccttccggaaaaaggccatattggaattatgtccattaccgacaaacaattcggaatgatgaagatttttcagggcaaaaaaccacaggttgcaacaaatgtaccacaacaattagaaatgttctaaccagataccacataatagaaatgaaaaacgacccattagcaatgccataatgggtcgttataatcatttttttagtcttagtttcttcgaaaacacttactatagttgagtttcagctaaacctgttgttatcaaagatcgtaagaactaagattgaaagcaaatcacaactggattaggtctactagctgtatcaccagcgttgttatcaaagatcgtaagaactaagattgaaagca

SEQ ID NO: 1769 - DNA, 6303 bp, synthetic construct
  misc_feature 1..6303: note = Synthetic
  source 1..6303: mol_type = other DNA
tgtagcataaggtatcaacaaaaaagacgagttatgagtctccccctagaaccccctcaatttcatcataaacatctatatttgaataataattgtccagagcaattagaccatctcatactaaatctatattatcggatttgatatattcataaaaattctcttgagaatactatattatacaattaagcgagtgttattatcataaaaaaggccaggagattttgttttccagaacattatctttattccaataaatcgcgttttttatcaataccagcccagaatttaaatagatttgttttagtatcaagagtccttacaaaaaatgtaaagcaatcatgtgacaaacaaaactcaggaagaaatactggcatcaaccccagagaacctgacagatatagagaagattattcaagagttgatcctggattacggtatgaacctcgaacaagcgatagctgcattggaggaattaccataattaatttgaaaataaatcaagcattcaagccttaaaccctggtaagtaagcatcagcttaaaattgcctaaacgtggaatggaaaggaaatactaaaaccttgcttcatttaaagctattataaatgagatatttggaggtaatctttaccaattatcagatcttttgccaaatggttttacaatttctgtagacatgcagcataagataattttttctattctggaaaaatgagatttctgctttctttttagcaaatattttatcaattttaatgtgtcttaaacaatccagataaatcaatgataaatgttactttttcatttgatcattgtctttctatcgaaaagcttctactgtcaattcaaagccatctgattatgatactgggaataaataaaaaatgcccccgaattgtaggacgagggctgcctgaatgttttcacaacggaataatccttattgtgaattgcttcagattgtacctcaaatatagtaaaattaattaaatactcatcaatgaaaaagattcttggactcgatctcggttctgcctctattggatgggctttaatcaaagaaaacggtaacactgacaatcctaagaccgaaattattgacctcggatgcagaattatcccttacgatagaacagaaggcagggatttttcaaagggcactggtgaaaccagaaatgcaataagaacacgtgcaagaacaattcgcagaggatatgaccgctaccaaatgcgcaggaaatatcttacggacattcttgtaaaacattctatgatgcctgatgagactttaaaagcattgccaaaaatgcagctttgggagcttaggagtaaggcagtgaatgaagagatttcgctgcaggaacttggacgcattctgttatttttaaatcagaaaaggggatataagagcagccggagtgaagcaaaccttgataaaaaagaaactgagtatgtatctgctgtaaagaacagacatgaattgatcaaagaacaggatctgaccattggtcaatattttttccaagaacttaaaaaggatgaattctatcgcacaaaggaaaaggttttcccccgggaagcatacatggaggaatttgacagaatatgtaaaacacaacaggcatttcatcccgagctttcacaagctttggttgataaaattagaaatgagataatttattatcagcgtccgctgaaatctcaaaaggggttggtttcagtctgtgagtttgcaggcacttggataaagaaggatggaaaggactatttcatagggccgaaagtagctcctaaaagttcccctctgttccaggtcgaaaagatatgggaaaccataaataatataaaattaacatcccgaagtggtattgatctgcaattaacacatgagcaaaaagcagcagtattcaagcaccttgacaataatgagaaactcactgtgactgacctctttaagatacttaatttaaaaaaaggaagttatgttcctaatacacaaatttctaagggtttacaaggcaatctgactaaacacctgatcagagaatgccttgaaagcaaagatgtctattctgaccttctcaggatgaatctgaatttaaaaaaagttaatagtgaaacttacctctatgaccgaaaaaccggggaagtgaccaactccaaaccaatattggaaattgatccatgtgttgagaaagagccactttataaactatggcacacgatatactccatcaacgatcggcaagaatgtgcaaatgcacttcttaaaaacttcggcattgaagaaccagtagccagtaaacttgcctctattgacttcagccggcaaggttttgggaacaagtctgctaaggtaatccgtaaaatccttccttatttgatggaaggtgatggttacccggaagcaatgagctatgcaggatatagtcattcaggaactttatcaaaagaggataaccttacaaggaagctcgagaatgaactaaaaccaataccgaagaattctttacggcaaccggtggttgagaaaattcttaaccaaatggtgaatcttgtaaatgctgtcattgaaaagtatggtaaacctgatgagatcaggatcgagcttgcccgtgaactaaaacagagccgggaggagaggaataaaacagagagatcaataagggaaagagaaagggaaaatgaaacgatctctaaaaagcttgctgagtacgggcttaggggaacaagaaataatatcataaaatggcggttgtacgaggagataaacagtcagggaaataagttgaacgcgatatgcatctattgcggtaaacctatttcccttactgaagcaattcttgggaatgatatagatgttgaacacattattccaaaatcaaaactattcgatgattctcaaagcaataaaacccttgcacatagacactgtaacagggataagaatgaacagactgcatatgatttcatgaaaagtaaatcggaacaggcttttaatgattatatcgaacgagtcaatatgctctatgcaaacggagtcattggagaagctaaacgagacaagctcctgatgacagaaaccaagattccaactgatttcattgacaggcaattaagagagagccaatatatctcaaggaaagccagggaaatactgcaaactgtatgtcacaatgtctgggctaccagcgggaaagtgacctcggaactaaggtatttatgggggtgggatgatgtgacaatgaatcttcagctgcctaagtacagagagataggacttacggagtttcaggaatgggaaagtgattttggaaatcataagcataaaaaagaagttataaaagactggagcaaaagagatgatcaacgccatcatgcaattgatgctcttaccattgcatgtactaagcagggttacattcaacgttttaacacccttaattcgcagaagacaaaggaagaactacagtccatcgttagcaaaaacaaaattatagcaagagaaaaattatcgcttcttgaaaagtatattatctcacagagacctatcccagtcaatgaagtagagaatgctgtctcaaggatattgatttcttacaagtcgggtaagagggtagctgttaaaggtaagagaaagatgggcaaacgaggtgacaaaagagtggtacagagtaatataatcgtaccaaggggagctttgagtgaagaaagtgtatatggtaagattaatacaattgatcgtaacaaaccactgaaatacctcttcgaaaattcaaatcttatcgttaatccaagagtaaaagaagttatagaaaatcgaatatcgcagaatggtggaaacattaaaaatgctatcagttcgctaagggctgaaccattatatattgataaagaaaaagatttattgttggaaaaggcttcatgctttaagcaagaatacgtaatcaggtataaaatagatgtcaatttcaataaagttgacaaggtgatagatgattcaatcagatatatccttcagaagcgtctgaataagtttggaggaaaaccgaaggaggcttttaaggatgtttcaatagaaggaaacaaatcggtcaaatggtatgaggatgaaggcttgccctatccaattaattctgtacggtgctttacgggtctttctgctgtagttccagcaagaaaagatgaagagggtagggatattggttttgtcaagccgggaaacaatcatcacattgccatttacgaagattcagatggtaataaaactgaacatgtctgtaccttctggcatgcggttgaaaggaaaagatacaatctgcctgtcaaaataaaggattcaagcatagtttgggataaaattcttgatgctcccgaaggtaaatatcctaattcatttcttgaaagacttcctaaacccggattgaagctgaatcttagtatacagcagaatgaaatgttcattcttgatttgccctacgaggaagcaatccgagctataacattgaaggataataatataataagtgataatctatacagagtgcaaaaaattgcagaaaagaattatgttttcagacatcacctcgaaacacaaataattgatgataaaaacgctcaggcaaataaacgttttgtgatcatccaaagtttgggagctttatattcacactttcccatcaaggtaaaagttgattgcctcgggaatattaccaatactttggcaaatgattaagcggactttatattttagcaatccttgttctctgaggaaaaaggatatgcagcttgtgatctgctatccagaagaagagggaaagaatgatatttcagttccattggaggatattgggatggtaatacttgacaatcctcagattacattcacgaatgcactggttatgtcgcttaatgagaataatacagcagtaatcatttgcaattcgtcgcatatgcctttgggattaatgctgccaatgttcacaaatacagttttttcagaaaaactacaaactcaactacatgcatccataccacttaagaagaatctttggaaacaaacaatatctgccaagatccgcaaccagacagctctgcttcgaaaggagggaattgatgtaaaaaagatggatttctatctcaaaaagataacaagtggcgatagagggaatattgagggcagagctgccgcttattactgggacaatttatttgggagtaaggttttcttgcggcatcgttttggagagccacccaataatcttttgaattatggttacgcaattctccgggcaatgatggcacgctctataattgcatcaggattgctaccatcattaggtatccatcacaggaataagtacaatccttattgtctatctgatgatcttatggaaccttatcgtccatatgtcgactcagttgttctcgaaatcgcaagagaaactccagatttggaagaaatgacaacagatataaaaaagaaattgttacagattcctataatagatattattatcgaagacaaggtaagccctttgatggttggaatccaaaggacaactgcatcgcttgcctcatgttacgaaggagagacaaggaaaatcctttatcctttcatgtaatgcgtaatcaaatacaatggagaaagttcgaatcagccaatataggataatgtggattttcgtattttttgacctgcctaccgagactaaaaaagacagaaagaattattcacaattcagggaatcacttatgaaagatggattctccatgatgcaatattcaatttatgtcagacactgcaacagcagagaaaatgcagaagttcatatcaggagggtaaaatcctttcttgctcctaaaggtgaaataatcatttttatgttaactgacaagcaatatgggatcatggagttttttagaagccgtgatccaatacaaagacctgatactcctcagcaactggagatgttctaaaatcgtttatacctgcaccataaaaaaataaatcagcccggctaaacaagccgggctgatagtataccattttgcttgtttctgattttgatattaattaacacgtttacaacaccttaagcaaaggtatgttgtgtttaatatatcaaagatacaatctgtaagcaattcacaacagcgctattatggatgcaagttttgaagacgttgtgtttaatatatcaaagatacaatctgtaagcaattcacaactatcagttgttttatacctcaggttatagcgttgtgtttaatatatcaaagatacaatctgtaagaaat

SEQ ID NO: 1770 - DNA, 6120 bp, synthetic construct
  source 1..6120: mol_type = other DNA
  misc_feature 1..6120: note = Synthetic
ttcacaaaatgtttctcctgtatatcgtcgtttacctttaacttcacaaacctattttttaattacaagcattgaaaaatacaaaccttatttattgaaatattgtgccggtacccgtgaaggggaatcggaaacaaagggcccttttccttttagtatcagctaaagactttcagggtgtaatgggttattaggttaataagttattggttactaggtatttcttggtgaatcttagagttcttagagtctttgtggcattcttattttcctcatcaggactttgaatatatgataatatacatgccatgaagtgatagctataaaactgagctgtcagttttgttttgctcatccatagacttattgagaaagaggtttaaatgaagatacccataaattaataagacaatacattcctaaaaaaagcgaattcaaaaattataatgatatgattatacaagaaatacaagaaaaaataaatagaagaccaagaaaaaaacttaacttcaaagccccaattcaaatattttttaatctagtggcatgaaatattgcatttgcgagttgaatcagcctttagaaaataaaattacaaaacaattgaaaattggaaataaataattatttttgggagttatttgtacgcataaaaaaaaggcgacttgcgccgccttaaatgttttcacaacggaataatccttattgtgattagcttcattttgtgctgcaaatatagaaattaatttaatataacattgatattatgaaaaagattttagggttagatttaggttctgcatccattggatgggctttaattgaggaagacaaagaaaacaaaagaaaaatattgggtataggtagccgtataatcccttatgaaggtacagaaggaaaagattttgctaaaggaactggtgaaagtcggaattcattaaggacctttgcgcgaacagcgcgaaaaggatatgatcgctatcaattacgccgtaagtttttagtagaaatactcattaaaaacaatatgatgcctgatgatattctgaaaaatctccctaaaatgcaactttgggaactacgaagtaaagctattaaccaacaaatatctttaagtgaattaggacgtttattgctttggctcaatcaaaaaagaggatataaaagcggcagaagtgatgctaactttgacaaaaaggatacggagtatgtcgcaactgtaaaaagcaggcatgagaaaattaaagaagaaaatctaactattggacagtatttttatcatgaacttgaaaaagaggaatttttcaaagtaaaagagaatatttttccacgagaagcatatatagaggaatttgacgccttatgtaaaaaacaacaacaatattatcctaatgaattatctaatgacttaattaagaaaatcagaaacgaaataatttattatcaacgacccttgaaatcgcaaaaaggtttagtttcaatatgcgaatttgaaggtttctgggcaaaaaaagataataaagaatattttgtcggaccaaaggtagccccaaaaagttcacctctttttcagcttgttaaaatgtgggagaatgttaataatataaagattaatactcgtagaggagaagaaattctaattactaccgagcgaaaattggctttatttaatcacttagacaataatgaaaaactcacacaaaccgatcttttaaaaattctgggtttaaaaaaagaagattgttatgtaaacaaacaattagctaaagggattattggtaatattacaaaaaacgccattagacaatgtttccccaattctgaaacatatgaacatttgcttgaccttaatttagatattattcaaaccaaagaagaaggttacttatatgataaacaaaccggagaaattttaaatgcaaaacccattcaattcattactcctaaagttgaaaaagatactttttatcaattatggcatattatttattccattaatgaaatagaagaatgcagtaacgtattacaatcaaaatttaaaattgacaaacaaacagccgataaattagcttcaattgactttacaaaacatggatttgggaacaaatcggcaaaagtaattaggaatatacttccttatttaatggaaggggatgattatagtgaagcaatgagttatgctggttacgaccattctaattctcttactaaagatcaaaatttagaacgaaaactgctagacgtattaaaacctattgctaaaaattcacttcgtcaacctattgttgagaaaatccttaatcaaatggtgaatgtaataaatgcgataattgaaaaacatggaaaaccagatgaaatcagggttgagttggctcgtgaattaaaacaaagcaaggaagagcgaaacgatacggacaaggctatgagtaaacgtgaacgcgaaaatgaaattattgcaaaacaattagctgagtatggattaagggctacaagaaataacataataaaatggcgattatatcaggaactagacaacgaagataaaaaactcaatgcaatgtgtgtatattgtggacagcctatctccttgaccgaagcgattaaaggtaatgatgtagatattgaacacattattccaaaatcaaaactttttgatgattcgcaaagcaataaaacactcgcgcaccgtcactgcaatacaaataaaaacgatagaacggcttatgattttatgagaagcaaatcagagcaagctttgaatgaatatgttgaacgtgtgaatatgctgtatgctaatcatatcattggaaaggctaaaagggataaattgttaatgactgagagcaaaatacctgataattttattgatcgtcaattaagagaaagccaatacattgcaaagaaagccagagaaatacttcagtcaatttgctataatgtttggagtaccagtggaactgttactgctgaattgcgtcatttatggggatgggatgatgttacaatgaacttacaattgccaaaatataaagaacttggtttaactgaaataaaagaatgggaaagcgaacatggcaagcacacacatagtaaagaaataattaaagattggagcaaacgcgacgaccatcgtcatcatgcattggatgcactcaccatagcttgtacaaagcaaggttttattcagcgctttaatacacttagttcaaataaaacaagagaagatatgtatcaggaagtagctacgcgatctgtagaatacaaagaaaaactatcacttcttgagaaatatataataggggaacaaccatttatggtaaatgaagttgaagatgctatttcaaatgttttgatatcttttaaatctggaaagaaagtagcagtttggggcacaaggaaagtgggtaaacatggcaataaaaaagttgtccaaaccggaatcattgttcctcgtggtcagctccatcaggagtttgtgtatggaaaaattaaagcaattgaagaaaaaaaaccacttaaatatatttttgaaaatccacaattaatcatcaaaccttatattaagactttggttgaaacaagaattaatgattatgatagtgattttaaaaaggctctgatttcattgaagaaagatcctatttatttggataaagaaaagacaataatattagaacatgccacttgttataaggatgaatttgtaataaaatacactgtcaatactgatttcaataaaattgacaaagtaattgactctaaaatacggaatattctacaaacaagattggataaatttggaggcaaggcaaaagaagcctttaaagatgtacagggcgaaaataaaaccttaataaaatggtatgatgatgaaggattggaaagacctattaaatctgttcgatgctttacaggactttcggctgttgttcctgtcaaaaaggatgaaaatggcaaagatataggttttgtaaaaccgggcaacaatcatcatattgctatttataccgatgttgatggaaagaatactgagcatatttgcacattctggaatgcagtagaacgcaaaaaatatggtgttcctgttataataaaagacactaacgaggtttgggataaaattcagttaaaaacagataataattaccccgaaagctttttagaaatgctccctcaacccaatttgactttaaaatttagtatgcaacaaaatgagatgtttattttaggtataacacatgatcaaatatatcaggcaatagagggcggtgattttaaaaagataagcgacaaattatttagagtacaaaaattagcagaaagaaactatatgatgagacaccatttggaaactcaattgatagacgattcaaatgcaaaatcaagcaatcgctttattttattgcaaagtcttggagctttgtttgctttaaaccccctcaaagtaaaaattgacttactagggaacatcatagtttaataatttagaattatgattaaacgcaccttatattttggaaatccggcttacctaagtatgcatcaggaacaattgttggttcggtttccacaggtagaaaaaaacgacaccctacctgctgattttaaaaaagaagctgtggcaagcattccggttgaagatataggggtggtgatgctcgaccataaacaaatcaccatcactcagggtttgttggaggctttgcttagtaataatgtggctattatcagttgcgatagcaaacatcatccgtttggtttgatgcttccgttggatgtaaatacggtgcaaaacgaaagatttcgcattcagttggatgcctctgaacctctgaaaaagcaattgtgggcgcaaaccattatgcaaaaaataaagaatcaagcagaagtattaaaaagcaggggaattaaccacagctatatggtcccactccataaaaacgtaaagagtggcgatagcgataattgtgaggctatagccgccgcttattattggcaacatgtattccccgatattgccgatttcagccgttcgagagaaggagtttcgccaaacaattatttgaattatggctatgccattttgagggctaccatggcaaggagcatagttggagcgggattgttgcccacactgggtatacatcatgccaataaatataatgcttattgtcttgccgacgatttgatggaaccctatcgccctatggtggatgaattggtatgcgaaatcattaatcaatatggactgatagaagacttgaataaagaaatcaaggcgatattgctcaccattcctgttttggatgtaatgatggaggatgaaagcagccctttgatgattgctacccaacgcacggctgttagcttggttaaatgctttgcaggagaacaacgtaaactattgcttcccgaaatgaaataagaaaaatatgatattatggcatcaacacatcgtttaaatgcttatcgcgttatgtggacacttgtaatgtacgatttgccaaccgaaaccaaaaaacaccggggaatagcggcgcgatttcgcaagaatattatgaaagatggctttagtatgtttcagtttagcatgtatgtgcgccatagtgcgagttctgaaaacgccgatgtgcataaaagaagggtgaaaagtctgctacccgaagaagggaaagtgggcatattgcaaatcaccgataagcaattcggacaaatggaaatattttatggagctaaacaacaagtaaagcaaaatgtacctcagcaattggagttattttaaaaaaaagattccatcttttgaaaagatggaatctttaaacagcctttatgtatttgaatagaaataaaaaaatccggcttcaaccggattttttatttgataatacccattttatttattgtgagattaagctaaaaccattgataacactggcttttttggcaagtatgttattatcaatatgtcaaagatacaaaatgaaagctaatcacaaccagccgctgtaccgactaaagaaacaacgggttattatcaatatgtcaaagatacaaaatgaaagctaatcacaactacgtataatcaaattcaaaacaatattaagttattatcaatatgtc

SEQ ID NO: 1771 - DNA, 5376 bp, synthetic construct
  source 1..5376: mol_type = other DNA
  misc_feature 1..5376: note = Synthetic
atagcggatgctttaaaaataccggttgaggctttccggaattttgatgaggaacaagcaatcaatctgatttctaacaatgctacttttgaaaactgtcaacagccagcattttttaatcatcatccgaatttcaatcctcttgataaattagtggaagcatacgatgaaatcaaaagattaaatacggaattgttgaaggtaaaagatgagcagataaggttgctgcaaagtctggtagaaaagaaataaatacacattgaatttatagaacagctccccggatagtatcccgggacagacgctccgggaacggggcgtttcgcgttattacagggcacaaaaaaaggcgagttgccccaccttaaatgttttcacaacggaataatccttattgtgaattgctttcattgaaaacaaagataaagcgatttatgcattgttggatacggaaatccgtaaaaaaaatcttttttattctttattttagaagctaattaattgaaaattatgggcaaaacgattcttggacttgatttagggactaattcgattgggtgggcgttaatagatatcgatgagaatagtacgcctacacgcatcattgcgatgggcagtagaattattccgctgtcttcaaatgaacgcgatcagtttcaaaaagggcaagctatctcaaaaaaccaggataggacaactgcccgaacacaacgaaagggctacgaccgtaagcagttaaagaagagcgatgatttcaaatatagcctgaaaagagctttagaactgcataatatttatccatcaagggagctctttaatcttccgatgttagacttatggaagttaagaagcgatgccgtatcaaaaccgattaagccagagcagctgggacgaattttatatatgctgaatcaaaagcgtgggtataaatcggcaagaagcgaggccaatgccgataaaaaggatacagattatgtacaagctgtcaaaggtcgttttgcccagttaaaagataataacaaaacgattggtcaatttttttacgaaggcttgaaaaatgctgtagagcagagccaatattttagaattaaggaagaggtgtatcctcgcgaagcttatattgaggaattcgatacaatcatcaatacgcaaaagcagcatcattcctttttaacagatgatttaatacactctcttagaaatgaaattatctattatcaacgtaagcttaaatcgcaaaaaggtttattaagtgtttgcgagttcgaaggctttgaaaaagctattactgataagtcgggaaaggaaaaggtagtttttgttggtcctaaagtagcggcaaagtctaatccactatttcagctatgcaggatttgggaagttgtgaacaatattagtcttaaagtaaaaaatccaccagacgccaagtacaaatggggcgaccgtattccaaccgtggacgagaagagacaaatagccaatcatttatggagaagtgaacaactaactcaggctgacttgttgaagatcctaaaccttaaaaaagatgaggtttatagcaataagcaggtatcaaaaggtattaaaggtaactcaacctatagcgaaattgataaaatcattaaagatagtccattgttgcaatttgacgtagacgtggtccctaatggtaaggatgcttacatctttgaccggaaaacaggagaaattctggaagagcgtcagggtgcaataattgacaaggaaatggaaattcagccgttttatcagctgtggcataccatttattctatcaaggatttagaagaatgcaagaaagccttaattaaacgatttgcgtttacagaggatgtcgcagaaaaactgtcgcgcattgattttgataaacagggttacggaaataaatctgtaaaagctattcgaaaaactcttccttatttaatgcagggttataatttatatgaatctgaaagtcttgcaggatatgtttccagttcccttactaaagaagaattgacggaaaccggtaaagaggaaaaactttccctgttgcccaagaatagtttacggcagccagtggtggagaaaattctgaatcaaatgattaatgtggtcaatgctattatagaaaaacatggcaaacctacagaaatcgtaattgaaatggcccgtgagttaaagcaaagtaaggacgagcgagatgccgcagacaggcaaaactcatttaataggaaagtgaatgataaggttgctgcggtacttagagagttgcgcttgcctgcaacaaaacggtttatagacaagtataagttcatatctccaaccagggacaagagttgggatactactcaaattgtaaaccagtgtatttactgtggagagtcatttagtcttacagaagcattgagtggtgatgctttcgatgttgatcatattgtgccaaaggccttactgtttgatgattcacaaactaataaagtgttggtgcatcgtaagtgtaatggtaataaaacaaatcaaaccgcctatgactacatttcaaaaaagggtgaggctcagttaaattcttacttactgcgagttgatgattggttcagaaggggtatcatttcttactctaaaatgaataggttaaaggtttcattcgaacagtatcaggagcgtaagaaagcaaaaaaagaaacagaagctgataagaaattatgggaaagttttatagatagaaatttaagagagactcaatatataacgagaaagtcgaaggagatactgggcaagatttgtaataaggtgagggtgactgaaggaaatgtaacagcaaagcttcgtaggctttggggttgggaagatatattattggatttacaattgcccaggtttcaagagctggaacaaactgaagtaaaagaatggtcaagtgagcatggacgaagaaagcatcaaaaagaagaaatagcgaactggagcaaacgcgatgatcatcgccaccatgctcttgatgcattggccatagcttgtactgcacaagggtttatccagcgaataaatactttgaacgcgagtgatgttagaaatgaaatgaatcaagaagttgaagatgctagaattgagttcaatgaaaaaatgacattgctggaaaaatatttagtcatgaaaaagccctttgagacaacggaggtttctaaagcagttgacgagattctgatttcttttaaaccaggaaagaaggtagcctccattagcaagtttaaggctatcggtaagaatgaagatgttggagtacttactccgagaggagctttgcatgaacaatcagtttacgggaaaataaaggtcaaagaaaaaaataaggctcttaaacacttgttcgaaaacccaggacgaattatagacgaaggtattcagaaaaaaatcttagataggattgcattatttgatggtgatgtgaaaaaggctgtcagttctttaaagaagtctcccgtatatatcgatgaagcaaataaagtagcgctggaagttgctgattgtttcaaagaagaagtagtaattaagtataagctggatagtttaaaggcaaaagatgttccttacatagtagatgaaaaagtaagagagttggttcagcagcggttggatgcacacggaggtaaggaaaaagaggcattcaaaactacactttggtacaatgaagccaagcaaataccaattaggacggttcggtgttttacaggactgtcagctgtagaagggataaaaaaggatgaaaatggaaatgacattggttttgttgttttaggaaataaccatcatattgctttatatgaagatgaagaagggaaactggttcagcacagttgtacattttggcatgctgtagagaggaagaagtttaagtttccggtagtaataaatgataccagcgttatttggagcaacattattggtgatgagctactacagtcttttattgataaacttcctgccgataatttgaaattgaagcatagcctgcagcaaaatgaaatgtttattttaggattaaacaaggaagatgcagataaggccattgctgaaaataataaacgtcttattagtaaacacctttacttggtatggagcattggagaaaatcagtattggtttagacatcatctggaaactaaaaactcagaattgaaacagacatggggagctaaagaaagcaaacgctattacttattcaaaagtgtaggtgcgtttctggctcaaaatccggtaaaagtaaaagttaattgcctgggtgatatttcagctatataatgcttcaattcgaaacatattatcatatttacaaccacgccaatggcgatgataacctgtttcgcgaagagaagaactatcgtttctttttgagaaaatatcatcagcacatcgatgtaatagctgataccttagcctggtgcctaatgcccaatcattttcacctgctggttaaaataaaaagcgcggaagcgatagcagcaacttgtctaaagtttcaaactttggatcagttggaagcccggaccgcgtttttaagtaaacaacttgctaatttttcagcagctatacgcaggcgtttaataaagtatataaacgacgtggctctttatttataaagaattttaagcgaaaggagattcaagatgatgaatacctgcgaaacctggtattatacatccatcttaatcctgttaagcatggatttgtaaaggaaatagaaagttggccctggacttcatggaagttgtttccggatacctggcctgaaataacgggccgattgtttacaggtctggaagaatacctgctattacatggcgataagcaagcctttttcgaggagtacataagattggagaacgatctaatttaactaatatgatcaaacggacactctatttcggcaatccggcctacctgaaaactcaaaacgaacagctggtagtggaattgcctgaaaccagcgagcaaagaacggcggcgattgaggatatcgggctggtggtgctcgatcaccagcagattaccattacccagtctgttctagccaaacttttagaaaataataccgcggtggttacctgtaatcatacgcaccatcctacaggtcttttgctcaacctggatggtcatacactgcagagtcagcgttttaaacatcaggtagctgcaaccgtacctttgcaaaagcagctctggcagcaaaccgttatagccaagatcaccaaccaggcacacttattagggcaaacgcggatcgccaataaaacccttttcaacctggcggtcaaagtaaaaagcggcgatagcgacaattgtgaggcccaggcggcagcttattattggaaaaatctg

SEQ ID NO: 1772 - DNA, 23114 bp, synthetic construct
  source 1..23114: mol_type = other DNA
  misc_feature 1..23114: note = Synthetic
cggggtcgaagcaccgaccggccttgacgttgcccgcgaccgcgaccgtcggattcgagtgattctcctgcacgatcaccaccatgccgttgtcgagcaccacgcgatagggctttaccactcgtacagtcggcgcgggccgactttgcggcttcgcagccgcggttttgaccgccgggccagcggcagcgcgatagttggccgctcccggtgtcgcgcgtcgtggtcccatccccgcgcccgcgggcatcgcgccaccggtctgcggaccggttggaatgaacgtgccgaccgtaaggttatcctgcgtcaggtacttcttcgcagcggcttgcacctgctcgggcgtgacgaccttcaacttgcctatcaactgctccagatagtgccatgtggcaagagtgttgtagtacccgagttgctcaccctggtcggaaacgctgtcgttctgatacacgaagtaggcctcgagctggttctttgccgaacgcatctcctcatcagacggcagtcccgccttggccttctcgacctgctcgagcagagtcttttcgagttggtcggcgtgcacgccctggcgcgcagtcgcgccgagcatgaagagcgacggctgcatgcggctcccagcgctggaccacgccgaggtcgccattccggtctctaccatcgcctggtaaagccggctcgaacggcctccgctgaggatctgatccagcaccatcagcggataggtatcgggatcggtgaggcttggcacgtgatagcccatcatcacgcgctcggcggagccctcgcggcgaatcacgatcctgcgctcgccatgctgaacgggctctgtcgtataaggcgcacgcggcaatgtggcggcgggaatcgagccgaggtatttcttgaccagcgccagcgccttctccgagtcgaaatcgcccacgagcaccatggtcgcattgttggggtggtagtaggcgcgatagtagctcttgagctgggcgtcgtcgatgttctgcacgtcagatcgccaaccgatcgtcggccattgataggaactggccatgaacgcggtcgcgtacaagccctggtacagcagcgtatcggggtcattctcatcgccctcgagctcggaaagcaccacgacccgctccttctggaactgatcgttgagcagcagggcgttgccgaccttctcggccatcgtcttgatcgcgaactcgaggttctcgctggaaagaagctcccagtagtaggtgaaatccgtccaggtagcggcgttgtctatcccaccgcgctcgtggaccatcttcgagatctcgcccttcttgtagttcttggacgcgttgaactgcatgtgctcgaggatgtgtgagatgccggtgatgccggtgtgctcgtcgcgcgagccgacacggaaccatatctgcgccgtgaacacaggcgcggcatgcgattccttgagcagcacctcgagaccgttgggcagcttcacttcacgaacgcccgtcacgctcggcgggctgagcgcagccgccgcggaggatttcgccgcgacgttcgtctgtgccgcgtatccgaccgtgatcagcagtgcaaacagaatcgagatggcaatacttcgcctgagcaacctattcatatccgcctccatgccagcgttattcccacattacaccctaacggtcttagcccgcactattcacgaggaccatgaataatactcttgaggcctcggactatgcggaagacgcataatccgggttagcgggcaggcaggctttttccttcggtcactcatcaaacacggtcttgcacacgccctcggaacactgcttcatgtggaagaaggcgatcccggtgaagacggcgagcgggaccgcgccgagcaggatcagcacggagtcgggaatgatgcggatattgccgaggaactggacggcgggttcattgtagaagtgcgcgcttttcgcgagccagagaccgtgcttgtaggcggtcgtgaactgtatgatgccgatcggaagcagcgtaacggcgaacatcgcggccaagccgccgttcaggccccagaacgcgaccttcagcaaaccttctctccagtgctccggccgcacaagcccgcgccacacgaacagcgccagcgcgatcgctagcataccgtaggtaccgaacagcgccgtgtggccgtggttcgaggtgaggtaggtcatgtgctcgtagtagttgatgatcggcaggttgatgacgaacccgaacaccccaccgccgaggaagttccagaaagctgacgcgatcagaaacagcagcggccatcggtacggaaaatcgatccccgcatccttgatcgatctgtactccatccatcccctgctggcgagcatgatcagcgggatcggctccagcgaactgaacaccgccccgagagcgatgaacatactggactgcccgaaccagaagtagtgatggctcataccgatgatgcccgcgacaaaggacagaatcgccgtcaggtacgccgcccgcagcgctgattccttcgaaaccagcccgagcattacgaacagcagcgccgcactcgcgaccgcgaagaactcgaatatgccctccacccagatatgaaccacaaaccaccgccagtagtccgcgacgctgaggtgggtattcggcgagtaggtcagcccgaacccaaagaacgccacgaccagcacagcgctgagcacgtagaaatgcactatgccggcgcggtcgggctcttcgcgcagccgtccggccagcgcccgatacacgatcacaagccacccaatcagccccgcgaacagcagcgcctgccacagcctgcccagttccagatactcccagccctgatgcccgaaccagaaccacgtcttgctggacagcagcccgtggatcgagagcgtctcgcctatcagactaccgaacacgacgagcaccacggccacgaacagcccatcgaccagcagcccctggtgcttcggctcgcggccgccgaccagcggcgcaagatacaacgccgaggccacccacgcggtcgctatccagaatatggcaagctgcagatgccaggtcttcgcaaggctgaatggaatgtacttcggcaggtccagcttgtagaagccggatggatgcaccgtatagtgcgcgagcagcccgccaaccagtatctgcgccagaaacaacgcgaccacgacacccagatacttgcccaccttgcgttgacttggcgtgatcggcgcactcgccatcgcttcgccgagatgcaccagactgcgctcggccacgaagaacctgtagcgatgcgtaacgtagacgaccagccccaacccggccatcagcgccagtatccccgcgaagctccaggcaatcgcgctatccggcgcgacgttgccgacgctgcggtcgggcggccagttgttggtataggtcatgttccgaccgggacggttcgtgccggcggcccatgcggtccagaagaagaagtcagccaggtcgcggcgcttttccggagtcggaaccgcgttggccacgatgccgtttgtgctgtcgcctctgctgaaaatgctctcccaataggcccgaatcgctctgaacgcgtcggccttggcgggagacagagtgagaacgcccgtatcggcgtcgtaggtgttggtcttgatgtcgtctatcaccagcgcgtcgatcaccgcgcgatcctcgagtccgagcttatcgaacgcagtgccgaaccgtttgcgcgagagatagtctcgcatcagcacgcccatcaggttcagtccctgggcggagaagtccatccctcgctgactgccgtggccccagatgctgccctggtccatcaggccgaactcttgatacgcgtgctgcccgcgcattatcgcggccctgtcggcaagcaccttcccgccggacacgatgcgcgacggatacggcggcacgcgcttcgcattcggcccggcgagatagatcatcagcacgaacggtatgacgaacgctgctgcgaacccccacttcagcaggctcgatatcggcctcgcaaagtcgcgcgactcgggctcgtagccgggagcacgatcagacatggcagacctccactgagtttggtcagcggattataccctcggcagagtccgaatacaccaacggagctcgcccggactacgcgcagactgcatacgcgcagaccgtaggaggcgtctccagacggcgatctgctgcgggtagactcggcgcagagcgtaggaggcgtctccaaacggcgatctgctgcgggtagactcggcgcagaccgtaggaggcgtctccagacggccatctgctgcgggtagactcggcgtagagcgtaggaggcgtctccagacggccatctgctgcgggtagactcggcgtagagcgtaggagacgtctccagacggcggtctacgggcgtgacgccagtggattcggggtctggaaacccctccacctaacccggcgcctgctagtgccccggcgcgaccagcagcccttcctcgcccttgtcctgcaccgccaggcccgcgatgcacgacatcgtgaacagaatctggcagccgagatcggtcaggtcgtagctaccaccgaggtccttgacgtaggcggcgtagatcagctcgcgcaggtgatagtacagattgtcgcccctcaggcccgtcgattcggtcagctcggttgccgcaagaatgcgggtttgtcaactaggcttttttcagcggcgacttgcacgaggcatgcgggctacctataggctggtcgggggcggagacgcccccgacataacgatcccgacgtgcggtgctagggcgtcacccgctgtgaccgtgatctcctccgcccccgcatccagccacacagtccccctctccgcatcccactctccgccggtgacggacttgatcggcttgccatcagctcttctcagacgcagagccagcttggccggtgggttgcggcgcgggggtttgacgcgggcctcgatggcgtcgtcggtgacggtaatcgtgtacgagaccggcccgaaccacgtagcggcgtcgcagacctcgaccttctcaccgaccctgaaccacgacaccggcgcggccttggcgagatagagcgtgtcgccctcctcgttgatcatgcacgaccgcaggaggttgaggaacccacattcgtccggggtcttgtaatacggccccaccccgcggccgagctggacaaccggatgctccgtgaacacgagcacgtcgtcgtagatgctcgcggcgaagtcgttgaagagcgcccgaactgcatactcgggctggtcgcgcttcacatacgcgacgccgttgttgagcaggttcgcctgaatcgtaagccccgcccgactgaaccagtacttctcgacatcgatcggccgaccccaatcgcgtgacggaaacgccacgtcctcgaggtacttcagaacccacgtcacggtctgatcgtcgggttcgagcactccgccgtcaaccaaatgcagcgggccatacgcagcctccctgaaccagccccactccggcccgcgaatgtccgtgcggatgggcacgtgcggaatcgccgtgttgtccggcagtcgcaccacaggcgattcgaccctcgcccgctcgacggcggccagaatgtcggctcggtacgcatcggcctcttcagcgagccgcttcgcgtcggggtggtcgatctccgcaagcgcccacgcggcccactcgatgcctctgcacgcgtgggcattgaccgcaaaccagtagcgccactcgtcgttgtcctccaggtggccggccggcataagaccgtactccggcacccgctcgccgtcgcgctcgatcttggtcgcctgccgctcgcgggtcacgaaatcgcatcctgacacgatgttgccggcgacgcgtctgagccactctgtgtcgcgggtgatgaagtagtgctccgccagcgactgcagtataaagccatggtcggagttatacgcgaacggcgcgcccaccgacttgccatcgttgaaagacgcccccgcaagcgctccttccttgctctggaagttgccgtccagcccatcggcgccctgcacgagcagcagcccatcaaggtaacgctcggcctgtttgtgcatccctcgatagtcgagctgccggatctgtatgcacgcctcgttgccgcacgcaccgtaagagaacgtcgccgccggcaccacgtattcgcccgaaccggggtccttggtcgcggttatcgccacgtgcaccgggaccttgtcgtagaaccgctgcaccatcttgtcggggatcactatccgtgcgcccgactgcacgaacggcgtccagaaatcgcgtacatcggccagcttcgcgttatagtcaacagaagcgagcgtgaatgcgccgtcctcgcccgtcagagtgcagtatggaatcgcaaaggtaaccacgtcgcgctcgccgccggcgaggtctacctggtagtgaaacgcgctggtgatgcccgccggcccctcgcgatccattgaaagcggcgatgcatacccacagcccttgccgagatcgatccgggagcggatgagcgacctgtcatagtcgcggacgatccagttgaacgtgttcggaacgtctttgcggtccacgcgcgcggcgagttcgtcggactgcaactgctcggtcttgaccagcttaccgtgcgcggagagcagccccgagtcgtattccacgcactcgaacgggctcgattgcatccacagatgggcctttcgggcgtccctgcagacgttgcgcacctcgaactgcacgagcagcactctatcctcggagcccttcctgccaaagcactcgcccatgtcctcgcgcagataggcggcgaacgcggtctgggtccactcgatatcgcggtcgtcccaaaccgacgtaatcaccggcgtgccatcctcgctccaactctgccgcaccgcaccctcgcgctcgcgaaagtccgggaaatcgccggtcgcgaagcgatagttcatctccgccccgctccacagcagattcaccagatcacggcccatcggcttgttctcgcccttgttgacgaacacgtttccgttgtagcgcagcccaaaccgctgcttggacccctcgcaccccagaggcacataccttccgcgcggcgcgtgctggaacgcgggccgcagccggggtatctcggccatcgcccgatcaaacgtctgctcgggctcgtcggcaaccttgtcgtaaatcggttttacgcctgacgcaaccaacgcgtccacgatctgctccggcgcacgcctgtcgatcgacggccgcaccagcacgccgaagtcctcgacgtagagcgcctcgtttatgacatcgctcgcgcggaacgagaacggatgatcctcatcgtccacagtgatcacggtgtgcctgtgcggaagatcgaacttcggcggcgccatgtatagatacttcacattgagcgcttcgtcgccgcgcgcgacatccgtgatgtggccgttggtcgcacgaacgcacgcgtcaccgacgccgaatatgtccacttcgccttcctgccactcgcccttcacgaacgcctcgatgcgcttgacgcgcgggctcgcgccctcggcaaagagcagcctcaactgcagggtcgtgcggaactcggcgttgaagtcctccgcatgctccagcccgcctgggtcccatatctcggtaaggtcgaggtgcgcgaagtcgtggactactcggctgccctcggcgctcacgtccgaaatcgcggtgatccacttgccgcggtagtgatcgtcgcgaccgatccatccgcggccgccgccccggcccaggtccctgtcgttgaacggccacttggcctgccagtactgaacctcgacctcggcggccggcccgtcgaacgtgaccgcgaccgcgctgatgtccctcggctccgcccactgcaccgccaggtgccgcctgccactcgaatccggctcggacggcaggtatgccccaccctccattaccgcatccacaaaccgccgcttgcgcggctcgtcgccctcgtagtatatgatcctgccgaacggcgcaaggtcgatggccgtcccggccttaggtgtctgactcaatgcaattcctccaacatccagtgcttgcagaacatgctaccatacatcccgcgcgccttcatagacccgagtctctcggcgtcgccgagacgcggaatggcaggagaccaactggcttccttccgcgcctccgcgattcccttcgttttcgcgttttctgtttttcgcgctttcgcgattgcatttccttttgctataattggagggtttttgggcaagcaaacatctgaggtgaagcaatgtacatagacgaaatccgagctcgcgaaattctggactcccgcggcaacccgacagtcgaggtcgaggtctacctcgaggacggaacgatgggccgcgcggccgtgccctccggcgcatcgaccggcgcgcacgaggccgtggagcttcgcgacggggacaagagccgctatctcggcaagggcgttcagcaggcggtccacaacgtgatggacgtgatcgctcccgaactcatcaacgccgcagtcaccgagcaggcatggatcgaccagaccatgctcgatctcgacggcaccccgaacaaaggcaagctcggcgcgaacgcaatcctgggcgtgagccttgcgtgcgcgaaggccgccagcgagtcggtgggacttccgctctaccgctatctcggcggcaccgccgccagggacctgccggttccgatgatgaatatcctcaacggcggcaagcatgccgacaacaccgtggacattcaggagttcatggtcatgcccgtcggcgcgacctgctgggcggacgcgctgcgcatgtgcgccgaggtctaccataacctcgccaaggttctcaagagcaagggcctctcgaccgcgatcggcgacgagggcggcttcgctcccaacctcaagacctccgaggagaccatcgaggtcatcctcgaggccatcaccaacgccggttacaagccgggcgagcacttcatgatcgcgctggacccggcgtctaccgagatgtatcaggatggcaaatacgtctttgagggcgagggcgtgacccgcacgtccgatgagatggtggactactacgagtcgctggtcaacaagtacccgatcatctccatcgaggacggcatggccgaggacgattgggacggctgggtgaagctgaccgcgcggatcggcgacagggttcagatcgtcggcgacgacctctacgtaaccaacgtcgagcgactccgcaagggcatcgagctcaaagcctcgaactcgatcctgatcaaggtcaaccagatcggctcgctttctgagacacttgagaccatcgagaccgccaagcgcgcgggcatgacggctgtcgtcagccaccgctccggcgagaccgaggacagcttcatcgccgacctcgtcgtcgcggccaactgcggccagatcaagaccggcgcccccgcccgcagcgagcgcgtcgccaaatacaaccagctcctgaggatcgaggaagacctcgacacctccgcccgctacccgggcatcaacgcgttctacaatatcaagaggtagttgcgggttcgaagttgggagttcagacctgagagttgagaattccctaccccgttagccctgagtaggcgcggctcgtgcgccgtatcgaagggcggtggcgccctgatcgggccggagcatcctaagtttgtcgaaggacgctccggccttctgtcgtccggatgccgcgaagatcttgacaaagcaaccatcctgatgtatatttcgcatggttggtgcctttacccctgtgaccgcatccgtttatagcataccggagaactgttggttactgtaataaggctaacaaccgtaaggtatcccccggcagtgccagtcattgtcgggggtatcctttttgtgggaggcaagcatgaggtacgttctcgggctggacatagggattgcgtccgtcggatgggctgtgctgaaccaagacgacaagcgcgttgaggctctgggggttcgtgctttcaacagagcggagcacccaaagaacggagcttcgctggctgctccgcgccgcctcgcgcgaagcgttcggcgcaggctgcgccgccgggcaggcaggctgcagagggcgaagaccttgttcgtcgattacggcctcatcgccccacaggcgctcgataccgcgtttgacaccgccaagggcaaaccctctccgtgggaactcagagcggaaggactggaccgcatgctcaacggcgaggagttcgcacgggccctcttccacatagtgaagcggcgcgggttcaagtccaaccgcaagaatgtcaaggacgccgaagatggcccagtacttgacaatatagaggccaaccgcaagcgaatggacgaagccgggtatcgcacgcccggcgagatgtatgctcgtgacgagcggttcgcgacacgtgacgagcggttcccggcacgcaaacgcaatacgacagactcgtacctcaacaccgtaagccgtgaccttcttgagcaggagatacatacgctctttcagcgccagcgggaactcggcagcgccttcgcgtccccggaactggaacacggcattgtgcaagtgtttgcctggcagaagccgtttgcgtcgggagatgatattatccgtctcgtcggcacatgcacgttcgaggacggcgagatcagagcgcctaaacacgcctatcatgctgagcgatgcagccttctgcaggccgtcaacaagctcacatactcgacaaacggagataaggcgcgtctcgacgagagacagcgcaagaccgtcgtcgatatggcctacgctcgtccgaaggtgacctacgcccagatacggaaggcgattggactgccggaagatgcgaggttctcgggcctgacctacctcagccgccagtcaaaggcaggcgaactcactgaagacccgaagtgcgagtcggccacgttcttcgaactgaaaggttaccatacgctgcgcaaagcgttctcgggcgatggcctctgggagcgcgtgagtaacaaccatgatctgatggacgacctcgcgtacgccctcacgttctacaagaccgacgaggacatacaagcatatctcgcggggcgcgccgcccccgaattgctggagcctgcccagacctgcgcgttcaccaagaccgccaacctgtcgcttgtcgccatcaaaaacatactgccgcaccttgagaatgggatgctttacaacgaagcatgcgcggcggcaggctacaaccacaccggaaagggcggcgggcacaagacggagaagcttccgcctatcccgacggacctcatacgcaatccagttgtgctccgggctctgacgcagacccgcaaggtggtcaacggagtgatctcgcgctatgggtcgccgtacgaaatccacattgagcttgcgcgcgatgtcggcagaagctacgaggatcgcagaaagacggagaagcaacagcaggagaatcgcaaacaacgagaggagcgcgagcggcgcttccgagaggagttcaaccgcgagcccgtcagcgccgacctgctcaagtggcggctctacgccgagcagtccggccgttgcgcttactcgctgaagcctttggacctagaccgcctcttcgagccggactatgccgaagtggatcacatcataccgcgcagccggagcttcgatgatagcctgtccaacaaggcgctggttctcactgacgcgaatcgcaacaagaagaacaggacgccccacgagtggtttggccatgacgccgcccgctgggcggagtacgaagcctgggttcgcggcgcgatccgcgacccacgcaagcgcggcaacctgctcaaggaaaactacgacgcccgacaggaggaggagcgcaaagagcgctgcctggtggacacccgctacgcctcaagcgctttcgcatcattcgtccgggataacttgctgtttgccgatccgtcgcacaaactgcccgtccggtgcctgaacggacaggtaacggcctgggtccgcgcgctgtggggattgcacaaggaccgccaggacagcgacctgcaccatgcccaggacgccgccgtcatcgccgccgtcatgccacaccaggtggagatgctgacgcgctacgcacaggtggtcgaaaccagggaacccgttgtggataccgagaccggcgagatcatcgagtggaaggaaaaccagcgcccgcgactgccttacccgtggaagggcttccgccgggaggtgctggacaagacaggggaggtcgtcgtgtcccggatgccgctccgcaagacaggcggggcgctgcacaaggatacgttgcgctcctccaagcaccaggccgagaacagaaccaaagtgagaaagccccttgccgaactcagtgcagccgatctgccgaacctcgttgctctcgacgaagaccggaagctatacgccgcgatcgagcgcagaatggccgagttcgacaacgatgccgcgaaggcgttcgctcaaccgctctataagccgctcaaggacggctccaacgggccggttgtcaagaccgtgaaagtgtggcagacgctcggcgtcggcgtgcccgtccgcaaaggcatggcagacaacgcctcgatgatccgcatagacgtgtttagaaagcagaacaacaaggggaaatggcagtattacgtcgtgcccatatatgttgcccacgtcatgagtggcaagctgcctgacatgagcgctgaccatgagttcctgttcagtatccatccatacgacctcgtcagggttgccggagcggactggtctatgctgggctacttcaggggatataacgtcaacaccaactcgcttgagctgtgcgagcccaataacgtccgttcttgcaaaggcagcataggagcacgaaacctgttgtgttttgagaagttcgaaatgggtgttctgggcgattactatcctgtgcgcaaggagaccagacgtggcctggcgaacgatagtgatctcgaacccggcgaggctgagggttgaaaacgaccagcttgtaatcacccagcaggaatcggtcagcttcccgatagaggaccttgcggtgctgatgctggagtcgcacgaagtgctgctcacatccgcgctgctggacaggctggcccagcacgaggtaatgctgcttgcctgcgatgcgcgccatcttccctccatggccggcgtgccattcgccgggcatagccggctggcgggcgtgcagcgatcacagttggaatccacccagccgtttcgcaagcggtgctggcaggcaatcgctcgctccaagatcgccaaccaggcaaggtgtctgcgaatgctgggccggtcggaagcagacaaggtctgtgcgctggcggacgccgtaaccagcggggatgcgagcaacatcgaatccgttgccgcgcgggagcatttccaggccgcgttcggacacgacttcatcaggttcgccgaagacggcatcaacagcgctctcaactacggttatgccgtgcttcgcgcggtcgtcgcccgagcgctcactgtacacggcttcctgccggcacacggcatccaccaccacagcgaactcaaccagttcaacctcgccgatgacttcctggaacccctgcggccggtggtcgatcttcgcgtagccgaactgcggccggacggcgaactcaccaaggcccaccgcgaagcgcttgtggcgctgattcacgcggacgtgctgatagatggcaaccggcaggcaatccttcacgcggctgaggtcatggcggcttccttcgtggcggcatgccgcgacaaggaccctcgtctgctcaagctgccggagattctgccgctcaaaacgcatgcctatgagtagatttatgagacttctggtgctatacgatctgcccatactcagccgcgcggagaagaaagcgtatgccaggttccacaagttcctgctgcgcaacggctacgacatgatccagttctcggtctacgcccgactgtgcaacggaccagagtccgtggataagcacctggcccgtctcaaggcgaacctgccgggcgaaggcagcgtgcggtgcatgcaggtcaccgagaagcagttcaccgggattcgagtcctcgtagggacgaaaacgaagaaagaggaccccaaattcgcccgccaactctcctttttctgatgtcacagaacgcgaaaaggcccaagatgcttctcatcttgggccttttcgctccgacggattatagcataccggagaactgaggggaactgtaactcaagcactggcaggattggcttgtctgcattatagcataccggagaactgaggggaactgtaacacgattctcacgaagaatccatggttggcaattatagcataccggagaactgaggggaactgtaacgtcgcaatacgcaaagtcatcaatctcccgattatagcataccggagaactgaggggaactgtaacgaagcacaggagatgaacggatcggacttattatagcataccggagaactgaggggaactgtaacccgttgactcgggatatgcccctcattccattatagcataccggagaactgaggggaactgtaactcgagcgtcccgagcggtggggtggtctcgattatagcataccggagaactgaggggaactgtaactctcgcggacttcggcgtctcgcccatcctattatagcataccggagaactgaggggaactgtaacccatattgccacctcaatcgtatgacctgtattatagcataccggagaactgaggggaactgtaacccggccatagacgcgctctcggtttcgagattatagcataccggagaactgaggggaactgtaacgctggacgaggtggaccggttcgaagcgtcattatagcataccggagaactgaggggaactgtaaccggtctgcattcgcatctcgaacgacttgattatagcataccggagaactgaggggaactgtaactccataacggccgagtcaaatagacgcgctattatagcataccggagaactgaggggaactgtaacataatctcttgtccccgtccgcgcgcggacattatagcataccggagaactgaggggaactgtaacccaatagccatgctggggcgttgcgaataaattatagcataccggagaactgaggggaactgtaacgtcgcaatacgcaaagtcatcaatctcccgattatagcataccggagaactgaggggaaccatcaccacccgtgcacaacactccgccgaaaaaacctgaaaaatgtctgcaaccaatggacaactactgcgtctaatagtatcggaggcccatccgatgctcgctcgcgccccacaactggccggttccgcatttcgtttcacgcgcggtaatccgcttcccggcgaaacgaatcccgcacgagctgagcgtgaaatcatttcgttttgtgcaaaaggatacatgcgccgccgtttagcccgcccgctttccggcaatcatcggcttgtggaatcggtgcaagcagcacaagctgatctggacggcgcactggcccttcttcgacgggtcttcgatggcttcgaccaaatgatccccggcagacgcgtgctcgacttcggctgcggggcggggctgcaggcgtgcgcgattgccaagctcggcgcggagcgggtcatcggccttgagaccaatcccaagaccctcggccgggcaaggcaactcgccggcggacttgggctggacggcagggtcgagttcggcgagaccctgaacagcgtctctgaggacggcttcgatgtcgtcatctcccagaacagcatggagcacttcgccgaccccgccggcgtgcttgccgagatgagaaacgcactggcgccgggcggcaagctgctgatcacgttcggcccaccgtggcttgcgccctacggcagccacatgaggtttctgacgccggtcccctgggtcaacatcctgctgcccgagcgagtcgtgatgaagctgcgatcccgccgggtccgcgacggggctgcgcgttacgaggaagtcgagggcggcctcaacagaatgaccgtgcacagattcgagacccttgtcaaccaatccggcctcgaggtcacataccgaagactcgactgcgtcaagcggctcaacgcgctcgccgcgatcccgttagctcgcgagctcttcatcaatcacgtaagctacgtgctcacagccagtgatccaacagacgcttatcggtcaggccgtgaagcttcatggcggacttcgccgcttctataagcgactcttcgcggatggcgccgatcagctcggactccagcacctccgcgcccatcgcccgcgcctcgctctcgacgaaggcgaagacgtcgtagatcgagacctggtggggctgagtgatgtttgtagatacctgggcaataccgcgggacttgagcttcacgcctatggctttcacgcccggcaggccctcgccgctatccctgatcttgcgcatcttcgcggcgatcgccttggcaacgtggatgtcgtcggtcgccaggttcacgttgaacgctatcaacggcccgcgcgcgccgacaactgccgcccccgccgttgggtgcagctcggacgggcccaggtccggctctcgaccgttgaccagccccgtcctggccagcgcctcgaacccgcccttgcgcacatcggcgaggttggcgcgatggcgcatcacagcagagcgctcgtagaaatagaccggcactcgaagatcgtcggcaatgctctttccgatctcgtatgatagcgcgaccgtctccgccatcgtcatctcgcggatcggcacgacgggaatcacatccaccgcaccgatccgcgggtgctcgcctttgtgcttcgtaaggtcgataagctcgacggctttcctcgccccggccagcatcgacgcacgcacatcctccggcgcgccgacaaacgttacgacggagcggttgtggtccacatccatcgaccaatcgaccactcgcgccgccgacgcgccctcgatggcatccacgatggccctgacgacttccttccgccgtccctcgctgaagttgggaatgcactgaacaagtctcatttcgccgtcagccacctcgtctcgcggtcccatctcagcacgcggtcgcacaggtcgtccgccacgcttccgccccgcgatgcgaatgcatccatattcggcgtactggcatgctcgctgccatggcaaccgacgtcgaacgctctaggctgatcgcagaggcagatgataacgttgggtttgctgtccatttagcactccgtcggatactcataccgctcatagtagcccaacagctcgccgtcagcgccgcgcactgcgcgcatgtagatgcggcgcgcaggcgtgtcggttatcatgctctcctcaaggccggcctgcatctccgcgaagatccggaggattattgcctgcgactgctcgttgtggcagtccatcaaggacgtcccgataagcgcatctccaccgcgcttcgcgtactgcgcgacggctgctgtgttcatgtaacggatgacgtggtcggtgtcggcgaatgtaataggtatggtgaggctgtcgcagatcgcggacatgagcttgagatcaatcactgtgaacctcgttcatagcgcgcggctatggtgccgggcgtgtatctggaacattgtgcaaactcggcggcggctttctgaacccgacgaggacggcgttaccgaagtcctcgaatgctttcgcgaactcggcgcggtcgtagcgcatgtctttgcccttgccgtcacgcttctcatcggggtcgttgactatgacggacttctcgtccgagcccactatcacgagcatgtggccgcccgtgcagtgctgatcccaccggttggagatgtggcggtagatgatccctgccatcaccggcccaccagcggcgacttccttgagggcttcgtcgagcgtcatgtgcttatactcgatgggcaggttgtagagcttcttgccggcctccatgatctcgcggtgcttggtggggccgcccttgatcggattggccttgcccataagcttgttgagagcgatgatgttgtctactgtcggctgcctgccctgcacgtaagcggcgcacatctccatcgcggcgggcgcgcagttgccgttgctcgggctctccttccagaactggctgagatacggcacgtcgagcgagtccgccgcaagcacagttccgggcagcgcagtcatgtagacaagacatacagcgatcgcggctatcagtctcatggttcacctccccatcatactatcccaatagctccgccgtgtccagtggcaggaagtccccgcgccggcgcctaacgggtaacatggggtaatcatcacatgcgctctgtaagacttccgcttccgctgcttatcctgacgtgcctgatcacatcgggctacgccgacgacggcaagccactgccatttgtagacggctcgtggacgctcgtactgcttcccgatacgcagaactacaccaagggccacccgaaggagtttgtcagccagaccaagtggatagccgaccacgcgtcggaccgcaagatcgagttcgtgatgagtgaaggcgatatcacaaacgacaacacgccggagcagtggaagaacgccaaaaccgcgttcagcatgctcgacggcaaagtgccatacgcactccaactgggcaaccacgactacaggcccaagcctctcgacaaacgcgccacgctcgcgaacaagtacttccctcccgcgttggtggagaagtcgccggactacggcggggaatacgagaagggcaagctcgacaacgcctactatctcttcaccgcgggcgggcgtgactgggtggcgctgtcgctggagttcgcgccgcgagacgccgtcatcgactgggcgaacaagaccctcgacaagtatgccaaccgctccgcgatcatctgcacccacgcctacatcgacctgaacggcaaacgattcaactacctcgaccccaagggccgcaaggttgtcgcgaatatcggaacgaacggcctcaacgacggcgagatgatgtggaacaagctaatccgcaaacatgagaacatacagttcgtgttttgcgggcacgtcttcagaaatggcggcgccaagaggctcgacagcagaggcgatgcgggaaacgtcgtccacgagatcctgtcagactaccagagccgccccaacggcggcgagggctacctgcgactcgtggagttcctgccggacggcaagaccgtgcagatcaagacctactcggcgaccaggaacgactacatgaccgacgcagagaaccagttcaccgtcgagatcgcgcccgcgccaaagaaggcgtcgcaatccggatcagagtgacctgctctcgcggcgattgaggtacaggttaatcgccagcgcgacgaacgcgcccaggaatccgacgacggccgcagcgatcatgactactgccgagtgggaagtgaaaacgactcccacagcggctccgagagcgattcgggttcgtcggcgcgcggctcggtctcggcggactccaggaccgtcagccgctgcctgaacgccgtctcacgcttcgacttccgtctgaacgagttgcaggcctcgtaactgcctttgtcgcccctcagcaccgcgcctatcgcctgggaatcgctcgtcgtctgcatcacacacctccggtgtccttacacactcaatgacaccggatgaaggggaatgttacttacagggtacagcgggagtgtcggggatgcaagaggctatagtgcaatgcggattgcgtctacgcgctcttgcgtttcttggggatgagttcgatgagcgagcgcagggccttgttgacggactcggaatcggggaagtacttgctgacatcgggttcgaggactatcgcatcttgacgggaagggtaatgccgttcctccacagaaccatcgggttgtatcactctcaccgtgtatccggcgtcgaacgcgcccgcgtacttgccgcgtacggcacctgtgaagtcgtactccgggcgcatctcgtcgccttgctcgtctctgcgtttgcgtgtcatctagcgatgatagactacttcgccagtcgtgacgatctcatgcaggaacgagatcggctcgacgtggtcaagcatcgaggaatggaatccgatagcctccagcatgggctcgctgttccactccgcctcggagagaacgccagagaactcccggtaatccggctccccgaacgcctcagagaagacggcgagatcaagatcagagtcgggacctgcagtgccacttcggtaggagccgtatagaaagatgcgctccacgggaacacccagccgctaaagctccttgacataccgcctaaccgcgcgtatcacttgagttcttgtcccaaccatggcgacgagacagcccccgcgccataggcgaagcagatcgacagcctatgtgcgtttgggcttcctggggcgtatcgccttgatgtcgtcattccacttcgccaagatctcactggtgacttcggaagcctttgtttcgggcgtcgtttcgcgctctctgtctgcaggcgtaacaaggggcaaacgtttggcccgcgccagatcaagcagggagatgacattgctatgtacagccactgttcagtcctcttcgcgcctgaagtagttcctaaagaactgatgattcaggtttccgtcaaagtaatgcttgcgcttcagccagacaaagccgtcgccccgcgatatgaccgcgacatccacgggtcctccgaccgtctcaggcaccatggtcattcttctcttaaatgctgtcagattaaccagcgtctcggccatcacagccagttcatccttggagagcatgcccacggtcgtaacgatcggacgaacgtggtagctatccatgtactcgactgatcgttcatcgactgtcgacagagcgtcggcgatcatcttgtcgagcacggccgcgacctcgtctcgctgatctgccagataggtcgagagagcacccgcaatcagcgaaggcagacgcgagaaggactcgcccaatgtgctccgtatgaagcggtgatagtcgcggtctatgccttccatgaacacgcatgccatatcgtcctgagcgaacggcattacggttgcctgattgtcaaaggagatatcaactgctctgttctcgtcacgtctgacgatcaggcgatccaacacatagccactgaacagatagcagcgaagagacggaaagagatcatttcttccgaacccggcaatgactacccccgcctgacctggttcatagtcggcgcgcacgatggactctccaaccagttcaccaaacagcgagaaagcttgctctgtcagatgctgctggcctagcgtggtgctcaccagctcccgaattctcgcatcgtatctcgagacaacagccttggcgaagctctcatcgcagtcgtcgacaacgggtagctgtcggcgcctcgcgataagcgcctccagagagccaacgattattgacctcacgtcctcgtcgcttggctggtctccagactcgtatgcatcccttattgcactgccggcatcgtctgccactctggccatttgggaacgtatgatccggtcaacatatctcgcctgctggtcctcggggaagaagcgcgacgcgtggtgttcaacgaagcgcaagaaatcggtagcatactcatccagagaatcatacacccgatcggccaactgccctcggtagaacttgataatggtctcccacggaacgcccatcagatcagcgcttccatagaccatcacgcctacaggatggaacttggacagcgagaacagcttgttggctgtgttataggttttgacgctctctccgcttccctcgtccgcaactgtgaccgcactgtctgcagccagtgccacacccatcctattgagtattgcgatctccgctgtcatgcagatctcccacgtgcacagcctcggcagccaaacatgcatgcccgctctccccacgcattataccacatcagaaaggcactcctcaggtcctgtcgacgctcgcggaagctaccccgccacaatattaaccagtttccccttaaccacgatgaccttgcgcacggtcttgccttcgaggtcagctttgaccttatcggaggccagggcgagctgctccatggtggcttcgtcggcgtcggcggggatggtgagcttgtcgcggatcttgcccaagatctggatgacgatctcgacctcgtcggccttcgcgacctcgggatcgaacgccggccactgctccagcagcgtgaactcctttttgcccggcttcggcagcatcgaccaaagctcgtcggcgatgtgcgggaccatcggcgagagcagcaggatgagggactcgaccgcttcgcttatcacagaggttgcgccctcaccccggccctctccccctggagacggggcagactgtgcgccgtcgccaggagagtgagcactggttgcgaaggaatgcatctcgttggtcatttccatcagcgcggcgacggcggtgttgaaggcgaagtcctcgatatcgccgctgaccttggctatcgtctggtgaaccttgcggcgcagggccttggcttttgggtcagaagctgcctcggcggcgactttgccgcgccagtcgtaatcgaacgactccgcgtgctcgttcaccagccgccacacccgccccatgaaccgatacgccccgttcatgccgtcctcgctccactgcacggcgtcctcgaacggcgcaacgaacagctcataggtgcgaagcgcatccgcgccgaacttggcggccatcgcgtcgggggtgacgacattgcgcttggacttggacatcttgacgtatttccagatgatccggctcctctgctcctcggtcatctgctcgacttcctcggggaacagcgggatcaggtcgcggctctcctcg

SEQ ID NO: 1773 - DNA, 17647 bp, synthetic construct
  misc_feature 1..17647: note = Synthetic
  source 1..17647: mol_type = other DNA
tacttccggacaagctcttgccccttccgttcaccgagcacgcttacggctgtcgagaggccatcggatgtaatcccgttcggggcgacgaccgttaccgcgatcatgtcggtaagcccgagtccggtgcgcgggtccacaatgtgtgaatagcgcataccgccgatctcgacatactgctccgtatcaccagaggacgagaccgcgccgtttgcaagcgttatctgcttcttcgcgggatcggtcgcattagccacatcgatctcccagcctttcttgcccggtggaggtccactcaccactatatccccgcccatctcgacgagcgcgctggaaatcctgtgctcctttaacacccgtatcgcctcatcgcacgcataacctttcgcgatcccgccgaggtcgagctgcatgcccggagtatcgagccgcacctttttcgcattcacatctatatgaactttccgccacccgaccagcttccgcgctgcctcgagctcatcatgcggcggcatcgctccggctttcctcgctttccgccacagcttcaccaccgctccgaccgtcacatcgaaagctccacccgacctccgcgcgagctcctgcgatctggcaagcacaaacagcatctcattactgaccggaacaaccaccccacccgccctgctcgaaagccgcatcagctcactggtcggccggtagtcgctcattacatcctcgagataagcaatcctgtcgaatgccgcctcgcagctccgccgcgccgcagcctcatcaggggcataaaccaccatccgagcccgaacccccatcgcgacttcggagtattcgaagcgatgaagctcaggctcagatgcggagcaaagcgatgttataaataaaaaaagaaacaggaataatgccctcagaaacatcgtccggaccatgaaaaagcaggggccgatcttagcaccggccccatatactattgactttcaggtaatgtagtggcaacctggcaaaaggctttgtgctcgatccgacccgccagtatgtcacatcattatgcgaaagtcaatatttagttgcccctgataatatttcgggaacaacgggatgcctgataactgacaactgctttaagctttcttccactgctctcgcaggaacttcaccgacttcggaatctccacctctcgatcgccgatgcacccgcattcaaagctgcagaagtcctggtaaccgatcattttcaagcccttgaagccatcagtataattgcgctcgtcctgccctggaagattgcgtttgatcgaagccaggtgaacgtggtggatatactttccggctgagatgaacgcgcccatatcgctcggctcttcgatatacatgtggtagaaatcacccatcacacacgcagccggatgattcgcatcgcggcagatagcggctgcatcggcgagctggcgcacataccatgtctcatgtcgattgagcggttccaggagcatccgcgtacccgccttctgcgcaaactcgcagagctcgggaagctgatcgagcaggattttacgcccctcgatatgattcaacttggtctgcccattgaacgccggcacgaatatcaagcccgtcgaccccagctcacccgcagccgtcaggatcaccttcatagactccacacacttcttgcgctctgattcctgatcgctcatcaaagcgccctggaaccccgcgcatatcgcgcttaacttgatcttcgaatttttcagagccgcctgaatctcaggcacccgattctccagcccgcgcccaccgacctcgataccatcgaagtcccacttctccattttagcaagcttctcgggcagatccttgcctggaatgatcccttcctggctcgatatcttcaacacagccctgggctcctttttgttcgcggcctccgccacatcagtggcgatccccgctgaaatagctgcagcgccaaatgcccccagctttataacctcacgacgactaacttccaccccaaaacctccttccaagaatatgctcatcgcgggaagggaatttatcgcgaaagcacgaaagggcaaaaacgcgaaaaggaatctattgactttcgcataatgatgtgacgtactggcgggtcgaatcgagcacgaagccttctgccaggttgtcactacattacctgaaactcagtagtaatgattaaggaatcgtgcatgaacactctcgtgactgctacgcagcacctctcgcagccctgcgggccgctgccggtcaagggctgtcgtgttcgccacgaagggtatctctatggtaccttttctcagtacagaccttcaataaaagccgatactcattactcactactaattactaaatcccttttcaccctttcgtgctttcgcgatttaatctcccttcccactcatcgcgctaaattagcggtgtcttccccggtactgcgaccggcgctacgggcagcgggccgaactcgagcttcgcgggcatcaagtcctctttcgaattaagcgcctggtcccagctcacttcctgacccgtataagcggacattctgcccataatagccgtaagcacactctccgcaacctgcttcgtctcattgagcggcttcccagcgcggatgctagctatcaggtcggcatgctcctgcatataagcgctcggtgatgggcctgcatatttccatccttcgcccgcgcggataataccgcagcagttcgacgtgcccttcgtgccgaccactctctccgatacatttccgacgcagccatcgatctgcctgcacatactcatcagccttgcgccgttgggatattcatattcgacagcgaaatgatcgaagatatgcccataagccggatcggtgcggacctggcgaccgcccatccccacgcacttgaccggatgagcctgcatcgcccagttaataacatcgatattatgcacatgctgctcgcagatatggtcgccggaaagccacgtgaaatacagccagttgcgaacctgccactccatatccgaccaatccggctgccgtccgtggttccaaagcccaccctggttccaatagcactgcgcggacacgagctcgcccagttcaccatcatgaatccgcttcatcgtctcgacataggggaactggtgcctgcgctgagttccggctacaacaccgaggttcttctgggcggcaagctcaccagcggcgaggaccgtgcgaattcccgtagcatccacagccacgggtttttccataaagacatgctttcccgcatcgatagcggctttgaaatgggtcggcctgaaaccgggcggagtggccaggatcaccagatcgacgcccgcgtcgagtactctctggtaagcatcgaacccgacaaagcaccggtccggggtaaggtctaccttgtccttcgcatccttattaccggtaaggtttttgtagcagccgtcgagcctgtccttaaaaaggtcgcccagagcgactattttgacattgggtgatgaattgatgcagtcgtaggcagcgcctgttccgcgccctccacacccaatcacacccacacgcagcacatcgctgccctttgcccatgctccctgcgtcagacccatagtcccagatcccaggagcaccgccgtagcggctgaagccttcaaaaaatccctgcgagtcactgttcccaacttgtcctgaccgtccatatccaatcctctcgttcagcgttagattatcaaataattcttttgggagaaattttaataggcatgggtgcgggagtctgatcagcattgatagtctctttagacacgaaagcccgaaatatataaatagcgaaaggagaatctattccctatcattggtgtgttctgatgtttcgggaacaagttcccgaaacaccggactctgttccctgttacctatctttctacctttcggtctttcgtgtcaaagaagactataactgccgatcatgctaccaccgtacatgtattcaaaattaagaatatctccctaatccactcgaaccactctaaatcccgcgaatgtcgcgtctgagagccaccacttgctcttcgggctctgcggatcgtttgcttgccaggaatcatcctgatacttccgcgcggatgctcgtatacccttggccatatcgtcataagatccgccgcatagcaccggcttaccgctcatatccgtgcaccactccgccacattcccgagcgtatcataaagcccccatgcgttcggcgccttctgccctaccggattggtcttttcctgaaaataccacgcatacttcgcaagctcctccttagccggatccggagctccggcgcggcatgcgtactcccattccgcctcggtgggcagccggtaagtgtgcccggtcttcgcgctgagccacttgcaatactcatccgccccgtggaatgactcgttaatcacaggatagcccttgtgcccgaacccacggtccgccgcgccgtagggtttgctcggatgagaaatcgcatcctttcccggagcaggtgaagccggttcatcgagcctgaagacaaacacatcgtactcgtcccaggtgacctcggtctttcccacccacatcggcttgattttaactttgcgaacagccccgggtttagcgagatccggcatcgatatctcaccacccggaatccccaccatatcgaacttcacgagcgttccggctatgctttccgtataagaagccggcttgctcaccgtcggtttcgccttcacagcctgagcactccaccccgccgatgcgaccgcgccaacaactacacccagcgtgataactctcgacacaaccccaccaaaagacaatcgcataccaatcttcctccgaacaatctggcccagcagccattacgccaactccttccgcaccccataacgcatttcctttttgattgtctccttgacaatctcagcagcgtaggttacattgcaaatatgtaacaaactgttccgtggaggcaataagccggatgcagaatagccgactggctcacctaatcgcattcttcatactttttatgctcgtgtgtttctccataactgcaaatgcagcggataacagcacctcgagatggataattctctataaaaacggcaagagtaaaactactatgcaagccgtcggcaagattcgccacagctaccaaatcatccccggttatgcagccgaccttaccgcggcggaagtagacaagctcagaaaagacccgtcgatcgccacggtcgagcccgatcacatccgccacaaatgcgagatagcgcctgtgtcctccacacagccctacgacgcattccttacttcgaccaccgggcaggttatcccctacgggattgacctcgttcacgcgcgcgacgcctggcctatcaccaaaggagcgggagcccgagttgcaatgatcgacaccggaatcgacttcaacaaccccgatatcggtcatgtcatcgcctcaaagagcttcgttgctggagtaagcgtgcaggataccgacggccatggcacccatacctcgggcaccgtagccgctcaggataataatatcggcgtggtgggagtcgctcccggcgccgacctgctgatcgcccaggttttcgacagctccggaaacgcttacgattcagatatagccgccgcaatcgactgggcggtatcgaacggggcgaatgtgatcagcatgagcctcggcggcccggattcggataccaccctccaacaagcctgcgctaatgcggtagccgcgggggtcacggtggtagcggcggcgggtaacgacaattcctccaccccatcatatcctgccagctatccctcggtcatttctgttaccgcaatcgacagcaacaagcagagagccagtttttccaattacggatccacttccagcctcgccgcgcctggggtagatgtcctttccaccgtaatcgtcggcaccggcacacagaccgcatccgcgatatggaacgggatcacccgcacagctgacccaatgaccggcagcgccaacggaaccgttaccgctcccgcgatttattgcggactcggcaacccgagcgatttccccagctcggtccgtggaaacatcgcacatatcaggcggggaacgctcacattcgcggataaagtcaagaacgcaatagccgcgggagctgcgggagtaattatctcgaataacacatccggcacgatcagcggcaccttgaacggaacaacttcggttgtggttgttgcggtttcgcagaccgacggcgacgatctacaggcccggagcggtatttcggctagcataacgaacgcatcggcggattacgacttaatgagcggcaccagcatggctacgccacatgtctcgggtgtcgcggctctactctactccgcgcgccatggcagcatatctcccaccgaagtcaggaacgccatgcaaaactccgcggaagacctgggaaccaccggctgggatcaatatttcggctatgggctcgtgaacgccgcggctgcgatccggcaggtcatccccacaataagcgcggtcagcatatcacccgcttacgccgaaccgggcgaccccatccacataacagccgtgctgagcaccaatacgggggtaagctcgatcaaagctaacgggtatacgttatcgagcacgggaggcacctggcaggcgaacatccccgcagaccccaaccacgggacgcataccgtagatgtcgctctgaccgactcctggggcaacgtaagtcacaataccaacgtctcatataagtccgcgtgggtggtgggcactaacggaagggatctgcatgatcgaatagccaccggcgcggtgggcacattcgacttcgtggtctacggccaggcttcacaggtcaccacaaacagctttgttctcagcgacggttcaggttatcccataacgataaccgccaccggccatacagtaaaaaacgggaacttcgtccgggtaaaaggcccactccagaccggcgcaagcagcccaacaatccagacgactgcggctaagataagtttgcttaagtagttgttaattgcagataggcgaagttgctccttcgaaaatggcgttttttgccattttcgtttctttcgtggtgaacacgacagtccttgaccggcagcggcccgcagggctgcgagaagcgctgcgtagcagccacgagagtgttcatgccacgattcctattccgccaagtattttcactacctcagcaaaaagagcttcattagggccagatatgcccgcggcgtccacattcaaagattatatttccggcatagatccggcgctcgaggttatcagcaagcagggtgcttagcatgcgcttgcttataatgtatgccccaggccgataagcctggggcatttgtttcataacccgggctggtaaagcgggtaacctgggttacaggttgggccgcatcctacggggtttcgggacacacacgttggggtacaggcaacaactacagtctgctcccatgctccaatggctgcaatttcattatctgcggatttggagactattccggcctggtagcgtacttcgggaatattcgatcgtgcgcgagcaatatcagccgcatctttggactgctggaggagctcgatcatggtcgcggcataggtcattgagaagttgcactggtccatgccgcacaaggaggctacaatgctcgggccctgtcctcccggaagcgcgggcaggcaaatgccggctttggcggcgtattgagccagtttattgttcaaatcgagctgctcatcgcggatctttctggaaagcgcttgaatatcctcgtcggagactctcgtcatacccgcgtaagccaacgtggctatggtattatgctgctggtacatcgcgcttatgtagttctggtcgaaatcacatccgctcaggcagtttagcccggcggcgggtcccgcgccgatattagcgggctgcggaacgggtgggcaagccggcatacacggcggaggccctcccccaactactccacatccctgcgccagagctaccccactcaacgcaaataccgctgcaaatatagcaaacacacatgctgtgcgcatctggtcaccgtcctgcaacggctgtagcaccttatttaggttttacccggaaatgggagtctaaagtctagagttgaaagtcgggagatggtgaggtcggcgctccgggtttcaggcccggagcgccggataacttttggagcaaacatttagccggggcatgccggggtttgagggtagacgcttacactgggctgccaggctcggaaggcggcaatctcattagcggagatccgatctaccattcttgcctgatagcggaggtcggggctggtggaccgggttgcgcccaggaacgcggcggcggaagactgccggagcaattccaccatggtcgcggcgtagattctatcgaatgaacactggtccaggccgcagagggcggcggtggcgcagctcactcgggtctggtcggcgaccagtggtccgcctccgaccttggaataccaggcgttcagcttgttattcatgtctacctgctcgttcgctatcttcatggaaagcgaccggattctgggatcggagaccctctgcgcgcccatcgaagccacagcggctgtaacggcgtgctgggtatacatcgaggtcacgtagcccctgtcgaagttggtcgagttcaagcaagtcaatccgcccgcgggacctgctcccacataggcgggcactgcctcctggcaggaagggcagcaagtggtcgcacaaggcggcgggcatgtgggctggcaggtgggagcgcatgccggttggcatgtgggctggcacgggaccggagcgcaggtgttgcaaggagagcactccgccatcgccgcagcgctcagcacaagcatagccgccagtagagtaagtgtatatgctgctctacgcatatatttaccgtcctgctatggctgcggcgctttacttttgttttacccgtagaagagggatgtcgaaagtggagatgaatccgctgtttatccgcagtgggataaatccgcgatttaaagatcatcaacccatcttatttcattatcatatctctcgaattgatataatacccgatcaaataggcattcttgcctcttatgcggaaagtaaatgtctccgtcccgctccccctctcaaacttgatgctctgcgccaaagtcgccgtggttcgagcattgaatgaccgatgttccaattaacagcctacgaatcagtaaccttccccagttttttatagacaacagacagcagattgacggtgtcggctctggatgcattactgaacatttccggatcagccgcggcaacgatggcgttcgtctgctgactattgaattgttgatgaaatattatacctgagccttagcagcatccgtacctgcggtcatattgccacacccgcagagcaaagctacgaatactaacgcaatacaggcaatctttttcattctcattcccccaagtcatacataatctcacaatctgatgagataatgcttaacatgaacatctataagcttgcgtgccaattcaaatctgatctgcggttgattaggcagggaaagagaggttgctttcgcttaatccgctgctcctgcttcggggtaaaaagcctcccgaagcatccgcttagcttgcgccgaagcatggaatatgacgttattgatttggggtggaggggttaccgaagaatagaacaatgataaaaattgtattgacaacacaaataacatggggtaatattctgagtggttgatagctaccccgtaaccgcaacctctttatagcataccggagaattgaaggttactataataaggctaacaaccgtaaggtatcccccgtcagtgcccgtcattgacgggggtatcctttttttagagaggttatcatgaaatattcgctggggcttgacatcggtattacctctgtaggctgggccgtgctgaatctcgataaaaagagagtcgaagctcttggggtgcgaggattcaacgcggcggaagacccaaaaacatgggcatcattagctttgcctcgaaggcttgcacgcagcgctcgccgacgattgcgccgacgggcgggtaggctgcgtagagctcgcgatctctttataaagtacgagctcattcaagcgcaggagattaaatctgcatttgagactgttctagggcaaccatcaccttgggaactcagagcggaaggcctggatagattgctgactgggcaggaatttgcacgggcgctttttcacatcataaaaagacgtggattcaaatcgaaccgcaaggcagcaaaaagttcggaagatggcaaaatgatcgcgggaattgaagccaaccgtgagagaatgcgagagaaaggcttccgaaccgcaggcgagatgtactggagcgatccattctttgatctccgcaagcgcaatacaacagattcatatataaatacagttgatcgtgggctgcttgaagaagaaataaaaacacttttcaagagacaaagagaattaggcagtgtgttcactaagcatgagttcgagaacgcgatattagaagtattctcctggcagaaaccttatgtttcaggcgatgacataataagaatggtcggaacttgcacatttgaaccgaatgaactgagagctccaagatattcctatcatgcggaaagattcttactccttcagaagataaacagcacgacatattccacaaatggcgacaaagagcgatttacccccgaacaacggaaagtgatcgaagggttggcgtataaaaatgtgagagtgacatatgcgcagatacgcaaggcacttgatctaccggaagaagcgcgatttgccgggcttacatacctacgtagaccggaaaaaaaggcagaacttgtagaatcgctggagtgcgagaatactgttttcttcgagcttaagggttatcattctatacagaatgcatgctcggtagatgggatgtgggaccgagtaaagcaaaaccctgaattaatggataaccttgcgacagcgctgacgttttacaagacggatgaggatatagaagagtggctaacggagcgtggagtagagaaggagataatcaacgcggtttccggatgtgagtttacaaaaaccgcaaacctctcgctagtggcaattaaaaagatccttcctcatctggaagaaggtttgcattacagtgaggcatgcgcgaaagcaggctataatcacaccggtttaagcggtgagaaaaagaaagataaattaccatcaataccggtggatatgatcaggaatccagtcgtgctgcgggcgctcagtcaagcccggaaagttgtaaacgcggtaataaatcgttacggctcaccatacgcaatacacatagaatttgcacgtgatatgggcaagagcgcagacaagcgaaaagaagaggagagaagacaaagagaaaacttaaaggaacgagaggaactcgaggaacagttcagagagacattcgatgggcgtgagccgaacggaaccgatatgctaaagtggagactttaccgggagcaaaggggctgttgcgcatattcattgcagcctatcgacctgaatagattgtgtgagcctggttatgtggaggtggaccacattcttccttacagccgcagcttcgataacagcagagcgaacaaggtgcttgtgctgatctcagaaaaccgaaacaagcttaatcggacaccttatgagtatttcgggcacaacgaaaaacgttggtctgaatatgagggatgggtgcgcacgacgataagagacccgagaaaacgtggaaacctgttaagagaaagtttcgaggaaagacaggaagtggagtggaaggatcgcaacttaaatgatacaaggtatgtggcgcgagagtttgcgggattcatccgggcaaatcttctatttgcagacccagataataaactgcctttggtatgtataaatggccaggttgtggcacaggcgaggtggttgtggggactgtataaagaccgtgatgagaacgacctgcaccacgcgcaggatgccgccgtgatagcggctcttttgccttatcagattaagatgataaccgaatactcaaaggttgtcgaaacgagacggaaccatatcgaccctgagacgggcgagataatagaatggaaagagaacgagcgccctcgactgcccgagccgtggaaaggcttccgcaaggaagtagtggagaaattaggtagtattctcgtatcgaggatgccacagcgcaaggtcagtggcgcaatccatgctgatacgataaggtcggcaaagcatatcagcacggatcgcgtaagtgttgtaaagaaaccgcttaattcgctctccgagaatgatttgaaaaatctgttcgacaccgagcataataaacttctatattcagctataaggcagagaatggctgagtttgacaataaggcgcaaaaagcttttgccgagccacttttcaagccactcagggacggcagcccgggcccaatggtacgcagtgtgaaggtatgccaggcgcagtatacaggcgtgaacgtacgcggtgggatagcagataacggcgatatggtgcgcacggatgtgtttagaaagcagaacaaaaagggaaaatgggaatactacctcatccctgtttatactgttgatatgataagtgggaaactgccggataaagctatcgcggcacacaagccttacaatgaatggcccgtgatagataatgaatacgaatttcttttcacactgtatccgtatgacttgatacgcgtagaaactaaggatgggggaggactttattactatagatcaagccacagagccaacggttcacttatcgtttgcaatgtcaacaaagcggacactacatttggcattggtagtcgaactgctatttcaatagaaaaattagaaatgggtgtattgggcgactactttcctgttcacaaggagataagacgtggcctggagaacggtagtcatctcgaacccgacaagattgagagttgagaatgatcagctcttaataactcagaacgagtcgttcagcttaccaattgaagatattgcagtattaatgctcgaatcaccggaagtactgttatcatcagcattgctggaccggttggcgcaacaccaggtaattttacttgcatgtaaccagcggcatcttccatctatggccggtataccgtttaccggacacagtaggttagccggcgtgcagcggatgcaactggagatgagtgagccattccgcaagcgctgctggcagttgataataaagcaaaaaatcgcaaaccaggctgcctgcttggcattatcaggcagatcaggggcggatgacattgctttaatgtcatcgaaggtgatgagcggagacgccactaacatagaatccgttgctgcgcgtgaacatttccacaggttatttggcgaagacttcgacagggcgggacagggagctgaagacggcattaatagcgcgctcaattacggatatgctatattgcgtgcgatgatagcccgcgcactgtcgcttcatggtttccttcccgctcatggtattcaccatcacagtgagctcaaccaattcaaccttgccgatgatttccttgaaccactgcgcccaatggtagatctgcaggtggacagaatgggtgttcgggatgagttgactaagaagcaccgtgaagagctggtagctttgattcatacggatgtaatgatagacggaaaacgccaggcagcgcttcatgcggcggaagtaatggccggatcatttttaactgcctgccacgagaaagactacaccctgctaaagctcccatgcctgttgccgataaaacctcacgcttatgagtagatttatgagacttcttgtattatatgatttacccgtactaagccgcccggataaaaaggcgtatgccaggttccataagttcctgcttcgcaacggctacgatatgatccaattctcggtgtatgctcgattgtgtaatggccaggacacggttaacaagcatgtggcgcgacttatggcgcatttgcccgcggaaggcagtgtaaggtgtatgcagatcacggaaaagcagtttacgaatatacaagtgttagtcggttcaaaaacgaagaaagaagaccctaaatacgcacagcaattgtcgtttttctaggtgaatgagagggcgaaatgcccaaaaccagctcgatttcgggcatttcaagcttacgtattatagcataccggagaattgagggaaactataacgcacagcgtcgtgtgaacaatatacctgatattatagcataccggagaattgagggaaactataacactggatacaccgacttgcggttattctccattatagcataccggagaattgagggaaactataacctgcttatccgggcactgatcgcccttgcaattatagcataccggagaattgagggaaactataacacgatggacattgggccatacgatctcggcattatagcataccggagaattgagggaaactataactatggcattttccgcaaagccatttgatttattatagcataccggagaattgagggaaactataaccttatccgcaatgttgcggaacttcggcaattatagcataccggagaattgagggaaactataacgtatcgccactcccagcccccgcattaaggattatagcataccggagaattgagggaaactataacgagagcccgaaacaggcgaaaacaagtccgattatagcataccggagaattgagggaaactataacagcctgatcctactcccgaggaaatagcgcattatagcataccggagaattgagggaaactataactcaggctcgatgatagaagcgatgtcctttattatagcataccggagaattgagggaaactataacatagtccgcagcgtataatccgtatacaaaattatagcataccggagaattgagggaaactataacttggagggtgtgagcttccccgcgagcctgattatagcataccggagaattgagggaaactataacctaatggccatagtgaagcatgtatggttcattatagcataccggagaattgagggaaactataacaagtgtgatctcatactgacgactgtattcattatagcataccggagaattgagggaaactataacaacaatccacgatgcctgtattgaagggctattatagcataccggagaattgagggaaactataaccctgaacacatagcgagcgtcagaaaggtcattatagcataccggagaattgagggaaactataacacgcagtggcggaagcgcgatccgcagtgaattatagcataccggagaattgagggaaactataacaaactgctggaccaggctgtgctgcaggacattatagcataccggagaattgagggaaactataactccagtctgacgattattctcctgtcgaggattatagcataccggagaattgaggggaactataacaagcaaatgaaagcagctgaggtctatgcaattatagcataccggagaattgaggggaactataactagtttcagccattcccaccaggtcccgagattatagcataccggagaattgaggggaactataactgtatgcggccgtagaagaatagccgccgcattatagcataccggagaattgaggggaactataaccgtgactgcacctgtgcacccgaaaaccaggtcgggagcaagaatcctcccgaccatcggaaactaccccaccttcgcccccatcctcttaaacgctttcgctagcacctcgatcatatcctcgacctcgcttataacgcgcggggatgaggggtttatggctagtttgtcgggttggaaccagtggcggcggtgggttttcatcagctcggtgcagagttcctgggagaggcgggtgcctactccgaattttacctggatctggtttctgaatgggctgatgctctctatgccaagttcgtgggcgcgcaggcgcagccttattatcgcgagcatgttccagaccgggcgcggggggtcaccgaagcggtcttcgagctcgtcctggacggcctggacttcctctttgttcttcaccgcggccatctttttgtagaagaggatgcggtgggcctcggtgggcatgtagccctgggggatgaatgcgtcgacggggagttcgacgggcgggagctctatctcctccacttcctcgcccttcatctcagcgacggccttgcttaggagctggcagtagaggtcgaagccgaccgccgccatctgcccgctctgctcggagccgaggaggttgcccgctcctctgatttctaggtcgcgcatggcgatgcggtagccgctgccgagatcggtaaattcgcggatggcgtcgagacgcttctcggcgacctcggtgagcatcttatccggcttgaatataaggtaagcgtaagcctgcctgtccgaccggcccacgcggccccggagctggtagagctgggcgaggccgagcttgtcggcatcgttaattacgatcgtgttcgcgttgggaatatcgaggccgctttcgacgatggtcgtgcagacgaggacgtcgaacttgtgctcgtagaagtccatcatcacgcgctccagttcaccctcggacatctgcccgtgggccgtatcgacccgcgcgtaggggacgagcttctgcacctcgtttgcgacatggccgatgttttcgacgcggttatgcacaaaaaagacctgcccgccgcggtcgagctcgcgcacaatcgcctggcggaccgtgtcggcctcggcctcgcgcacgaaggtcttgatcggcatgcgtccctcgggagggtcgttgatgatgctcatgtcgcggattccgcttagtgacatgtgcagcgtgcgcgggatcggggtcgcggtcatcgtgagcacgtcgaccgtctttttgagctgcttgagtttttccttgtggcgcacgccgaagcgctgctcctcgtcgaccaccactaatcccagatccttaaactcgatatcctttgaaagcaggcggtgggtgccgatcacaatatcgaccgtgccgaattttacaccctcgctcacttccttttgttcggattttgtgcgaaagcgcgagaggagctcgaccttgatcgggaacgcggcgaggcgctcggagaacgtgttaaaatgctgctgcgcgaggaccgtggtcgggcaaaggaccgcgacctggcgaccgtcgttgacgaccttgaacgccgcgcgtacggcgacctcggtcttgccgtagccgacatctccgcagatgaggcggtccatcggcttggggtcctcgagatcctttttgacgtcgtagatcgctccgagctgatccggggtctcgttatacgggaatgccgactccatctcctgctgccagcttgtgtctgggatgtagcgatggccaccgagagcctggcgccaggcatagagctc

SEQ ID NO: 1774 - DNA, 14464 bp, synthetic construct
  source 1..14464: mol_type = other DNA
  misc_feature 1..14464: note = Synthetic
gcggcgtcggcgctgggcgcaggaagagagcgtaaagaggacgcaatagaccctgccgtgggcgtggtcatacaaaaaaagatcggcgatacggtggcagtcggggatacgctggctgtcattcacggcaatgatccggacagagtcgcattagcagagaaaatagttagagactgctacaaattcggaagccctgccggctccccgcagcttatcctggagcggatgtagttcggcagataaaaaaactgaccctggccggtgtaaaccagggtcgcaagaaggaggtgaaagttgaagaagactaattaacttgttgttcactttatactacgcctattatcggcagcttgttcccgatttttaaatttttatttttacccgcaaaacttacctccggcagctatgcaattctcttttctgtgtccctcaaacactgcaatataaatcgtcggcaaagactaatgcaggcaaccgagccagacgataatagcactgtgaaacattcagccgtctgcctgcaggcgaccctaacacaagggatattgcaatgaaaaaactaccgattattttaatagccgttatcttaattgctgcgatcgtatttgtcggagcaaagtatctgatgccgaaagggccaaaggtcacccagccatttaccttcgacttcaaaaccgatatgaaaatcgcccaacagcctgcggatgcggactctatggcgattatgctctgcagcactccgttttacgcaggcgcgcctctgcctgaaggtcaaaagacctatgagttcgatgaggtgcgcgaaaagaaagtcgaggagatcatcgaaatctccaacaccctcgccgaagacacgctctcattgaaaaaagatgtcggcgatctgcgggaagctctgatgagctacctcgatatttgctacaaaaatgatcccgccgccaagactttcgctttggacgctactaaggaactgctgcgtatatggacgctggaaactttaaccgaaaccgagttcaacagcattaaaaccgactccgacaacgacttcacacgctcatcgatgcaatatgtcaaagtgacaaaggccgtgcagcttgcggctttgtatttgcaggatattgatacgatcggcatgtgcgccgcgatgggcgttgaccagttggctaactccaaaaacgccaaagttgcagaggccggcaaaaaactcgattccacgatgaagtcactgaattcgctgaaaaaacgcattcaaagtgttcatagcggaatggccaaagtcgactacggcttcaaacagcttgcgacggcggattattactacgcgcgcaccgcagtcgagtttatgcgggagtctatgcctgatctcaaaaaaacattgggcgaagccaaaccaaatgaatatcttgacgagcaaactcttgaatacacgcgagaatatctgacaaaattcgacaaattcagcacggatttccaggcatatctggattctgtgcctcaatccaggctgctgccggttgcgctgcttggcgatgacgccggatgcgcatgggctggcgacgccaagcctgcgagctataccaccgcatatcgcgcggcaaaagctcctgcgcagcctcccgcccaaaagtctgatgagggctggcttgcatggggatgggaagggatcaaaaaaaccgtccacggcgctcagagcgttgtcggcgtcggccttgatatagccggaacgaccgtaaaaaatatcagtcgggttggctcaggactctattatggaaacagcgcttcagaaatttggagcgatatgaagaaaaacgcagaggagatcaacactaactggaaaaataacctgtccggctcgtctacgttgaacgatgccaagggttacctcgaatatgtggatgaaagcgcggagtatattgccagttccggcatcgaaaaggtgatcggggaagggtggacaagctggggcgtcggcaaggttgcaaaagcggcttcgagcatattcaccgggctgggcaaggggatatatcttgtcggcaatcgagattcaaacgcttcggattatgccatcggagcaatcgagatagccagctctatgatcggcggcagcaagctgatcatcaagggcagtcaactgcccggattcttgaaagggctggcccagggcagttggctttccgccaaaagatcgttgaatgccgtatttgggatattcagcaaatatgatgcatctcaattaaaagcagccataaaacagggagtgaaatatggcgagaagatgtacaggcacgaatccgaactggcgataacgaaggcgatgttagctgcattgaagcagtcgaatgaaaccataaaagcagaactcaagaatctgattaaaacgggagccgcgtccggctgggctaacttcaagggaactatgcaggattcgctgcatgattttgctaaaaaacagttcgccaataacttgaagggccttgccgaggcactcggagcgaccggcaaggatgttatcgacaacataatgtcgcagtgggctggagactacatcaaggaaattgtcaacgaagtcatggcagaggcccctatggcggaggaaatagccggcaaatggagcgggacggttgtgtttagcacgattaatatcgaaggagactcggaagccgccaaaaaaggatgtgacatcgcaggggcaatcaaggcgcttaagggcaaggcgctgccatcgacattaagcctgaacaaaagcaattcgaacgcaggcgcggcaacattgaagataagcgtcaacaaagaatcagacccgttgccggcaaattacgtttactcaaatggcacgctaaacgtcaaagggcgggtggaacatgccaatgtgacaataaatgcaaagctcgttcgaacaacccagggctatagattgtccggcacaatctctcttacggctccggggatggcgatgagcggctcgatcaaaatgaccaagccgcgttaagctcaatacatcgattatatgcatccaatcttaattaaaacgatgatagcgggccgcgagatcgaggtagcgtcttacacgtttttcaccggtctggcggccttatccgtgatagctatcggggctgcgatcgcttctcgacgaggtctgtcggcgggcaggacggctgtctgtttgcttgcagggtcggtctttaccctggttgcagggagatttattcatcgcctgacccaccccggctcctttgacagccggcatactctgttcatcatgtccacagaaaatctgtcgatctatgccgggcttatagtcggagttcccgtcaccttgtttgcggctcgattattgagagtaaacggctggcaactggcggattcggttacccctgccctggctttggcggctgtctttgcgaagatcggatgctttatgaccggttgctgctacggcaagccgacttctgtgccctgggcaatcccgaccgctatcggcagcaatgcgcacggctatcagttgatatccggtgcgatcggattattcaaccgcccgctgcccattcatccggcgcagatatatgaggcggttgcggctctggcggcaggattggttgcggtttgggggctgcataatagactgccgaaaggctccgcgtttcttttgtttatggccatattctcaacgacgcggctcataaactggttttttaccgccccttcgacgaactttatcgccccgctatgggtgtttcccgcactatacgccgtcaccgccgcagtctgttcgctgctgattgccagacaacgtaaacccgcaacgcggtgatgatattggccgtgtttcggtagcaactcactctttgtgattgattgtagtgcctggtctctgtcccagccacataaactatgtcatttcgaacatagagagaaatctgcttttttcgatgtccgaggtcagatgtccgaagttcgagcccgtatcgccaccccattcccaacctctaacctccaacttctaacctctaaaccgtaatcgcgaaagcccgaaagaagcgaaacctagaaatgggaagggaacaagcagattcctcggcattcgcctcggaatgacaaatcacttgacgcatccaagtgtagtgcccggtctctatcccagctttgtccgagacggagatcggacactacgggcatgggttcgtgaactgtaacgtgtttcgcgtgttagacgcaatcggtgataacgctgtcgaccgcgacgctcttttcctcatacgcgcccatgtcgcggaattttgcgtagcgcatatccagcagttccgggatgctcaactgcgcgagttcgtccagatgtctggttaagacaaccttgagatttctggcggcaagctccatgttgcggtgcgctccgcctagaggctcctcgatgacctcatctatcaaccctagttcgcgtccgccttcgctggtgaccttcatcgcctcggctccatccttgccccgagcggcgtctttccacacaatggccgcaaaaccttccggagggatgaccgcatagatcgaatgctccagcataaggacgcgatcccccagcgcgattccgatagcccctccgctgcctccttcgccgatcacaacgaccacaatcggcgttttcaggccggtcatttccatcatgttacgtgcaattgctccgctgatgccccgctgttcggccccaacgttgacatccgccgccggggtatcgacaaagcagatcaccggcctatggaacttttcagcctgtttcatcaacctcagagccttgcgatagccctccggttttgcgctcccgaagttgcgatatccgcgctctttgatgtcacgtcccttttgctggccaacgaagaccacctgcctgtcgtcaagggtcgcaatgccgccgaccatcgcgggatcatcggcgaacaatctgtcgccgtgcagttcggtataatcgtcgaaaatggttcgcacatagtcgagggtatagggtcgcttgggatgacgcgccagcagtgtcttatcccacgcgctgagatttgagaatatatgctcgataaggcggtcgcgatcagattcgagtgtcgcgatgtcctgcgaacgatcctccccgctctccgccgtcagtctcttaatctccgctatctgctcatcaagctcgctaatgggtttttcgaaatcgagtatgttccagctaggcggcatcttcttcatcctcctcccgattgcggcagaactccagcagcttgatcagggtagatttgagttctttacgggcgacgattctgtctatgtggccgtgttcgagggcaaactccgccctgcgaaaattatcgggaacattgaccacctgcgcctgtttggccaccctgtcggctgtcaatccggtcagcagacccggttcggagatggtgaaatctcccagcgaaccataactcgccagcactcccgcaagcgagttatcggtcagaactacaatatacgggattcccgcttcgtgcagcttggcgcatgcggctgaggtctttgccatctgcataagccccggcaacccctcggttacgcgaatgccgcccgatgcgatgaacataataaccggcaggtcgtttttgatggcatattccatagcgcgaacgactctttcgccgacgacgccgcccatcgtgcccgcccagaagtgaaaatccagaactccaatgaccactgtcctgccatcgatctcacctatcccggtgactatggcctcgtccataccggttctttgccgccatttcgccagcttgtcgtcgtattcctcaaagccgaggatattgaccgtgacaaggttggcatccatttcttcaaacgcgccatcgtcaacaatgctggctattcgttctcttgctccgagtatgtagtgatatccgcatttgctgcaaacgcgcagattcttctgaagttccttattaaacaatatctcgccgcacttagggcatttagtccaaagaccatccggcagcgcatccacgctctgccttgcagtcttacgcgcggcttttgcttttcgaccaaaccagggcgctggcgtcatcttaacacctcaatgacattactgggccgccatctcgcctgcccatacatttgacaaaatacccagacgagaccgcaacatattatccaaatgccccggcaattatccgaggcaaccctattattataacagataccggacttatgcgccgattctgccaacccaccaaagcagaaccacaaacaacagcgatatgacaaaagcgatcgcaaagccgactatgttcaccgcacgagggtgattgatctcccacggatgcccttcgctttcccctgcgtataccatatccacgccctgctcttcaagctcgccttctttgccgaccggcgtagtgatcagcttgtagcaattgtcgagcttgtccttagacataggtctgccgagcaagctgcccagtatcaaggcgagaatacccgcaggcagaaacgccatcagtcgatagtgcagcaggctcttatcggcgtatatgcccggtaaaggaagcggcgaggagcgcataataatatctcccggcttgacgtcgatatgtgaatcggcgctttcgaccacaactcctccggcctcggatatattcattgcggacttatccgagccggtcgcttctctgacggatatcaacgggccgtgcccgcgcttggcgatcaacgcaactttgtttctgcgctctacgcctttatccgttttgtgcaccacatccaacaacaccctgcttacgggctgccgatccagcacagccctcagttcccccggattgctcaccgcttgatagtgttttaccgccatattctgactgaccaactgcccgggttcgccgacgacgaaccatataataaacataatcgcataggaagcccacgccccggtcgcgtttgcctttcgacccagctccccggcccacataaatacgccggtgaacgtgctcagggtccagaaccacatcaacgcttccgcaacgcccttttgtgtgagggcaaaaaccacacctaagaccacaatcacaaacccggcccatctggcgacccctaaaagctggaggtcattggctccagggcggaaatgtttcttatatatatttcgggacagcagcgcagacgcagccaccataaacgcgctcaaactggacatctgcgcgggcagaatcgcagcgaacatcagtccgataaatcccggaggcagaagggtgcgaatggcagtgccgaacgcggcctcacgctagatcgggccgacataattcttcgccaccatgccgatcataaccaccccggtgagcgcccatccgatcgaacacagccgttttacaaaattgccgtaagtaaacccgactcggccatcaaactccgttttgccggtagaacagacctccataatatgcggctgcgccacgattcctatcagcatggaaaacgagccggcgataatccaccagatattaagctccactttgccggtcaaagcgaacatcgcagggtctgtaaccgcttcgtgcaggccggaaaacccgccgagcttggagaggccgaacgggatcagcagcagcgacattaccacgatcagcagcccttgcacgctttcggtgacaacggttgcgaccagcccgcccgccgttccgtagatcaaaaatacaacggtcatccccaaaatcgaccacacaggggaaatcgctccgccgctcaccgcgctgactatgaagccggtccctatgagcagggttccgatgttgaccgcgaaaatcataacgccccacagcgcgtagagcgtgcccagcgacgagccgaaccgcgcctcgaagaagtccgcagtggtcagatatcgggatcggcgaaacaacggagcgatgagccagtagaatggggtgacaaataaataagcgaaggtataccatattccggccaggccgtttttgaagctggccccgactactaccacgggatcgtccgcatgcgttcccgtgcccagggcgtgcatcatcataaggaatttattaaattttcgcccgccggcaaaaaagtccccggtgtttttgatctttttggcctgatagacaccaagtatcaatatgccgagaaagtagacagccagcacagctatatccagcacattcaaagacatcggcaacctccccgcaaacaactcatccttatttgttgtttcttagctatcgcctgaaactttcctgcctgcgcgctcgcaatgcccgccgtacaaaaaaatgcaagccccttgcggaggcttgcagattatatatcacagaagccgacttgcgctcctttttatgacaattacatcagagcttcggttcttcggcgtaggtcagttcgattaccgttgcgatcgggtcgggacgtgatggcggcgatatgacaagggacgcacgcatctcagtgcccggcagctcggtatatgccacctgctcgttgatcccaagatacctcgccgactgaagtgacgatcgcaggtcgggaagcctgatctcatcttcgggccacttaaagacaaacaaatacagcttgttatctttcatagttgcgtgtccgtcgaacatcatgctgccgaacggagccggtcgggtgccataaatcgcctccccgttgacgctcatccacgcgccgatttccttgagtcgctgcacgctgggttctgggatttcaccgagagaattcgggccgacgttgagcagatagtttccaccctttgaggcgatgtagatgaggttgcgcaccagggtctgggtagatttccagtttttatcctcggacttgaagccccaggtgtcgttcatcgtcatgcaggtttcccagtccttgtcggattcaaccccgggtatttcctgctccggggttccgaagtctccgtcgtagaatccgagccggttgttcattatgattcccggctgaagtttaagcagcggcagcagcatatccgcgcgctgctgattcatctctttgggagtatcccaccacattatggatatggggccgtagttggtaagcagttccttgacctgcggcacggctatttcgcggagatacttgtccatatcccccttttgcgcctcatcccaaggctctccccatgttgcgccgccggggtggttccaatcctgagcctgagaatagtagaacccaagcttgatgccctctttggcgcatgcatcggcaagctctttgatgacatccctcttaaacggcgacgcatcgcagatattgaacttgctggccttggtgcagaacatcgcaaagccgtcgtggtgtttgctggtgaccacaatatatttcattcccgcctgttttgcgagcttcacccacgcggcggcatcgaacttcgtcgggttgaactgcgcgggcagttgctgatagtccgccatcggaatttttccgtgcagcataatccactccccgacgctcggcacatccttgccatcccatttgcccgccggaacagagtagacgccccagtggataaacaagccaaacttcgcatcccgccaccagttcatccttgcattgcgctgttctcttgtctcgacaaacggcgtgacagagcactgcgcggcagtggtccacaagatcataattgccattgtaatcagaccgatctctgatgccttcatagtaacagcctcctgcccggcataacaccggcattattaccctttccactcttatacttttggcatgatacaagattattcctccggctcgattatgctttgcccatacttatgctgtttcaaccccggcatgtccacattttgtctttacacaaagccattcttgtgatacattaagtatggctgacgcatctacttgttactccttagtgatagcataccgggaatctgagggtttctgtaacaaagcgaaaagcccaggttatgcccccgtcagtacgtagtgccgacgggggttcctttttaggggtgcggaaatgaaatactcacttggtattgatatcgggatttcttctgtcgggtgggctgttcttaacctcgacgaaaagcgtgtcgaagatttgggcgtgcgggcgttccacgaggctgaaaacccaaagactaaggcgccactagctgaaccgcgcagaatagcccgggggcttcgtcgccgtttgcgaagaaaacgcggcaggctgcgaacagccagggaattgttcattgaatacggactcattgcacacaactctgatgacacagtttttggggacacacacggcaaactcacaccctggcagattcgcgcagaaggactggatcgcttgttgaccggagaagaattcgcgcgagcgcttctgcacataatcaaacgtcgcggcttcaaatcaaatcgtaaaagcacaagagataccgaagaaggcaagatgctggccggtatcacacgcaacaaaaaccttatgaccgacaaaggttatcgcacagccggtgagatgtatcatttagatgaggcgttcgattccgtcaagcgaaaccgcatggggtcatacctcaacaccatagatcgcgacactctcaaagaagagatcaatgttctgttcgaagcccaacgcaaacaccaaagcagcttcgctagcgatgactttcaagccaagatcatcgaaacattccaatggcagaaaccctttgccagcggcgacgatatcctcaaaaacgttggactgtgcacacttcttggcgacgaaggcgaactgcgcgcgccaaaaaactcctattatattgagcggtttaaccttctcagtaagatcaacaatacttcctatgttataaacggcgatcgcattcgtttcgacgaaacccaacgcaagcaaatcgctgaagaggcttacaataaagcaaaattgacatatggacagataaggaagctattgggattgccagacgaagctcgttttacaggactcgaatacatgcagcgtccaaagaaaggacagccacgcgagcattctatgaaatgtgaagatgctgccatatcgaagatggatggctacaatgccgttcgcaaggcattccaaaaagcgggtgtgtgggacgacatcaaaaacgactcagatattattgacaagatcacatttgcgctcactttctacaagaccgacgaagacattgccaactacctccgggaacaaggattggttgagtcggtagtcaatgcggctcttggctgcgatacttttgccggggtgggacatatttccacaaaggctgccaagctgttgatcccgcatctggagcaaggatatctatacagcgaggcttgcacgctggcgggtttcgaccattccaacccgcaggactgtacactacagcggaaactgcccctcatcacacgcgaactggtcaacaacccggttgtcctgcgttccttatgccaggccagacgagtcattaacgcagtcattggccgttatggatcgccttatgctattcacatagagtttgcccgtgatgtcggcaaaagtcgggaacagcgagacgaaatcaggagccgacaggatgaaaacgccaaagatcgcgaacgctgtgcggaagaattcagagaagcttacggcacgattccaaacagcacagaccttcttaaatggcggctctacagagaacaagacggcaaatgcgcctactcgcagaggcaattcgacatcgaacgcctgtgtgaaccgggatacgtcgagatagaccatatactgccatatagccgcagctttagtgacgctcaatccaacaaagtccttgtttttacttctgaaaacagaaataaaagcaaccggactccgcacgaggcattcggcagtgacacgatgcgctgggatcgattctgtggttgggtcaaagccacaataaagaatccgcacaaacgagcaaacctgctgcggactcggtatgacgccagcgatgaaaaagaacagaaagatcgcaacctcaacgacacccgctacgcagctcgcgagttggccggtttcattcgcgccaatctgcagtttgccgacccggaatacaaacgcaatgtgttttgcataagcggcttcatcactgcccaggctcgctggcactggggacttcataaagatcgcgaggaaaacgatttacaccatgctcttgatgccgcagccatcgctgctctgttgccatatcaggtgaagatgataacagagtgggcaaaagtcggcgaaaccggcgagacatatattgaccgtgagacaggggaggttattgaagtaagtaaacgcagactcccccgcccgtggcccaatttcgccaaagaggttacagccaggttggcagaggaccctgtacaggcgattgagcaactcgcgctgccgagttatagcaacaacccgccaaccatccgcccggtggtcgtatcgcggatgattcgtcgcaagaaaaccggccagatacacgaagagaccattcgctctgtcaagcgtatggaatcacacggacagacaactgttcgcaagccgcttactgagctaaccgctgatagtatcaaaaaactgatctgcgaagaagcggacccgccactctacaaagccatagtcgagaggatgcagcagtttaacaacaaaggcaaagatgcatttgccgaacccctgcgcaagccgacaaaagacggcagcgaaggccccatcgtgcgcagcgtcaagatgtggcagacgcagaacacaggcatagagcttcgcggcggcattgccgataatggggatatggtgcgcaccgatgtcttttgcaagaacgggaagtactatctggttccggtctatgtgtcggacattctaagaaagcgtttgcctaaccgggcgattgtcagcggcaaaccagaatccgaatggccggagatggacgaagactatgagttcctgttcactctgcacccgtatgacctgttatggatggaagcagacaaacgagaaggcaggctgtattactatagagggagccacaggggaacgggtcaactgaaactctcgctgccaaacggtgaacaagtcggcaatgacgacgaagtgcgcataggtgcaaggaatgcaaaactgatcaagaagtatataatcgacgttcttggggagatttctcctgcccctgcggagaatagaattggcttggaagacgatagtggtatcgaatccggcgaggttgaggcttgagcacgaccagatcgtaatagcccaacaggacgaagtgtcgttccctatagaggacatatcgacactgcttatcgagtctcgtgacgtattgataacatcgtctcttctcagcaggctggctgaatatggtgtcagtttgatagtctgcgaccgcagtcacatgccctgtatggccggcctgcctctggcgggccacagccgccttgccggagtgcagaggatgcagctcgacacgacaattccctttcgcaagcgttgctggcagacggttgtggtcagaaaaatccgcaatcaagctcaatgcctcaatattttgggtcgcgctaaagcggatatgctggagtctctggcggatgatgtcggcagcggggacccggataatctggaatcggtggcggcgcgagtctacttcgatgctctgtttggctcatcgtttagccgctccagcgaatgcgtgaccaacagcgcgctgaactatggatacgcgattatgcgtggagctgttgccagaggattggcgggtcacggcttcctgcctgcgcatggaatacatcatcacagcgaattgaaccagtttaacctggcagacgacttcatggagccgtttcgaccccttgtggacctttgtgtcgctgaaatgcgaccatccggaaccctcagcaagcagcatcgcgagaagctggtttcgctgcttcacgcccaggtattgatcgatgggaatcgtcattcagtcaaccgagccgccgaattgatcgctggttcgtttgttgccgcctgccgcaacaaagatccgggcttgctcacagcgccggagctgctaccgattacaatgcacagctatgagtagatttatgagactgatggttttctatgacctgcccgtggtcacaaaggaaaacagacggacttatgccaggtttcataagtttttgctgcgtgacggatatgacatgatccaatattcgatctatgccagaatatgtaacggccaggatgccgtcaacaaacatgccgctcgtctcagcgcccacttgccgccagaaggatgcgtgcggtgtatgcaggtcacggagaaacaatttacgcacatgcaggtgcttgtcggcccaaaaaccatgaaagaagaccctaaaatagccggtcagctcgcatttttttgacaaaagagggagggcagactccgcaattcgtatataaatcttggagtctgccctcttacgtattatagcataccgggaatctgaggggaactataac

SEQ ID NO: 1775 - DNA, 8890 bp, synthetic construct
  misc_feature 1..8890: note = Synthetic
  source 1..8890: mol_type = other DNA
cctacggagtccttgcgggcaaacacgcctttggctcctcggcccatcgctcgctccagcatctcgaacgcgtgaacgccgtaccatacgatcgaactcccggccggggccttgccgagcggcccataggtcgagacatacttaggctcgcctatcttctcgatggcctcgatcagcgcgggcacgaagcggagcgaggacgatgaaaacacccgcagtcccgcgtctttcgccatctgcatgatcttcctcgcgttggcggtgttgtcggccatcggcttatcgaggaatatcggcttcccgagttccgtgcatttcgtgaagtactcgacgtggtaggcagggtcgttgatctcaagcattatcgcgtcgcagtcggcaaccgcctccgcgaaattctcggtgactttgactccccaggcctctagctgcttctgacgctcgtcaagcccctccttgctctggaagggcgtctcgaacctcatgcaagtcaccacgcgggcgccttcgacgtgctgctctggcgggacgtccggcgcctgcaggcacttggtgaacgctactgaatggctggtatccagccctaccataccgatcctgatctctttaggcattgtcccctccggactacggtttcgaggtaaggttaggccgaacgccacagtttgtcaagcaggctcgacgtcgcgagcagccgaatgtggaacatactcaatggcggaacgaaaccacgaagcccgcgaggcgtgtcctgagagggagtctcgtgtcttcttccgcgatgccgtggttccgtgttcgatcttggcgcgtcggcgctgcttgctgccttgactgccacctgaacttgggatacactgcagatatgaaatagcgggcaggctattgatctggattgggggatgaagttggataagacctttcgcgcgtaccgtgcctgcactctcttgctgattctggcgttcactgccgctctgctgattgccactcctgctctagccgaggaataccgtgcctggtgggtagccagttggggctcgcccggcatgatgaaccaaaccgatgtcaacaaccttctgggcgtcgtaggagacccaaacagcctggggcatattcgagaagccaactgcaatgccgtattcgtcgaggtgcgcagaagctccgacgtgtgctatccttccggcctgggcgaaccttatttctcgggccttaccccttccaagttcaacgcgctgcaggccattatcaacgccgcgcacgacaccaccgggggcaagaagaggatcgaggtccatgcgtggatggtcgtcttccgcacgaacgggaactcagtctattccgcgcacgatgaccctccgaccggcagcctcacgaacctcgacaactactggcctactcgcacggacgccggcgcagagcccagcggccaggcgttcgaccccggccatccgcttgtcgaggactacctaaccaaggtcttcctggacatcgtcaacaacttcgacatcgatggaatccactacgactacatccgcttcacaggacgcaatcagggctacaacccgaccagcgtcgcgcgctacaacgccagacacgggctgagcggcgacccggcatggaatgatgcgcaatggaagcagtggcggcgagaccagatcaccaacctggtcaggcgcatctaccacaaagtccagatcgtcaagccatccatcaaagtatccggcgctttcgtctgcgggcatcccgaaccacccagcgcaacccgcagcgcattcaccggctacacgcaagcctacaacgaccactaccaggactgggacagctggctgcaggagggcatcgtcgacatggcctgcccgatgacctatttcgactacgccgggtcccatcagcaggactggttcggatggctgacattccagaaggacaggcacggcaaccggcatatgatcaccggccccgggctgtatatgaactccttgtccaacgccatccttgagctgcagcaggtccgcacgccctccagcaacggcaataaggtgcagggcttctcaggctatgactacaagacaccctacagcggcgggtcgtggagcagttgggcccccacattcaagagccagatcacgcccacgtgggatgacatccccgcaatgccctggaaggtctcacccacgaaggctcacatccacggcaccgtgtacaacggatcgaaatgggtagacggggcccacataacgctcatcgggcccgacatgagaacgcaggacgccgacggcaccgggttcttcggcttcacggacgtgtcgcccggcacctataccgtcacctgcaacgcaaccgcgcagggtctgggaacacaaaacaagaccatcaccgttagcgccggagaggtagccgtcgtcaacttcacctggggaactaccaccggcatgtccggctacgtcagaaacagcgcgggagtcccggttcccggagcgaggataatcggcgccaacggggcctacctgagcacgtccggcgctgacggcttctataccctgcccggcatgaccgcgggaacctacagcttcaagtgcaccaaggccaattacacgacccagactaagaacgccacggtcacagccggatcgaccgccacggtcaacttcaccatcaactccaccatcagcggcggcacgatctccggctacgtccgggacagccagaaccacggcataccgggagcaaccgtagccaccggatcgggcggctactcgacgaccacgggcgccgacggcagctacagcctctatcccgtcgccgccggaacctacagcgtcacggcctcgatcgcgggccatacaaaccatacagtaaccggcgtcacagtaaccgatggcggcacggccgtccgcgacttcaccatcaatcccgatgccaccgtcatcacgtcggtgatggcaacgaacatcacgtccgactcggctaccatcatctggacgaccaacgttccggcgacaggccgggtggaatacggcccaacccacgcgatgggcacgctcacgccgcttgattccaccctcgtgaagtcgcattccgtgaccctgaccggcctcacacccaaccatatctatcactacagggtcaccagcgccaactcgctgggagtgagcgcaaccagcgccgacagcctcttcttcacctcggccccgagcggaactggcgcgacggtcatagtggataaccaggaccccggttggtccgtgaccgccgggacatggctgacgggcagcggggcgggcatgtatggcaccgactaccggttcgccgataccctcggcgagttcgcctcctgcaagtggacgcctgacctgccccacgcgggcacctacgacgtctacatctggtacaggcagggcactaaccgggctaatgacgccccgttcacgatcaactaccagggcggcagcatagtcgtgcctgttaaccagcagataaacggcggcggttggttccagatcggcacatccctgccgtttgccgccggaacgactggaaacgtgtcgcttacggacaccgcccaggcttccaaggtcgtaatggcggacgcggtgaagtgggtatcgatatcgccttcagataccactccgccgacggtaccgaccggcctctcggccacggcaacctccacgacgcagatccaggtcacctggagcgcgtcaacggacgccagcggcatcggcggttacaggatatatcgcaacggagtgctgatcgacgcagtcgattccggcacaagctacaccgagtccggtctcgcgccgaacacgagctacacctacaccgtcgccgcgttcgatatctggggcaacctgtcggcccagagcagcccgataaccaaatcgaccctctgcctgcccataagcgtgacctgcaacaagcctgtcagggtctggcagaccgccgacaacacgttcacgttcacaaacacggtcgggttcggcgggcagacgatccaccacatccgctacgtttgggaccgccagccgacccacacctggacgaacaccgaaacaagctggtcgagcggaacgcaggtctgtacggcaagcccgggcggcagcaactggtatttccacgcgagggcttacaacgcggataacgtcccgaacggccaggtcgatctcggcccgttcttctgcgacactacgccgccgatctcgccattgcctaccgtgacgccgtatgtcacctccacgagccaactctccgctacctggactgcgacgtcagactccgagagcggaattgtcgagtatcaatacgccatcggcacgacgcccggcgcaactaacgtgaaaggctgggccacggtcgggataaacacttcggtcacggcgaccggactgtctcttgccctcgatcagcgttactacttcacgctcaaggcgaaaaacggggccggggtgtggggtgagcctcgcagttcggaatccacgacgcccgcgagggtgcttggtagcatcgcggaggccagacaactcgacaacaaccgcgcggtgatcctcactaagagacatgtgggctacggagcgtcggatggcgcgttcatccaggacccgaacagggctgccgcgctctatcttccgggcgtaagctacttgagcacgaataacttcaccgatgtcggaggcttcctgggcaccagcgggctccatcgggtgttgaacgaggcgcatccggacaatatgggcggaccggtgaacatcgatccgctgatgatgcggctctccgacctcggaggcgcgcagttgaatgaatggactccgggaatgccgggagcggtcggcctgaacaacctcgggctcctcgtgaaggtattcgggaccgtcaccgcgagcactccgacctacttcatgctctccgacggcacgcgagaggtgcaggtcagatccaacgccaaccccggcagcgggcacgtgttcgtgacgggcatatcgagctggacaacccacaacggccagacgatcccgctgatcatcacccgcttcccagccgatgtcaagggaccgttctgagttgatcgggcgggactaatgtcgctcgggcgggatgcaaatcccgcccgaaacgccatgcatcgcagcctattcgcggccttgacatcttttaacaagccgatgtatactgtgcctggctgacgcatccacttgttacaggctcatttatagcataccggagaactgagggtttctgtaacaaagcgtaaagctgtaagcgctgcccccgtcagtacggcgtactggcgggggtatgcattttagggggtttgcgatgaagtacacccttgggcttgacatcggaatcgcctccgtcgggtgggccgtactcaactacgatcagaaacgcatcgaggatcttggggtcagggcgttcgccgctgcggagagccccaggaaaatggcccccttggctgagccacgtcgtctggcgcgcggtgcacgccgccggttgcgtcgcaaagccgagcgcctccgccgcgccagatcgctgttcgtaatgcatcagcttgtggacgaacaggccatcgagactgtactggcggacaccaacggcaatccttcaccctggcagctcagggccgaagggctggatcggctgctcacgggtgaagagctcgctcgggccctgtatcatatcatcaagcatcgcggcttcaagtccaaccgaaaggacggcaaggacaaggaagcgggcaagatgctggagggcattgcagccaacagggcaaccctgcgcgatgggggctaccgtaccgccggagagatgtactggcgcgacgagcgtttcaagctcagaaagcgcaactcgcatgagtcgtatatcaacacaatcgaccgcgacactctggaagccgagatcggcatccttctggaagcgcaacgcgctctgggcagcaagcacgcgagcatggagctacaggaggccgtaacagacatcttcaaatggcagaagccgttcgcctccggtgatgcaatcctcaagctggtcggcccgtgcacattcctggggcacgagggtgaaatccgcgcccctaagtgcggctaccacgcggagaggttccgcctgctccaggacatcaacaagctatcctacagcgtaaacggcagccggccccgccttacacccgagcaagcgaagctggtcgaaaacgccgcctactcctataagaaagtcacctacaaacaactgcgaaagctcctgggtctgccggaggaggcgcgtttcacgggcctggaatacatgcgccgtcccgccaaaggggagccgccggagttctccttgaagtgcgaggatgccaccgcgtttcaggtgaggggatatcatgccctccaggacgtctgcacaaaggccggagtgtgggatcaggtgaagtccgatacgaacctgatggatgagatggccttcgcgctcacgttctacaagaccaatgatgacataagcgcccatctcagcaggtgtggcgctccgcaggctgtgatcgacgccgctttgacatgcgaatcattctcgggcgtgcttcacatatccaccgccgccgcgaagcgtatcatcccacacctggaagaaggactcgtctacagcgatgcctgcgcgaaagcaggcttcaaccactccacaccgcttgagcacgagcgctcactcaagctgcccctcatcacgcgggatatggtgtccaatccagtcgtgcaccgggctctctgccaggcgcggcgagtaatcaacgccgtggtccgccgctacggcccaccctatagcatccacgtggagctggcgcgggacgtaggccatagcgcggagaagcgcaaggagataaggaagcagcaggacgaaaaccgccgcgagcgtgaacgccaggaggcgcatttcaaggaagcgttccccggcacccaaccaaagagttccgatctactcaagtggcggctctacaaggagcagaacgggcaatgcgcttactctcagcgcgccatcgacctgtcccgccttatggagccaggctacgtggaaatcgaccacatcctgccgtacagccgcagcttcgatgacagccgctcgaacaaagtcctcgtgctggccgcggagaaccagaacaagcgtaacgcgaccccatacgaggcgttcgggcaccagaaggcaagatgggacgcattcgaggcctgggtcaaggccaacatacacgatcatcgcaagcgcgaaaacctgctgcgccaggagtacaacgcggagacggaagaggcctggaaggatcgccacctcaacgatacgcgctacgcttcccgattcctcgccgcattcctccgcgatcacttgctcttcgccgaccccgagaacaagcagcccgttgtctgcctgagcggcggcgtcacggccaacgctcgctggctgtggggtctgaccaagtgccgggaggagaacgaccttcaccacgcaatggacgcagccgtggtggcggctcttctgcctcatcaggtgcgactgatcacggaatacgccaaagtcacggaaaccggcaagagctacatcgaccttgagactggcgaggtaatcgaggcggaacagccccgcctgccccagccctggcctaacttcggcgaggagatcgtcgcgcgcctctccgacgatccgcaacaggcggttagcgggttgtcccttggcagctatgatggcctcgaattgcgtcccatcatcgtatcacgcatggtgaggcgtcgccacatgggccagattcataaggaaaagattcgctcggccagaagactgcagaccgagggcgtcagcactctccgcgagccgctcacgagcctggacaggaacagcatcacgtgtctcgtgtgcgaggaggccgacccgccgctctacgcggcgatatgcgccagaatggcagaattcgacaacgacggcaaaaaggccttcgaaacaccgctgcgcaaaccggcaaaggacggcaaggaaggccctgtggtacgtagcgtcaaggtgtggcagaggcagaacacgggtataaacgtgcgcggcggtatagcagataacggcgacatggtccgcactgatgtattccgcaaggacggcaagtactaccttgtcccggtgtacgtatcgcatgttctctccggtgtcttgccgaacagagcgatagctgccggaaaggctgaggatctgtggccggggatggacgagcattacgagttcctgttctgcctgcacccgtatgacctgatacggctcgaaagcggcaacttcgccggcttgtgcaactaccgggggacccatcgcggcgatggcagactcaaggtctcattgcccaatggtggcacatcacaggccgatgacataatagccgtaggaagccgaaatgcaacgctgattgagaagtacgagatcgatgtcttgggcgactaccgacttgctcctaaggagaagcgcagtggcctggaagacaatcgtgatctcgaagccggcgaggctgagtgttgaaaacgaccagatcgttatagctcaggagggccgcgtaggcttccccatcgaagacgtgtccgtgctgctcatagagtcgcacgaggtgctcttgacgtcttttctgctcaaccggctggccgaacacggagttgcgctcatagtctgcgaccgtaagcatctgccctgcatggctggcctgcctttcgcgggccacagcagactggccgccgtccagcgactacagcttgacgcgagcctcccattccgcaaacgctgctggcaggccatagtaaagcgaaagattgaaaaccagtcggcctgcctgagcatactcggcaggcccaaggctgacttgatctgctcgtttgccgcgcgcgtatccagtggtgat

SEQ ID NO: 1776 - DNA, 14700 bp, synthetic construct
  source 1..14700: mol_type = other DNA
  misc_feature 1..14700: note = Synthetic
tgacatcggtcgcacacgcgagccggcacgcaacgtgcgttgccgtaatggcgtacttctcgctcccgtgtgcgcggccggcccacaggcaaccgccaagcgcggctgccgtccgcggattatagtgtccgcggatccactcacggcgccgccctgggtcgcgcgccgttatcgcctaccgcctatgaattctcctaccaccgaaccaccgcttcctcgcatcggcatggtatccacacatggatacgtcgccgccaatccgcctctgggcgccgccgacaccggaggacaggtcgtttacgttatcgagctctccaagaagctcgcgcaactcggcttcgaggtcgacatctggacgcgccagttcgaaggccaaccgcagatcgacgtcatcaacgaacgcgtgcgcgtcattcgcgtgccttgcggcggaaaaaaattcattcccaaggaatacctcgtcgaacatctcgccgaatgggccgaaaacgccctgcgctacatcaaagcccacaacctctcgtaccggtttttcaacagccattactgggatgccggctacgcgacccagcgtctcgccgacgcgctcgacgtgccgcacattcacacgccgcattcgctcggcttgtggaaaaaacaactgatggaaaccgacttcccggaagacgcggccaacttcgaaaagaagtacaacttcagcgaacgcatccgacaggaaacgcttctgtatcgcgcgtgcgacgccgtcatcgccaccaccccgcctcagctcgacatgatcaccaatgactacggcacggtcaccgagcacgtgcacatgatcccgccaggttatgacgacacacgtttttatcctgtcagcaacgcctcgcgcgaaagcattcgtcagcgcctcggcttcaccggtcacgtcgtcctcgcgatcggtcgtctcgcgcgcaacaaaggctacgacctgctcgtcgatgcgttttcgctcgtcgccaaacgcattcccgacgccatgcttcatctcgccgtcggcggagaaaaattgaatccgcacgaacaagagattctcaacgaactcaccgcacaggtcgattcgctcggcctgaaagagcgcgtgcgtttcggcggtttcgtcgacgaagccgatcttccggattattaccgggcggccgatgtgtttgtcctctcgagtcgctacgagccattcggcatgaccgcaatcgaagcgatggcttgcggcgcgcctacggtcgtcacgattcacggcggacttttccgcgcgatttccttcggacgtcacgcgctctacggcgatccttttgaccgcgaagatctcggcatcatgattgtgaagcccctcaaacatccgcgacttgccgcgcgtctttcccgcatgggcgcgcacaaggctcgcagtctcttcacatggaccggcatcgcccaacagctcatcagcctcgtcgaagaacgcgtctccgcggcgtcgttcgcggacaacgaatgggacgagccttggaacgacggcgattgaacgccatctcttcttctttctcacgcgttcgttgttttcttcacagcttctcatgagcgactccccctccaccacggtccgcccgatcaaactcttcagctccgatctcgacggcaccttgctcggcaatcctgaagcggccaaccgcttcaaagccgcgtgggcgcaactcgcgcccgactcgcggccgctgctcgtcttcaacagcggccgtctcatcgacgatgtgcagcacttgatcgagcagggcgagttgccggagccggactacatcatcggtggcgtgggcacgcagatcttcaatgtgcgctcgagacgcatgctcgatgagttcgcgtcggagttggcgcagggctgggatctcgagcgcgtgcgatcgaccatcgccagcgttccgggcatccgcccgcaaccggccgaatttcaacacgcgttcaagtcgagctggttcttggaaaacgcctccgcttccgcgttgcgcgagatcgaagaaaaactccaggcggacggactggacgtctgcgtcgtttattccagcgcccgcgatctcgatgtgatcccgcgtcgtgccaataaaggcggcgcgctgtcctggctcgccgcgcgcctgcacatttcaaccgaagaactgctcgtcgcgggcgacaccggcaacgacatcggcatgttcctgctgccgggcgtgcgcgggatcatcgttcaaaacgcgcagccggagctcttcaccgcgacggttcaactgcccatctacacgtcgagcctcgtgctcgccgatggtgtgctcgaggggctgcgtcactacggcatcatttcccgcccgccgtccgccgatgaaaccggcattccgcccgagcgcatgtccgcgggttttcgtcttctgttcgccggcacccaactcggcgcgctttccgacgaggataaacaactcctcgacaccgcctacgaaaaagccctcgtcgcgctccgcaaaaacatcacgccgctcggtttctccgcgtgttcgctgaccgacaacaccgtcaccggcaccgacgccaactaccgctcggtctgggcacgcgacggctcaatgaccgtcatctacacgctcgacctcgatgacccggagattcgcgccacgcagaaagcgacgctcgaaacacttctccgcgccgcatcaccgtcgggacaaatccccgccaacgtccgcatcgacaccgccgagcccgactacggcggcgtgggcaacatctgctccatcgacagcggcttgtgggtgatcatcgccgtctacaactacgtcaacaaaaccggcgatctcgacttcctgcggacttatgccgagcggctccaagtcgcgatgaactggctcagcgcgcacgacagcaacaacgacggcctcctcgaagtgcccgaagccggcgactggaccgatcttttcggtcgcagctacaacgtgctctacgacgaagttctttggtaccgcaccaacgtttgcttcggccgtttgctcgagatgctcgggcagttcgatcgcgccgccgattatctgcgctggtcgcagaaaattcgtagtcgagttttggatacattctggccgaccacgcgtccgtccgacccgcagtcgccgcccgcgaatcgtttcgccgatcgtcagttcggcctcggcgacacgcagtacttgttggcggaaatcacgccgttttcgttcaactggcggtgcgacgtttacggcaacatcctcgcattcctcatgtacgtgctcgacgtggaccgcgcgcgcatcgcgtttcgctacttgtggggagtcggcgtcaacacgccctggcccgtcgccaatctttatcccgtcgtccaggccggcgatcccgactggcgctcctactacacggtcaatctgctcaacctgccgaatcattaccacaacggcggcatctggccgttcattggcggcatgtgggtgcgcttcatccaccagctcggtttccacgaagtcgccgtgcgcgaactcgtgcagctcgcgcgcctcaacaaactcggacgcgatcaagagtgggaattcaacgaatgggcgcacggcatcaccggccggcccatgggcaaggcgtttcaagcgtggtccgcggcgtcgttcatcaaggcgtgccacgaactcgaaaccgcgcccggcccgcgtcatctcgattgagtgccgcgcacgattcgcgctcagttcgtcgcggcagtcgccggctggaagatttttttcagatacgcgacgttggcggtgaagttccacttcacgtccgtcggacggctcgcgtcgcgcgagcgttcgacgacgagccagccgcgccagcccatctcgtcgagcgtcgctttcaccgcgtgcaaatcgagtcgcgtgttgtgctcaagccacacgccatcgtcgtccgtgcagtggatctgacaaatcctgtcgcgaccgagcgtgcgcagctccgcgagcagatcgcggccgtttttcagcgcgtttgagaaattgaaataactcttcaccgcgggcgagccgacttcatcgagcaaggcggcttcctgcgcggcatcgagcgcggtctcgatgccgatcaccactcccgccgcttccgcgcgcgcgccgacgactttcaatcgctccaccaccgcgggacgcagctcgggatttttcacgagatccaccctcacgcccaacggcagaaaaaccgtcttcacgcccagcgccaccgccgtgtcgagacagtcctgcaccatgcgctcatacgtcggacgctccgcaaacgactgcgcataaaaccccgtcattcccaacgaacaaaattcgagtcccaactcgcgcgccttcgccagatactccgcgcgcaccgccggatccgccagacgattgtcgaacgtctcgcgattcccgagcccgcccatgtccacttcgagcccctccacgccgagctctttcgcgagcggcaacgcgctgattttttgccgcttcaaaatcatcagatcgatcaccgcgatgcggtacggcgactcttccgcagcgctcgcttcgacacgcactttcgcgcccgacatcagcatcagcgccgccaccaccgcgatcatgcgcccaaccacagtcgcacgcaggcaatggctcacaacaccggctctcgttccatccaaactctcggcacgtgtagtcatgccaccactacgccgctcacaccatccacaggcaaaatctttcggcgccgtcttctttccattactaacgcggtgagatttcgttgcgacgatgaggctgttcagtgttttgtcgccgcatgcgtttaccccgtttgctcgttctgtgcgccggtctcacttcgctcgcgagcacgctgccggcggctgattacgaacctattccgctcgatggtttctccgacgtgatccaccactggcgaaaccagaacgacatgtacggccgagagtatccgcgctacgcgcccgggcagatcgtcgagatcgccgacaacctcgtgctgcgtcagcgcgccaacggcggctggcccaccaaccaagatcccgcgcgcatcattccgcccgaggagcgccgcgagctccgcctcacacacaacgccaccgacaccagtttcgacaatcgcaacacgtatccacaaatcgaatacctcgccgccgcttacgtgcaggccggccaggagcgtcatcgcgacgcgtgcctgcgcggcatcgattttgtcctcgattcgcagtatcccaacggcggctgggcgcattcgcctccgcgcaccgattcttactacggccacatcacgttcgccgacgatgtcatgcccggcgtgctcagactgcttcgcaaaatcgccgcggggaaaccgccgttttctttcgtcgatgaaacgcgtcgcgcgcgtgccgccgaagccgtcgcccgcggtgatgggttgattctccgcctccaagtcgtgagcgaaggtcgccgggccgtctgggccggccaatacgaccgcgaaacgctcgagcccgcaaaggcgcgttccttcgagctgcccgcactcgtgagccgcgaaagcgtgcaagtcgtgcgttatttgatgagcatcgaagatccttccccggaaatcattcgcgcggtcgaagacgccgcggcgtggttcgagcgcaccaagatccgcggtctgcgcctcgagcgacgcaaagccgcggtcgttcgctacgatcatcacactgccaaagacgatctcgtcgccgtgcccgatcccgacgctccggtgttgtgggcgcgtttctacgagctcgccgacagccagccgtttctcgccaatcgcgatggccgcaaggtctacacgctcgccgaagtcgagcgcgagcgccgcaccggttacgattggtacgggccgttcgcgacggagttgttggagaaagaaatccccgcgtggcgcgcacgcatcgcggcgaaatcgccaacacgctgacgccatggcgcaggcaagcgcgactcgccgcgcctaacgtccgcccgcgagccgttccgccgcgcccgcttcgtagcgcgcgatccacgcgcgatgccaggaatcgtaatcgccggcttcgatgtgtgcgcgcgcttgcgccgtcagatcgatgaagaagtgaagattgtgaatcgtgagcagcgtgccgctcagcatctcgcccgcgatcgtgaggtgtcgcagatacgcgcgggaaaactgcgtcgtgtagttgtgcacgtcttcggagatcggacgcggatcggcgcgatatttttcgttgcgcagattcatcggcccatcgggcgtgaaaacgagtccgttgcgcgccacgcggctcggcaacacgcagtcaaacatgtccacgccgagcgcgatcatcttcagaatctgcggcggcgtgccgaggcccatcgtgtagcgcggtttgtccgcaggcatgaacggcgtggtcgcggccacttgtttgagcatctccggttccggttcgcccacgctcacgccgcccaccgcatagccgggcagatcgagcgcggcgagcgactccgcggcctcgcgacgcagatcgtcgaaggtcgagccttgcgcgatcgcaaacacatgatggccgttcgcgagaaagccgttgtcggtcgcgatctccttgcactgtttcgcccagcgcaaactgcgttcgaccgcgcgcgcgcattcctcgcgcgtgcacggccacggcggacattcatcgagcaccatcgcgatgtcgctgccgagattcgcctggatcgtcatcacttcgcgcggcccgagaaacagtttcgccccgtcgagatgcgattgaaacgccacaccgtcgtcgcggatgtcgcgcagtttcgccaatgaaaacacctgaaatccgccgctgtcggtgaggatcggcccgtcccagcccatgaaccggtgcaggccgccgagctccttcacgagctcgctcgtgggacgcagattcaggtggtacgtgtttcccaaaatgatctgcgcgccgatctctttgatatgcgcgggcgtgagcgccttcaccgtgccctgcgtgccgaccggcataaaaatcggtgtatccaccacgccatgacgcgttttgagccggccgcgtcgcgcggcggtcgccgtatcggttttcaacaattggaagtgctcgggcatgtcgccgcccaccctcgacagccgcttcgccgctggcaactctgcaaggtattgacgcgctcgccgcgccacgcggacgccgttttcgcggccaccggcccgcggccgcacttgaccacgcgcacattccagcggttattcaacctctgtgctcctcgtcatcgataactacgactccttcacctacaacctggtccaatactacggccagctgggcgtggagcagcgtatcttccgcaacaacgagatcacgcccgagcaagccgtggcgttaaaccccgatcgcgtgctcctttcgccgggtccgtgttcgccgaccgaagcgggcgtcacgctcgacatcatcaaggcttttgccggcaaaaaacccatcttcggcgtgtgcctcggccaccaatcgatcggccaatatttcggcggcaaagtcgtccgcgccggtcgcctcatgcacggcaagacctcgcccatccggcacaaaaacaccgatgtctttcagggcatgccgcaggatttccccgccacgcgctaccactcgctgctcgtcgagcgcgcctcgttgcccgacgaactcgaggtcaccgcggaaaccgccgaaggcgaagtcatgggcctgcgtcacaaatcgctgccgatctggggcgtccagtttcacccggaatccatcgccaccgaaggcggcatgaagatcctggaaaacttcctgaagctcagctgaaccacggccggacacgctccgcttttcacctttcagcgttcacccgttttctcttcctccatgcgttgtcccaaatgctcgtccatcgaggacaaggtcatcgattcccgcatcagcaaagaagggaactccattcgccgccgccgtgaatgcctcgaatgcggctatcgctacaccacgaccgagttcatcgtccgcgacggtctcgtcgtcatcaaacgcgacggcgttcgcgaagacttcgatcgcgaaaaactcgtccattccatccgcgccgcgcttcacaagcgcccggttgacgccgagcagatttccatgctcgtcgaagacgtaatcgattccgtcgaagttcagtacgaaagcgaaatccccacgcaggcgatcggcgacgcgatcatgcagcgcctcaaaaaaatcgaccaggtcgcgtacgtccgcttcgccagcgtgtacaaagaatttcgcgacgtctcggagttcatgcacgagatcagcacactcgaaaaaccgaagcagaagtctccgtaaccacacgcgacaaacggctgccgaagcattcactcgctggcacactccgagtgtccgagtttctttcgagccgacccattctcatttatttgcggttagaaaacctgctcaatgccatctccctcccgcgacgatcttcgccggcttcattttatcaacgcgctcttcgcgtccgtcaccgggcaggatctctatctcgcgaatcaaatcaaagaagccatcgcgttcagtctcgcggaactcgaagcgcaaaccgccgcgcatcccgagctcgccgcgcgctatgatgccgctttcaccgccgcggccgcgcgcctgctcacgcgcttcttcgatggtcaacccaaccacggcttttatcactgggacgccaccgcgacggaaacgtccgccacgccgcttttcgcgcgcgacggcctcatgcgcggcctcaaacacctcgcgccttttccgcaatccacgctgctcgtcaccaatctccgtcccgcgttgcttccgcccgatcgacgcgaaacgcccaagcgccgccgcgaatacgaagacacgctcgccttcctccgcgacctcgccgccgcccgcaccgcccccagcgcgaatctgcatttgctgttcctttgagagctgcttgcacaggagcaaacaaagggacgcagagtggatgcatccattaacttcaaaagccgactcgctgccaggcatgctcatcgcagccgccattgaagttcatcgcgacaaaggaccagaccgcctagaatcgatctacgagtggcgcctcgcacgcgatcttcgccaactgcgtcgtcccccaaaagctcgtcactatctcgcacaagggcttcacccgcgaagaaccactccgtttcgatttactcgtcgaagactgcgtgctgatcgaagccaagtgcgtccaacgcatctcccgattcataaagcataacttttgaactacaggaaactgctcaacattcgatcggtttgctcatcaacttccacagactcaaactcaccaccggcatctcccgcctcatccgccccgacgccaatctctaaaaactctccctgtttcctcctgttaagaatctcccacacctccgccactcatgtccaaaaccctcttccaaaaaatcatcgaccgcgagatccccgcgaagattgagcacgaggacgaccgctgcatcgtcatccacgacatccagccgcaggctcccgtgcacttgttgatcattccgaaaaaagtgattccgcgcgtcggcgaagccacgcccgccgacgaaacccagctcggccatctcctcgtcaccgccggattcgtcgccaagaaactcaacctcgaacgcggcttccgcctcgtcatcaaccacggccccgacgcctgcgaaagcgttccgcatctccacgtccacctgctcgccaagcgccagatgacctggcctccgggctgatcaaaactacttcaaaaaggacgcccggcttagcagagcttgggccgggcggagcctttcagctgtttccagctttgctgtgacttgtgggaatcgtcgaagggccaacaaaacgaagctgggagatagggtgcatcaaggacttgccaaatatcatgtgcaagcctgaaataggctcatggcgacacgcattccggctggcggtgccgaggtgatattgggactggaccttggcgtaggttctatcgggtggtgcttgatcgaacactcgatctcacaccgcgatgtaggtgaggagggtggggcaaagattatagacatgggcgtacgcattttccccgccggaagcgaggggagcgaacgcgactgggcctcaggcaaagaaaaatcactcgccgagcctcggcgcatggcccggtcgatgcgtcgccagcgtgagcgccgtcgtcgccgattaatcgccctcgcgcatgatctacagcgactcggccttttcccaactgaaccagtcgaaacgcctgtcgagcgagacgaatttttcaaaaagctggatgcgactcttcgacctccggctgtcgcgcctacggttgaacaccacacttggcttcatcgcctgttcgccgccggcatagaaggtaccaagctcactccacatcaacttggtcgcgtactttattacgccgcccagcttcgcggttttcagagtaatgccaaggagcgtggcaaggctaaacaagacccaaaaaatgccagtgtagtttacacaggtatcagtaaaactcgtgcgctccgtacatcacccgacgaagccttggtcgcaacacttgcccgcttgaatccagaagctgacggccaacgtatccgcggccgctatacggcccgagaagatcgtcgttcagatgtcgagcgattgctcgctgcacaagccgtccattatgccgacgttctcactgatgcgacccgcgaaaagctactaaaacgaatcttcgatcaacgtcctttaaagaacaactcgcatctggtcggacgctgcgctctctatccagacgaaccccgtggagagctagcgctaccctcgcttcaacgactgcgcatccttcaaaaagtcaccgatctcgaagttatccctcccgatggcgatcgcatgccgcgtccactcgacgcagtacaacgtgcattggtccgcgatcacctctactcacacgaaagcatttccttcactcaactacgcaagcttctgggctttcccgccaagaaacccaaagccaaagcggacaatccctcattgccgccgatccagcctcccttccatgagttcaatctcgagcgagaagattccgacgaaaaactgatcggcgatcgcacacactgcgccctcgctccgctgctcggcgaaaaatggaatgacctcgatttggcaggacgtgacgagctggtagcaacgattcttgaagcagaagacgaagagaccgcaaaagaagcgctgatcgctcgttacggcgtggacaacgagttggcgcaggctgttgtagaacgcgctctagaaacagatcgagggcgcttctgtgcccgggccgcacgcgaactctgcacgcgcttggacacaagcgaggacaaacctacgcgcttagcgacagccctggaatctctgcgcgggggaacctctccccaagagcgtgccgccgaagagggcctggatttcctaccgccttaccttccaagccaccccggcgtggaagctttccacgattcccctcacgcactacgcaatccctccgtcttgcgtgtcctacgagagctccgccttgtcgtaaacgcgctcatccgcaaacatggcaaacccgctcgcatccgtatcgagtttgctcgcgaactcaaaaatcctccgaaaaagcgccaggagatcgctaggcgacaaaaagagcgcgaaagcgagcgtgagaaagcacgcaagatgctggtcgaactcggccttcgttcgaatatcgtcgcggtcactccaaccgacattgagaaatggttgctcggcgaagagtgcgcctggcattgcccctatagcggcacaccgatcccgcctgccctcgtgttcggcgacactggtgctgttcagattgagcacatcattccacgctccatctcgttcgacaacagtttcgccaacaagacacttgctctggcggagtggaatattcgcaaaaacaatcgcactccctacacggctttttcggcatcgcccgagtggcccgaaatcctgcgccgcgtagcaggtttcgtaggctccggcgcccgcgggaaactcgcccgattccaatgggacgaaagggaaatcgaagtccgttacggagacttcacctcccgccatctccaagaaactgcgtgggccgcacgcctagccaaggactacctcgccgttctctttggtgcggaaaaaacagacgccatcgacgccaccggtacgcgccggatcgaaaccatctcgggcgtcgctaccggtcttctgcgtcaagcatggtgcttctccgaagccctccttcaaagccctcaactccctaagcttccacccgattccgaagatcgtcccaagagcggcgccgccgacaaacttcgcatcgatcatcggcatcacgctattgacgctctcgtcgtggcactgaccacgccctccgccatcgccgcgctctcatccgccctcgccagcgaacaggatctccgcagagtccgccttccgctgccctcagcaaacttcgaaaaccagctgcgcgaaaaagcagaatcgatcatcgtatcgcaccgggtaaaccgacgcgtcgccggcccgcttcacaaggccatctattatcaggctcctcggcccaatggacgccgtttccaacggaaggaattgaaggacctcaagacaggcgacttcgactatatcgtcgatgcccgcatccgcaccgccgtgctcgatgcatgggcaaaacgacccgcgaatcaaaacgatcctgcgaaccttttcggcacgccagaaaacctccctcgcctagccgacggcactaccgtcaaacgtgtcacgttacccataaaagaagtcaccacggtagccctcggctcaccggagacacctgcgcgacaactacacgttctcaccggcggaaacttctgcgtcgtcattgtggaatgtccctccaaaaatgcgaaaggtaaaccacactgggaattccgtccgatcaccttgctcgacgcggcacgcgccatcgccaatcgctccaatgaggaccgtcgcacaccactttcgccagcccagatgcttctgggtgatgacgctctcaaaccgggcgagaaggtggtatttaccgttcgttcatcggaagcgctgcgcctaagaaaaggccccaagaaaggtattatcgtggtcggaaccgccagcaaagacggtatcgaaggcgcgtaccatcacgactcccgaggagatgcgatccgcaaacgacttggcgcatcggagcgtatccgactttcccctacagcgttgaaagaggcggacacgcaaaaagtcgtcatcggcccgttgggcgaaatctatcctgcccgtgactgaaggtcggatcatcgaagtgcgtgaacgtccggcgcgcgtgcgcttggacacgggacgcctcgtgattgaaagcgaaaccagggatcgcgaaccattgcatgccgagatcgccgcgcgcgaggtcgccgccctaatattggcccacccgcaaatcgcgataagcggtgctgcgcttgccgcagtcgcggaagctggcggtgtagtggtcatcggtggcgaagacgccctgccgcgcgcgatgctgctacctttcggcggtcatcatgctcctacgcgccggctcgccgcacagtgggacgcctcgctccccacccgcaaacggctgtgggctgaaatcgtgcgtgccaaaatcgccggacaggccgcggtcctccgtagtcgaaatatggatacaatcgtgttgtcatctctggcgaagacagtccgatccggcgatcccgacaaccaagaggcacaggccgcacgttactactggtcgcgactttggggcgaaaatttcgtgcgcgatcgggaagctcaggaccaaaatcgactcctgaactacggttacgctatcctacgtgctatcgtggctcgtgctttgtgtggagcgggcctccatcccggcgccgcgctacatcatcatcatcgcaacaatccgtttccgctggcagacgacctcatggaatttctgcggcccgtcgtggactcggaaatcatctccttggtggaggctgacggcccctatcaaccgcttgatgctcccctcaggcgccggctagcttcggtactggttcaagaggagtttcgtttcggacgcgaaacgtggatacccgctaccttagcccaacaggtcgcacagcgacttggacgcgtctttgaaggtaaacgagaatcgctgggactcgatgccttgtgggacgagtaacccctatctggcctgaaaccccgccatccggctacgagacgatgtggttggtcgcgatgtttgatctgccggtgggcacgcctgacaaccgccgagcctacacccagtttcggaatcatctactatccgtcggtttttcgatgctgcagttttcggtatacgcccgcttctgcaaaagtgaacgctcggccgaacaaatcatcgccgaagtgaaacccgccattccggaatcgggtcaagttcgcttcctcatggtgacggaaaagcagttcgctaagatgaagagctttattgggaaaaagccgaaacttaacgaacctccacccgaacagcttatgtttttctaagagaactaggcccgaagcacctgataaatagatgcttcgggcttact

SEQ ID NO: 1777 - DNA, 23216 bp, synthetic construct
  misc_feature 1..23216: note = Synthetic
  source 1..23216: mol_type = other DNA
tgtactttccagcatatttttgaaaacagaaatgaaaataacataggggaaattatcaatgaggtctttcatgaagtggaagagcttaataaaaaaaaattaaatggagtttttggaaaagtcgattttaattcagaaagcattttaggaaaacctaaaagtaaaaatgccttactaaggcatttaattaatgattttaaagaccttgatctcaaacagtttttaggacaatctgatattattggaagctcttacctttaccttatcaataattttgcggcagaagcaggaaaaaaagggggagagttttttactccagaagaggtttcgatcttattagcaaaaatcattgaaccaaagcaaggagataaaatctatgatccaacctgtggatctggctctcttttaatcaaagctagacaagagatcaaaaatactaatttttctctttacggtcaggaagtaaatggaggaacttgggctttagctaaaatgaatatgtttctccatgggataagacaatcttacatcaggcgtggagatactatcagatctcctcaatttatagatgaaaaaggctctgttatgcaatttcataaagtgattaccaatcctccttttagtaaaaaaaaatggggttatgaaaatgtgcaaaatgaccgccgttttcatagaggtttgcctcctccatcgaagggagattgggcttttatatctcatatggtagaaagccttttagctaaagggaaagcaggcgttgttgtgcctcatggggttttgtttcgcggagcctctgaagggcgaattagaacagctcttatcaaagaaaataaaatccatgccgtgataggtttagcctcaaatcttttttttggcacaagcatccctaccgctttgttgatttttgatacaaataaaacaacaaaagatattttattcattgatgccagccgtgactttgaagaaggtaaaaaccaaaataaactgagggagcaggatattacaaagatctacaaggcttataaaaaaagaaagaccatagaaaagtatgcttacttagcctctttaaaagaagtggaagaacaggaatacaaccttaacatcactcgctatgtagatacctttgaagaggaagaagaaattgatataaaagctgttcaaaaagaaattgagattttggaagaagaattgactcaagttcgaaaaaaaatgaagcatcatctctcatcccttaggactgaaaaaacagtaaacccccaaaacaaaggagtaaataaagtatgaatcaaatcacaaataaagaatattgtattatatgctggaaaatgatccaagcagaacctgaaggtgataaattcatttttaacagccctttagcgggaggaaaatatagtgttgaccgacaggaatattatcagagggaggagggtctcatcaagttacatactaaagacacagttcgtttatcaggacatattgcaaaacaaaatcttttggataaaattccagatgttagttcgatgatgaaggatacaaaatggttagaaaaacttcctcctattcctggtcctacagaaagagcctatttattattagagggcttagtaaaaaaaacaaaatattttggtcaagagtttaatttaaattctctcgaacttcctaagattgatgattccgatatttatggttttttacatgctatttcttactctgacaataagagaccagaagagataaagtccttgatagaatttttagcggaattaaattttataaaaataaatgttacaatatttaaagttacagcccaaggatttgagaaaattgatcaactttctcaaaataattattctagaaaagtttttattgctatgtggtttgatgacagtatgaatgctttaaaagattctatgaaaaaagcaattaaaaacttaggttatgagccttccagaattgatgataaagaacatcttaataaaattgatgatgaaattttattagaaataaaaaaatctagatttgttatttgtgatctcacttcagagaaagaaaaaccaagagggagtgtttattttgaagcaggttatgctatgggtaaagatattcctatcatttggacttgtaataaaagtttagaaaaagaaagagcttttgatattcaaaattataattgtcttttttgggaaaaagacaatttagataactttataaaaaagttggaacatagaatagagcaaacaataggaaaattaactaaaggagaaaataatggttacttatgaattaaaagaaggaaataaaaatgtttatataggtaaaacgaagaatccagaaagaagggaacaggaacatagagccgagggaaaattttttactaaactagaagtcacctcttatcgaatgacaaaagaagaagcaagacaaaaggaacaaagagatttacaaagatatagggtaacgcatgacggaaaaaatccaaaatacaataaagacagtgatggttaaaagaaaagtgaaaatggaaaacttttggaaagacatcgatgataaaaaaaagaaactagatcaaaatcgccccttagcaaaaaatgctgtaaaaagccttcgggataaattagccttagaatggacacatcattccaacgcaatagaaggaaatacactgacactgagtgaaactaaggtggttttagaaggtattacaataggtggaaaaagcatcaaagagcatttagaggtcatccatcataaaaaagcaattgattatcttgaatcgattatctcaaaaaaagtagagttaagcgagccggaaattaaaaaaattcattctcttattttaaaaaatataaatcctgaacatgcaggtgtttatagaacagagcgggtttttataacgggagctagacatatcccgccagctccaaaaaagttagaagttaaaatgaaacaactgatgaaattttatcaagaagattggatgaatttacatcctgtagagcggtctgctttacttcatattgagtttgtaaaaattcatccttttattgatgggaatggaagaacatcccgtcttcttcaaaactttgagttaatgaaatacggctttcctccgattataataaaaaaagaacaaaagcttgaatattatgaagctttagacaaggctcacatgacagacaacacaaaagatttttttaaaatgtgtaaagaatctctaaatcaatcttttaatctctatttagaaatcataaaagaaattgagtaaagaattaaaaagcatgaatcaaatcacaaaaaaagtaactaccaattacggataacttaagaaagtataaaaagcttagaatataataaacaataaataaactaaaaggagcaaatatggcaaaaaaaagagatacagttacttataagttaaaaaaaggaaataaaactgtttatataggtaaaacgaagaatccagaaagaagggaacagcaacatcaacgagagggaaaaagtttttctaaattaataaaaagttctcgtcgaatgacagaagaagaagcaagaaaaaaggaacaaagagatttacaagaatacaggaggacccatgacggaaaaaacccaaaatacaatagagacagtgatggctaaaaaagatttaaggaaaaataggaaatttattattaatgaattgtattcaattttaaatgaatttacaaagccagagtttgacatagaacaaaatatccatgaaaaaatttgtgagtttaataataaaaaatttagggataaaaatctcccagtagatgccgattgtttatatgaacagatagcttttgcttttatagagacaggaactcttattttagaatggggtcaaactttttataaacctttatatggtaatatagattctataaataaaaaatggacaaccagctatccagatataaatgatattaattttgaaacaatagattattgggaaagacgttcttcggaagtggataacccgattttaaagtgtcgttattctggtcttgtctgggatttttctaaaaaagcaagaaatataaaaccagatatatcagtggctcatagagttattgattccacaattcaaatagctaatcttggaggagatcgtttttttcataaactagaaagagctttgagattagctgtttcccttaatgctaaacaaaaaattacctctatccgtgaggctattattaaaaatgaagatacttattcagaagataataaacccggaacatggggatacgcttatgatttactcataggagataaaaaattacctgctaaagttcaattaaaaaaagaacaagaggataaaattatagatgagcttgaaagaaaactaaagattttttctgataaaaaatcaaacacttttaatcctcattctgtcgagtatgttgtagaaaaactagttccttattataaagataaacaagacaggaaaaatatagaaagagttttaattatatatagggattcttttttatatggaattaaaaataatcttgtgatggtcggaagtcgttggctagaaaaaattagaaaagttttatttcaatatggtttttctgaagaggcgaaacagttagaaccatatattcgctctcttcaacaagaagacttaactaatcttaaaaagattgaaacttctttcaaagtcccacaaaaagaaattgataactatatctctgaactcgataaaagagatctctttcaaggattaaattacattgccttaagttatattcctaataaaaaatcagctcaagatactgttcttaaaacagccaaagaatatccactacataaaatggttgctacgtctattatggattatactggaagagaagttgatacggttgattctttagataaagatttagagggacatactgttcttgaaatgtctcgattaatgtacatctatgtttctttgattggcttaggattaaaccaccttaaggaaaataaatccttaaatgcaaattcaatggcagaacatctttttaagtcacaagtatttccaaaggaaagacatgcaataataaaagaaggtctcacagcctattttaataaaaattatattgtaagttgctctgttttaattcatcagattgaatcagcaataagaggtttaattgtttctggtggaggggcaatttatcaaccttcttcaaactttaaagataaaggtttcaaattaagacctttaggctctttattagaggataaagtttttaagaaagtttttgaaaaattggatagcaatataccattttttttaaaaactcttttagtagatcaacgatctctcaacattagaaactctatctgccacggtcatttttcagctcattttttaaatgaagtgattgccactcatattattcatatattacttattttgtcttttataaggaaaactacacattcatctaataaataaattgaaagaaacttcttaaatgaataaaaagggcagacaacattttaaggggcaatcactataaagaagtgaaagaaaaatcaagaaaatggtttatggtaaaataggaattatttatgagagataaaagtttatttttacaaaaaagaagaatatcaaagcatcttatttggaaaaaagtaaagttaggagatattgtttttatacaaaaaggacagcaattgaatagatcaactttaaaggaatctggagaatactatgtacaaaatgggggtgttgatccttctggatatactgataagtggaatacaaaagaaaatacaattacaattagtgaaggtggaaattcttgtggatttgtgaagcttaataaacaaaagttttggtctggtggtcattgttatactttgattaatattgatgataaaatagaacgaaattttttatattattatttaaaaaataatgaacagaaaattatgcgtttgcgtgtagggtctggaattccaaatattcagaaaaaagatattgagggatttttaattatctatcctgatttgaaaatacagaaagagatttctgatgttcttaaatataaagaaaaagaaatggaaactctacaacagctttctgaaaagtatgaagaacaaaaaaaaggactgatgcaacaacttttaatagaaaaaaaaagactataaaaaaggagatagccaatgaataagcccattaacaaaatgactaaaaaagatttattgaatttatttgaagaaatagaaaataaatataatcaattaatagataaaacttctgaagtggaaaagaaaaaccaagaaattgagaatttattttccgaaataagaaagcaaaaaattgattcaaattatttgatttctgagatcaataaaagaaagcaagaatttgagaaattatattctgaaataagcaatcaaaaagagacctcagatgagtttttttctgagatcaataaaagaaagcaagaatttgagaaattatattctgaaaaacaagaaactcttaaaaaccttgaagaaaatatcattcaaaagaataaaaaattagaagagttaataaaaaagactgaatcacttttgccaggagcgactgcagtgggtttagcttcaagttatattcaagggaaaaaagaaaagactacactactttattggttgggatttattctttcacttgggggtttatttgtgatgtattttaaggtcttatttaataaccttgataatttaactttaatgaatttattgaatcgaacaattttaggcttaccgcttgtttggattgcttggtattgccaaaaatctatctcacaaaccactcgtcttaaagaagagtatcagcataaagaaagattaatgagagcttttgtgggtttttcaaaagaagttgataaattaactgaaattaatactgatgaaaatatatctctgaaaagagatcttatatccgttactataaaggctatacaaagaaacccagctgatacattaggttctcctaaaactcttagagaaccttggaaaagtgtagttccatctaaaaagaggatgaagagggtaaataattgaaaaactacttatttatatgtagtttattaaaaatggtaatgtgtagaaatgaaaaaaaattcttctgttaaaatagaggtaagtctcccttttttagattgaatctaaaacttatatataaaaacaagttattacagatagatacattcaaaggattgctagccattcggtaaaaattttaaaaggctggagtttttgaaattaaaaggtcttattcaagtggattgagagtttattttggaaaagatggaaataaaataatccttttattgatatgagatagagaaacacaaaaaagggatattaaaaaagcaaaggaatactgaaggtattatagttaatagacgtaaaagctatgacaaagttttagctcaaaaatttaaaaactctaaatatgcttgtttgtatttaattaatattcctaaaaaagaaaaattgaacgtggaagatgccctttgtgaaacagtcaaagctatgaatcttaaaagtttttctaattttgtagagaaaaaacaaaaatggaatatggataaagcttcaaatcatataaaaaatgtttttaagttaaaagtaaagttatcttttgaattacaaaaatcgggaggtagagttgcttaactatgaaagtttttttaaaaaaatacattgataaatgaaatccaaataatcctgaaaaaatcgactaaaaaatagaaactgattaaaaatgatactctcttataaacacactcctaaaaagaaggttaagaagaaagagaaaaagaagttttaatccaagacttctaaagggattctccaccatatttgccagctcattgaagggcttattgagagtcttacattattagaattgacctgataaaatgattttccttttttttcccattcttttgaaggtttcaaaaggcttggttcaatttcataaattaggtaatcaaagtttttctagtaggaactgaaattataaccgtctcaacttcagataagaatttgtttatttcagaaaaatcttatttaaacctagtaagcccctgatattgtgagagtatctttgtttattgtgcctgacttgatttttgtatataagagccatttacttttatatctgaatggttattatgcccgcctaaaacttcaccgcctattgctctgaatatgctccaaacattcacccttgcactttaaagcaggaaatagcttgtggtactctttcaatagagattgtattctttatcttctttagaaagtctgaatctttgagccatttcttagctcccatgatgtattcttcattgatgtccgttgaaacaaacttgactcccatagccttagctatcatacactctgagcctgagccacaaaaaggaatataaatcctattattctttccatttatttttgaactaataaggatttttgttaattcaaaaggcttttgagttggatgttttattgaacttctttcaacatttcctttaccacctgctagggctgagacttttattacatccctaggcaaagtaccgtttttatgtcctttataaattgtctctttatttccgaatctcccttgagtattttttcttttctttcctatttgttttttataatcctctccataaggcactctgatttgatctatctccaagtcgggtcttttcccattccataaacagagtatactttcgtgactcctttgccaaaacttagaagtcggacaagttttatttgtgtaatgccatactaaccatttttgtttttgtatcgggaaatttacagctatatgactaaggatttcaggaaacccataaatataaataatcccattctctgtaagtttatcaagtgataaattgatccattccttagaccattcaatatatttttttaaagacatgttgtctttattattgccaaaatctttgcctatattgtaaggcggatctgctatgattaaattaaatttttcttctgtgttttttaaaaaagaaacacaatcttttaagagaatttgagattttatttcttctttaaaataaaatcttctcttattgatttttttcttatgaagatcaaaatcaagttgcataaaaaaattatcaattgtttttctcttacaatcaataactatactgggacttaactatcactttataaatcttgataagttagcctttttcccgtgccaccctgtgctaaagaccgactctgtcaatatcaaagttccctttatctagcctgaaagaaaactcgtctatgtatctgtgtaagtgtttctttgatcagtgatgatagactgttaacctcatctgtttacagttgagcctatattgactgtcttgtagggctattgacaataaaaagtttgagttgtttatcatacttaatcccttgaactataatgaaaggatttagatagaagtcttccagttgaaagcaaagaggggaagagaatctttttttctctacaggagaagacattaatgttgaaatacaaagttattaagaagcaaactttgttaaactgagttctataaaaattttaatggtatgtataaatacagttcattctattaagctattagtactcagatataaaaagttttaataaaaaataataaaacaaaaactcggtttttcaaccgagcttttgacacagacataagcctagaatggtgcggatattccacttattattgagagagataccgcaatttcctaagtaataatactttttcttattataaaaataaagaagtaaatgtcaatcttttttttaaatttttttactaaattttaatttaaaatctatatttatactcaacaggatatcgtccagaaaaaattagtatttattattaaaaaaaaagctttcttttttaagaaaattttagtatatttaagaacagtaataaaatagtatagtatgtcaaataaaataacctccttaaaaaaatattcaaatcaaactaaaaataccagattagctttagacatagggactaactctattggatgggctatctataaattagataaaaagaaaaagccttgcagtattattaaaacaggagtcaggattttttcttctggaagaaatgagaaagattatacgacattaaatgctaccagaagacaaaaacgattggagagaaggcaaagagatcgaacattacaaaggaaaaaatttttacttcatttattgaaaaagtatggtttttttccaaaagataaagatttagctaaagagctacaaaaactaaatccttatgaattaagagctaaaggattagatgaagagttagaattgagtcattttggaagagctttgtttcatctcaatcagagacgaggttttaaaagcaatagaaaatccagcaatgataaagaaagcggagttattgatagttctataaaagctgtagaagaactcatggaagaaaaaaaagtaagaacttatggagagtttttatggaaacgattccaaaaaatggaagaaagcagaaaaacccccggttctcaacaagagaactggattttagcaagaagacctatcaactttaaaactaaagataattatgtggtttattcaaaaagagctatgataaaggatgagtttaataaattatggaatgctcaagctaaatttcatgaaaagctgaaagatgagaagataaaagagaaattctttaaagctattttttttcaaagacctctcaaacaagttattgttggaaaatgtttttacaccggtaaagatagaattcctaaagtctctccttattttcaaaaatttagaattttgaaagaacttaataacctcaggtggatcaatcagagaggagaatctttttctatcaataaagataatactgaatttagagatcatcttataagtcggttgttctcaaaaaagaaagaagttaaatttacagatataaaaaaagctttcaaaaagttttttcccaatatcgaagattttccaagatttaacttagatactgataatagaaataaattggaaggagacatagctagtaacattttaagaaaagaaatttctgaatgggataactggagtttagaacaacaagataaatttgttgaattattagatggtaaaaataatcatgctttgaaaaagggtgaagaagttttatttatgaaagaggatgaagaagtcttaaacgatttgataaaatttagtaaagataataattttaagctcaatgaggaacagctcaaaaaatgtataaagaaaaatttaccagatggtcatggaacctatagcaaagagtttattgaaaagatattaccttttttagaaaaaggggagctggaacataaagctattcaatctgctggtttcgggcatcactctgatagaaaatataaaggagagttagcaaatgctctacctaaatatcaggaaattttaaagaatcaatgtgtagaaatgagtttaaaacctaataaaaagaatccttttaacacttttagaataccaaatccgactgtccatgttgcttttaatcaacttagattattagtgaatgatattatcaggctctatggaaaaccttccgaagctgttattgaaacagcaagagacctccctttaggggtaaaaacaaaaaaccaactacaaagcaagcaaaaagaaaatacattaagaaatgaagaagctaggaagataatagaagattttggacaagaaaacaatagatccaatcgaatcaggtatcaattatggaaagagcaaaaatacaaatgtatttattcaggagaccccatttccaaaactgctctttatacagctcaattagaaattgatcatattttgccctactctcaaactttagatgatagttatatgaataaagttttagtttataaaaaagctaatcaaggcaagggaaatcaaactccttacgaatatttctcatctcatgtaaagcaatgggaaaatgttttgtctagaacaaaagaacttccaaaaggaaaacaatggagattcgaaaaagaagctatggatttagtaaaaaatgataacaattttttagaaaggcaactcaatgacactcgttatatctcaaagtatgctaaacagtatatggagcatatctgcccccaagtttggactgtcagaggacaaacaacggctatcattatatctttgattcaatttgaagaaaaaaacagagaagattatagacaccatgccaaagacgctttagctataggattaatagatcgctcttttgttaaaaaagtgagtgatatagcaaagaagattgaaggacaagataaaagtcgtttaaaaaacattaggaaagaactggctaaaaataatgcaatactcccttggagtgaatttaaagaagatgctaagtccagcctagaagaaattattgtatcccatagacaaaaaacaaaaaaagaaggagagcttcatgaagaaacagcgtatggaggaattaaagagattcaaaatttttctcaacccatagatgttgttttatataaaaatatcatagaaataacaaaagagaaattaaaaaatattataagtccaaaaataagaaaagactttgaaaatgaatttaagaaaagtaataaaatcacaaaagagtttcttcaagattaccataaaaaaactggtattagaagagtccggttaaaaagtaaggaaaccattatacctattaaagatcaatttggacataattataaagcttttatgcctgggtcaaattatgttataaagttatttcaagacaaaaaaggaaaatgggatggcaaaattataacaacatttgatgcgaatcaaaataaaatatttctacctaaaaagaactctagtcttatgaaagggaatcttcttttttttgaaggagacttctggaaattagtgaagtttgatagaaataaaatacttatttttgttagacattttgtgtctgggaatccagacgaactaagaaaagaagaaaagacaaagcatcttatgtctcaaaaaaatatttcttctttggggaaaaccaagcctaaaaaagtagatattagccctgcaggtaaatataagctgattgattttcaaatagaaaaagaagaacttattaaacaaaaagttacgttataagattaaatgagtttagggcattttgtagaaatctcccaacccaatatttatctaagtttaaatcgtggttttttagaaatctctcaacaaaaaaatattttaggaaaaattcccttagatgatattttaggtcttgttattacaagctttggttgttcgaattcctctaatttattggtagagctagctgatcgaaatattcctatttctatctgtggttctaattttatgcctatggctcttgtttttccaattgtaggaaatgtaaaacaaaaagctaggatacagtctcaagtagaagctaaaaacaccttaaaaaaaagattatggaaaaagatagttcaattaaagcttaaaaaccaagctctagtcttaaaagaaaataatcttaattataaagctttattggatatgtcaaatttagttcaatcaggagatcctcaaaatttagaagctcaaagtgcgagaagatattggactcatttattttctaaaaagtttaaaagagatagatatggaaacgatataaattcactactaaattactcttatacaattataaggtcttgtacagctagagctgttatgtcagtaggacttcatccaagtttaggtattcatcatcgaaatttttataatccaatgtgccttgttgatgacctcatggagccatttagacctctaggagattatgttgttaaacagttttatgataaaggcattaccttagttgataaagaagtaaaaaagactctgtctaaaatttcaacagtggatatgtttggagataaaggtcaatctcccttatttcaaattatagcacaatttgtttattctttttcaatagcattaagaacttcacaaaaaaaatgggaaccgaaattaaaaatacaatggaaccacttaagaatagaaaaattaagggataatatagattcttattctgtatgaagtgtttaagtcattatagagtcatgtggatttttgctttttttgatttaccagttacaacaaaaaaagaaagacgggaagctacaaagtttcgtaatcatttgttagatttaggttttgatatggttcaattttctgtgtattcaaaagtttgtcctaataaagaaaaagtcaaaactttaaaaaggcgtattttctttcaattgcctccaaatggaaaggttgatttattaacagttacagataaacaatttggcaatattcttagttttcgtggtaaaaaagataaaaaactgcctaaaaaaagcaatcaactgatcttattttaaactaaaaagaaagaaaaagccttgaaaatcaaggctttttacttaaggtatattaccacttaggaaattgcgatgcaatcaaaacttttggattgatttaacattgttgttaaatatattaccacttaggaaattgcgatgcaatcaaaacaaataaaaaaaactcttcatttctgaagagatattaccacttaggaaattgcgatgcaatcaaaaccgttctcaagtgcatagatgcaaatggaatatattaccacttaggaaattgcgatgcaatcaaaactgtagaaggattagtattttcattagatatatattaccacttaggaaattgcgatgcaatcaaaacgaaaaaatgaatttggatttatcaaaatttatattaccacttaggaaattgcgatgcaatcaaaactgcatctaattcttgctttatgcataagcaatattaccacttaggaaattgcgatgcaatcaaaactttttgtttgcggaagaactgaagaataaaatattaccacttaggaaattgcgatgcaatcaaaacacagtacgcgtatgaacttatttcatatttatattaccacttaggaaattgcgatgcaatcaaaactgatacttttaacccaagttgaaaatctaaatattaccacttaggaaattgcgatgcaatcaaaactgcacatgaatcaatacatcatgtgctatatattaccacttaggaaattgcgatgcaatcaaaactgttgatgtcggagagaatctttttgattcaatattaccacttaggaaattgcgatgcaatcaaaacttgaagtgttttttgatacaacataagaagatattaccacttaggaaattgcgatgcaatcaaaactataataataatacccttgctgatcggagaatattaccacttaggaaattgcgatgcaatcaaaactggagttgtcctgtggcattcatccacaaaatattaccacttaggaaattgcgatgcaatcaaaacgagatgtagcaactacccttaactatccagatattaccacttaggaaattgcgatgcaatcaaaacttaaagaaactttagctgaatatattttttatattaccacttaggaaattgcgatgcaatcaaaactgtattatattcggatactgaattaagtttatattaccacttaggaaattgcgatgcaatcaaaatgacattacgactgtggaattgatttatgaattgtctaaagcaaaaaacaaattagaagaataaggaagagaaaaatatgatacacaagcaggttctcttattaaaaactttagaatagttattgaaagaactattgaactatttttcttaaagatattataaaaaggcatagataaagatattcactcaaaacacgtaaaagaacttagtaaaattaaagcaaagattgtaatttaattgatgaattaatgacaaaatattcaatatatttacattctcaaattgaagaaagatcaagtgaattatcagaacttaaagagttggaaacagatatcaacatggaatcgagagatgaaaaccctaaaatatcttttctcaaaatatgaaaagcaaaaaaaaaggagatagctcatgaataagcccattaacaaaataactaaaaaaaaattatttaaagaaatagaaaataaatatgatcaattaatggataaagtttctgaagtggagaagaaaaagcttttagatgaaataaagtaaaaagtagaaatcttttctaatataatgaaaaaaaattgacaaactacttatttatatgtgtttattaaaatggtaatgtgtggaagtgaaaaaaaatatttattatcatataaaagaaaacggtagatctcctattgtagattggatatcaagcttagatataaaaaaacaagttgttgtagatcgatacattcaaagagttgctaaaggtcattttaacaattcggtaaaaagtttaagggatggagtttttgaagttaagatacattattcaagtggattgagagtttattttggaaaagatgcaaataaaataatcctattaattggaggagataaaaaaacacaaaaaagagatattaaaaaagcgaaggaatactggaggtattatggctaatagatataaaagttatgacaaagttttagctcaaaaatttaaaaactctaaatatgcttgtttgtatttaatgaatattattaaaaaagaaaaattgagcttagaagatgctcttcgtgaaacaatcaaggcaatgggtcttaaaagtttttctaataaatccggcttatccatacaagctgtttctgattttgtagcgaaacgaaaaaaatggagtatgaataaaatttcaaatcatatagagaatgtttttaagttaaaggtaaagctatctcttgaattacaaaaaacgggaggcagagttgcttaattatgataaaaacacaattgataaatgaaatccaaataatcattaaatcgactcaaaaataaaactggttaaaaagttataaaaagaaattgctctgatacttgaagaggataagtaattgaggagattgaaattctctgcttataaaagaaggacttacaacagggattgactggaattaaaaacttactttcgaaagccatgagctggcttttctgatttctgctccgtttggaaaagttttttctctttcaaggttttgaaccaattgaatggctttgacattttttaattgccttaaaaatagattcaatccgtcagataaggtatctttagagcttttaagctctagcatacaaagaggtattctatctttaacaattaaaaaatccacttcttttttatctttgtttcttaaataaaagagttcatagtcttgaccttgaacatccgcacgaaaatgaatctcctttaaaagagtacaagctaatagattttccagtcttaaagaagagcctcgcacttgtgcagtatcataaaaatagtatttaggagctttgactaaagagcgggctatgtttttatgccaagggtttattttaaaaataacatacaagttttccaaaatttgtaaccaattttttactgttttaggagaacagttgagatcttctgcaagagaaacataagaaagaggagaacccactctatcccgtaataattgaacaagggtttctatagaagaaagagatttcacattttctaaactgataagatcctgttttaaaataacatctagttgtgtttttttccattttccataaaaagaagtttttgcttctaaaaaaggctcaggaaaacctccaaattcaagcaattggtttaaagcaatttcaggtttagccaggtttagatttacaatctctttgacatcaaaaggatgaagacgaaaatgaaaaaaccgtccagcaagagaatcccccattcttttataagtatctaatcgagcagaacctgtgactatcattcctggaggcaaaccttctgtatcataaattccttttaaccatctcttccaatgcttttttttatggagttcatcaaaaataatatattttttttctctatcccatgatctttcaattaatattttatggtgctttctattgtcatagtttaaataatcaaaagctagtcctaaatgtttagataaagtggtcttgccggattgtctagctcctgttataactagaattttactttttaaatcttttaataaataggaagaaaggtatctttttaatggctttttcataaaatggattacaaatataatatttatagtaatttatttttcaaaaaaataaaaactgctaagtaaatcaaaatatattaaaaaaggataaaaaagtaaagactaaaaagacctacactcccttttagtctagactattcggtaataaactcccttttagttgttctatgttgttgggagtatgataccaaattatcaaagattcttatttttaaaactaagctctaaaagtatttatttaagcatttcaatggaagttgctgtcctaacagaacatgaggattgagttgattttaaagagttttgctattattttataaaagaatctgataaaactaatgagaaaaaatcatgcaagtttatctggttataagaattataggagccttctgataagttaagccaggaggagagcttaaagcaggtggagtaatgataaaccgaactatttgagataaaaaggttagacttaatttctagacataacagggctttttgaagaggaatttgtgaaagcctatcaacggaattaaaaaaagccttaatgttaaagtttaactagaaactgagatacagtaattttataaattaatgtatggaaataaattaatttttaccggaaaggctataaagtgatacgaccttcttttaaggaagaattttctcaaatttctgctctaaagcttttgcaaaatatgggatggtcttatctcacaccagaagaggctttaaactaccgtgaaaacagtactagaaatgttttattagaagatgttttaagagagcagttaaaaaaaataaaccgtattcagtataagggagagctatgtgatttttctgaatataacattacaaatgctgtcaataaattaaaagaccttccttttgaagggcttattcctaccagtgaaaaaatttttgatttattgacactaggaacaagctttgtagaaacaatcaaaggaaataataaaagctatgatttaaattatattgattgggaaaatcctgaaaataacgcttatcatgttacagatgaatacaatgtggaaacaaagcgttttaatgagcaacacagacgccccgatattatcctttttatcaatggcatccctgttgttattattgaatgtaaaagccctgctatcactgatcccatagaagaagctatttcacagcatattagaaatcaaaaaaaacatgaaattcctcatctttttgttttttctcaaattttaatcgctgtatgtcctagtcataaaaaaaattactgtaagtatggaacgacaggaaccgacatgaagtactggtgttcttggaaagaggaaagtgaaccgagattacaaaaattaattgatacccctttatcaaaagacaaacaaaaaaagcttttttcaaatattagatataataaaataaagaaagaatttgatagaaaagcccctagagagcttactcatcaagatatcatcttgtatggactctgccagcctgaaagattgatagaatttattgaaaaatttattgtctatgatgctggggttaaaaaaatagcccgttaccaacagtattttgcagttaaaaagacacttgaaaaaatcacaagtgtccctgatggcaagaaaagaccagatggagtgatttggcacactcaaggaagtggtaaatctctgtctatggtcatgcttgctaaatcaattgctatggatccaaaaataaaaaatcctaaaatagtacttatcacggataggaagcatttagatacacaaatttataaaacctttcaaaactgtcaaatttctttaaaaaaagcaaaaaatggaccacatcttgttgaacttttaaaatcctcaaaagcgacagtgattgcaacgaccatttttaaatttgaaacagttattaaatctaaaaatacggttttagattctacaaatattattgcattaattgatgaagcccatagaactcaatacggtgtagctcatacaaaagttcgaatgacattccctaaagcttgttttattgcctacacaggtacgcccttaacaaaaaaggaaaaagatacaagatgcaaatttggaaattattttcatacttatacaagtcgcttcgctttagaggataaggttattgtacctattttgtatgagggaagggtggtttctcaaaccgttacaactcatttattagatagaatgtttgaaagaatcactcaaggtctttcaaatcagcaaaaaagagatttaaaacaaaaatatagaaacaaaaaccaattggataaaacagatcaaagagtctctatgattgctatggatattagttctcatttttctaaaatatggaaaggtacaggttttaaagctcaacttgcaacaaactctatagctatggctttaaaatataaaaagcattttgatgagctagctgaagttttgacggctgttattatttctaaaacagatgatagagctgggcatacaagtgtttcaaatgaggaaaccgctttggaaaagtatgaaagacagataaaagaaagctttggaggaaattatgaaacatatgaaagagagatgatttctagttttgatagtcatgagggaattgatattttgattgttgttaataaacttttaactggttttgatgttcctagaaatactgtcctttatttagataaaaagtttaatgaagctcatacgcttttacaagctgttgctagagtgaaccgtgtttttgagaaaaaaaactttgcttatgtgattgattatcagggcaatttaaaaaaattattagaagctgtaaaatgttatgatgacatggctaaaaaagagaactcagagtttgaaatggacttttttgaaagagaagaagtttcaaatgccattcatgatttaaaagaggaaattaaaaaactccccaagcattactctgatttaacttctttatttgattttgacaacgataagaaagatttaagtacttatgaaagtacactaagtactaaaaagagcagagagcagttttatgaaaaactctcaagatttggaaatgtattgcatcaggctttttcttccgttgattttttaaaaaacactgaagactctgaaattaaaaaatataaaaaggagttgcagttttttcttaaattaaaaaagcatattaaagaggtttctgcagaaactgttaattacaaagactatgagccaaaaattgaaaaactcttaaatacctatgtacaagctgaggaagcccaaacaatcattcctgaaactcagatttatgataaagattttgatagcaagttggaaaataaaaatacgaggtcgaaagctctcatgatttttaatcatgtaaaaaagtatattgccgttcatgaggaaaaagataaggagttttataaaaggctttctaaactcattcaagagactttagatgagtatcaacagggtagaatcaatgaaattcaattcctacaaaaagcaaaagagttgaaagatcaagccttaactagaacaggagactctcttcctccatccttaaaaaatagcgataaggctaaagcttattatggcatattgaaaaaggctcttgcttcaaaaaacaatctcaaagaagagttgctagcagatatgagccttattattgaggagatcattgaaaaacatactgttgtggattggtttaaaaaccaagacattcaaaatgatatgaaaaacgatatagaagactatcttaacgacaggaaaatagacttttctactttagatgatattttaggagaagtgattagaacagctaagagtcattatagagaatagtaaagtaatatattataaaaaagggttacaggaggaataaggaggactttcaaaaagcttagaacagctgaaaggaatttgggggaaaaagtaagaaaacagaaagataaataaaaatctttgtaagatttaaaaaaaagaatctttttttgtttatttttatagcaaattaaggaaattaaagaagtttggaaatgtttttgctgataaaaatataagattgtaaaaaaggataaatttatgaaaaaaatatcttttcagaacatttttatttctgtgaaattttcaaatagaaaaacaataggaatctatgttcatcctgataaaaaagtagaagttaaagctccttataaaacttctcttggtagaattaaacagttgattgaacttaaatctccttggattgaaaaacagttaaaagaaaagtatgcaagaatagaaaaaaaaagagagtataaaaacggacacactttaaaattattgggtcaggattatttaattaaagtgattcaagtggaagattttcaagaagagcaaattataaaagagaaaaaaataattagagtttatgttcatgatagtaataaaaaaaaacgaatcagtttattcattgaagaatggtataggaatgaagctttgatttttttagctaaaaaattagaaaaatgttatcaaaaaattaaaaaatacaatattcctagaccttctttttatttgagatatatgaaaagacgctgggggagttgtaatgcaaaaggcactattttattaaatccagaaatgatagctctgccctcccattgtattgaatatattatcatgcatgaactctgtcatttaaagcatcttaaccattctaaagagttttatcattttttagaaacagtgatgccagattgggaagaacataaccaagctttagactctcatcttcaagtttaaaaattcatattctaataattaggctttctaaattgtcttattgtcacttccatttagcagaagattgggaattttcgaaatgctaaacatgaaaaagaattgcatttcttcttgttgaaatgaataggtgctgttttaagttaaaatctaatctaagcaaaaaagcttaaattttcaagtccttagaaaaaact

SEQ ID NO: 1778 - DNA, 20840 bp, synthetic construct
  source 1..20840: mol_type = other DNA
  misc_feature 1..20840: note = Synthetic
  variation 15879: note = n is a, c, g, or t
cttctatccggatgtaatgtcttttcttttaaaaattcactccatttattctcacaatttataaaaccttcattaaattcagattcaccctgttaaatcccttcgggaaaatcagagattttatttaacagggtaaactataaattaacaaattaacttttgaatgcccaccaaactgaaaggttcaaaaccccactgcgtttctgtcaggtgaagcggtggttagaatgcctatatcatttttggagtttcattttctcaactaattgttggcagttatccgaaagaacttcttctcttcagaaataggagctgtccatgttgtatcagtaacagttacagggttatcaaatccggaatatggtctatatgatgaataaaccttataagaggttgctccagttactgcaccccactgaatatgaacagaatcagaattaatagaaatgattacattttcgggaggtgtaaggattccagattgttcaaagtaatatgcgcccatatcatttcttgtgccatctgggtcattgtattgcgaatctggattacccgcatctatacagggagattatgtagaatcagatgttggataattagcccaggttagatgaaaatccccacttgaagggtctgcaaataacgggtcagcatctatgttgcctgtgccagtccaagcaccttgaatgtctgaataagttgctgttactgaaccggaagaaacataaatctcaggcggcgaatcattccagagaatacagtttactaaactcgcaacgctattactactgtaaatcccaccataattagaagcagtattttcactgatcgttacatttaccaaagttggtggggtccattcacaataattgaagcgaatcccaccaccatagtcagcagtattcccactgattgtcacattggtcatacttgggatacaataccaataagcgtaaaatccaccaccgtattgggctgagtttccactgattgttacattctccaaagtcggacagcattcatcacgacaataaaaaccaccgccgtaacgagaagtagaatttcctgttatgtttacatttattaaggttgggctggaattctgataacagtaaatcccaccgccatcattatgggaataatgagttgcataattgccagatattatcacattctccaaactcggactggaaccattccaacagctaattccacctcctttttgattacacgaatttccactaattattacattcagcatacttggactggaaccagagcagtaaattccaccgccgtcactagaagttgtatttccgcttattgtcatatttgtcaaactcggactggaagaagaacagtaaatcccaccgccgccaaatggaccaccagtattcccgcttacggttacataagaaagacatgggcttgatgcatgacaataaactccgcctcctgccaaggaattattcccgctcacatccacattttcaataattggattggaaaaaccacaataaattccaccgccccaagaaccagtattgctatttacagttatatccactaaactcgggttggattcatagcaagaaatcccaccaccgtaattattagatgtattcccgctcactgtaagatttttcaaactcgggctggaattttcgcaacaaattccacccccataataataatagtaaccacttgaatcggtatcacgataattaccactcccgttggttaaagtaaatccacataaaattgcggtagaatcttcaccactaataaaagaaactacactcccactatcaggattagttggattactgccatcaataactgtttgtgaaatataaacggtatcctgcatggttaaaaataaggaagcaacagtaatattctttccattaaagttgatattctcataatatcttcctgtgtccacaagaacagtatcgccaatatttgcagcatttatgccatcctgtatagtcggttggtcagaaggaatattaattacatttgcaacagcaaaactgctaaaaagcaggataaataaagccgataagataccttttgtttttttcatcttttctccattttttttctcttttttttactttatcatagtgtcaactacttaatttcggcggtctaacggaaaagctcacctgcagaaacacaaaatgcagataaactataaactgtcaaattatctattgaatgctcaccatactttagattagaatccccactgcgtttccgtcaggtgaagcgggggttagaatgcttaaactactttactatcaaaaaataacaagttttaagtttcaatttgattaattccagcattgattattaactgttcttacttttatctaatcctttatcgcttttacataatagaatcttttctctaatgatattggagcaacccaacttgttccatcataagttccagtattgtctatatcaaattcagaatacggattatctgatgaataaactttgtaggaagtcgtccctggaacagcatcccattcaatatgaacagcatcttcagcaatataaatgacaatattctgtggtggcaagatttctgcaaactctgggactaagtagccaggataatggatatatccaacactgaataaactatcattggctatcccaccgatagcgttttcttttaaattgaagttagcagaacttggtggttctggttcatcaggattgccagcaagaagtccatatttatgtaattgatagttagggcttgaagcaacttgtgcaatagtagtagaagttgataataaaacaattactgtacaaactaatataattgatctatttgatgttttcattttaatctccttttctactctaaagctaacattattattcttgcataacctgaagttgtattaagccttccatcatgaagtttgttttggacatataaagatatctgtgtcgttgtaagaccttctagatgactatccgcatgcccccagtctccaccagtatttaatgtatgtccaccttgaactaaaacagatatccctgaaccattactagtatcagataaccagcattgtgatattaccattgtagttccaagattatgtgtttttgtatataatgtaggattacctccgctacttattgcaaaccatccactatcatatgtcctttgggtagcagcagtagtttgaatagttccgtcaggaaacataataccatctgtacctggtgtaccggcaacatgtaacttcgcttctggaatagacgtgccaattccgacgttgccagagttgtctatactcattgctgtaactgatgggccattttgaatgtttaaagtattacctccatttcccatccatattctaccaagaaaattctgaccactatcatttatccttataccaccatttaaatcgtcagtactctggaggatttctaattttcctactgggcttgttgtcccgatgccaatgttgccattgttgagtagatacaattgattgtcattatcccatcctttttggatgtgtaatccgttcgcatccatccacaaccttccggtaatatctcctaacgaatgtctaataattaaaccaccctcattggaatcagtagattgtttaatatctagctttgctccaggacttgtcgtgccaatacctaccttgccattttcacgatagatatcatcaccgtcaactacccaatctccatcagtttgtgcataagctacacttccaatcatgcttcgtggtgtcatctcgccatcgttattaacatcaattccaatccatcgttcgggctcattgaaaagggtatcaggaattggattttcagcgcctaaaaacagatgaaataaaccatcagaaacatttaccggatcttgtgtctcactccaaagtgatgttcctccagttgaatcggcgtaaatggaaaaagtaatggaaacagttccattaataggatttccatcactatctgttattctgccctgataatcaattaagttcggaaccgcctgagcagataataatgcactaatcaataatgagataataattagtgcagttctccaagtttgactatgtgcaaacatagtttcctccttcattttttttgatttgttattcttcttttgtccttctgatacatcggaaggtcgattttcaccttgtcttaatttcattttactcaacatatctactcctttttttttacctctttgggtaattttttggttagcaatctaacgccacgcttaagctgcaccaaacatagcggccattaacctttaaaggactccgaaacctgaccggaacgaaaaattaaatgataaccaggacgtgtttggggtcagcttgaagcgattattataaagcgttttatctattcttcaattttttttatacttggtttccctatctgttgtatctctattgagtaggaacataattctgtagattcttttatcaaatgaaaacttaatatccctggggctggaattggtattcccccaatttgaacaatttgacgacttctctttttatcttgaaaatctgacttgataggaatttcaatcaggttttgctcattgtttttgacaatcaagttaaagtcaaatcgattttcagtttcttcttcttttacaagcagactaaaaaagaatattttctgaataaataatggaaaaccaggacttgagacattttcaagaatattgaaaactgaaatgttatttgtttggatatctctaataattccttcagcggcaaatgatattatacacttcattgttttttattcctttattatagtattatagtaattggttttctttcaaattccgaaatatttgtatttgtgttgctgccaaaatcggtttttaataattcagatctatatcttaaatctgacgttactatggattcagattttcgttttgtgaaatatatttcgcttatttgttttgcccaccgaaaggaagcatcaccaagttgtaagaaaaaattcttgacttcatcataaggttttattgttaatgctataataattgaatagaatagtacaatctcttcgtaagtttttttttctttgtccttttctttttcgaataaatcgattaattcaggcgtagaattttgttctgatatttttttaatataaggatgagcaaaaaaatttttaaatagataataaggtgtacttgataaaataaaaatttcaactaattcttcagtctcaacataaatgttttttatcatttaataaccctataatatttaatatcacttttatcgtaaggacaatcattagcataatggataaattctgaatggcaacaccacttgctaactaccataggaacatataatggataagttggttcttcaattacaattccggaatgttcagcatccccttctgaaaaataaataactatatcaccaggtaaaacttttttgagttcaatttcttgatattcatcatccttaagaatcataaaaacttggtccgattgttcaacaaaacatcttttgtttgcaaatgttaagccgtggcaattatataaaccagttggttctgtacgttttatagcatttttatattgcatctcgatattcttaaattgattcttattaaactctgatatttcaggattttggaaattatcaatattatttcctttccttgtctgaataattatcgatttgtcaatattcaataagttcataaattttctcaagctttataacatacattagactgatacaatcagtatataactacctatttttgaagttaacacacactataaaataaattcctatctaagacattacctttacaaaagcttcataattaagtaataaaactaaagtttcaaaaaatacttgtcaaattttttctaaaaaacttgtaataatattaatggaataatcaatatggtagtatcctgcaggatataaatatattgatgtttattgcagtatattcaatataaaagaggttatatgaataataaaagattattagaacaggtaagtgaacttatgaaaatgaaacactacagcattcgtacagaaaaatcgtatacctactggatgaaaaaattctatttctttaataataaaaagcatccaaaagatatgggtgaaaaagagattacagagtttatttcttaccttgccaatgtggaaaatgtttcagcctccactcaaaatcaagctctgaacggactgatgtttctttataaggaaattttacacagagatgatttgaaaatagagaattttgttagggctaaaatgcctgaacgaatcccggttgttttgagtaaagaagaaatagataaagttctgtctaatctgaaaggagtttattggctaattagtaatttactttatggttcgggcttgagattgatggaagcactccgtctccgagtcaaagatatcgattttgcatataaacaaattcttctacgggatgcaaaaggtgctaaagataggagaactatgattcctgaaaaattagttactcatttaaaaaggcagataaaaaaaagaaagatactacatcaagaggatttagaagatggtgcgggaaatgtatatttgccttatgctattgcaaaaaaatatccaaatgctgaaaggcaattcaactggcagtatatttttcctgcaaaccgtatagtttttgatagggaaaaacaaaaagagtatcggcaccatcttcacgaaagtgctgtgcaaagagcagttaaacaggcagtaagaaaggctgaaataactaaagaagctggatgccataccttaagacatagttttgctactcatctgttagaaaacggttatgacattcgcacgatacaggaacttctcggtcacaaggacatcagaactacgatgatctacactcatgtcctaaacaaaggcggtcttggtgtgaaatatgtgagatcacctcatcatagtaagtacttagatggttcacgaatcgcctgtctcgctcgtccgctgccgcgacttccagggatttgcgtgaaccctttgatcgtgaaacaccagtgaaacggacatgagtctccatgtgagacttcatcgttaggatgatttccttaccctcccccacgatagccacaattactgctttacgatggtcaatccataagcccactactctattcataagcattcttctccgatagagctgcacaacatattattaaggtgcttaaatttacatattttgcttaactccgcaatatatgccataagttaatatctccaacacaatttacgtttatttggcaaatatttaatatatttttcctatttctgccttgataataaattgaaaacctgcattaactacgttatgttttgcccgatagagaaaatttgctcaatatcctgtttggtggtcaataaattttaatcaaagtgtatcaggagtgagccgattacttataaaggtaagatgagccccttgcaaatatcctatataagaaaaaggcacaagccggagcccgtgccttaattttttggttcaaaaaccttgttaacagcttgacaccaaaacctgatttcctatcaggtgttattattaacatgattaagaacttgagccaaaaaatagggattaaaaaaaaggagtcaagatgaaaagatatcgtcttggaattgacctcggagcaacatcgcttggatggagtatgatagagttaaatgaagataatacaccaaaggatttattagaccttggtgtgaggatttttccggatggaagggacgcaaaaacgaacgaacctttaaatgtacaacgacgagaacatcgtagtatgcggcggaatcgcgatcgctaccttcaaagaagaacgtaccttctggatacattagtgaagtatgtattaatgccccaaaatgagcatgaaagaaagcagcttgaatatctcgatccttatgttctaagagcaaaagcactggatgaggaaataacattatacgaactgggaagagtaatattccatattaaccagcgcagaggttttaagagcagcaggaaaatggatagtgcagaaaaagaaacctcacgtatgaaagaagcaataaaagaattgaaacaaaggctcgataatgtcggagcaaggacattgggagaatatttattcaatctcaataaagacatccctcaaaaaaatcaaaataaacttagacctctcaggatcagggattacggaaaagagtataatttgtatactgaccgtaaaatgtacgaaaacgaattcgatatgatctggaataaacaaagcacatatcacagcgaactaaccgaagatgtaaaagaacacctcaaacagattattttcttccaaagagatttaaaaccacaacccaagggcaaatgcagatttgaaattggcgaaccgcgctgtcctgttgcatttccggtttatcaacaattcagaatttatcaggaagtaaataatctgattttattggattatgatcgaaaagaacacgaacttacaaaagctcaaagagaaatgatcacacaaactctcttaaaacaaaagtctgctacattcaaaagcttaagaaaaaaaattggaaaagaatatgcaggtgattatgtattcaatttggaaagtgaaaaacgtaaagacatgaaaggggacgagacctcatttattcttcgcaaaattgagaattttggaattaaatggaatgaacttagcgaagatgaacaagatgaaattattacccgaattattaacgaagataatgatattgaaattgaaaaaaatcttattacatggctttgtaagtcatttgggctgaaaaatgagaacgcagaaaatatcagcaatgtccgtttaccacgtggcattggaagcgtcagtaaaaaggcgataagaaaaattctgccttatttaaaagaaggttttctttatcatgaagcttgccaaaaagcaggttaccatcactcagattttagaacaggagaaatttacgatgaaggaaatttaccttattatggcaagatcatgcaacatcatgcagcttttggctccgatgatccaaatgacattgaagaaatccagtatggaaagatagccaatccaacagttcacattgctttaaaccaattaagaaaattcatcaatgcacttgctgaaaaatatggtgcaccaacccagatcgttgttgaacttgcacgagaactaaaacttggtcagaaaagactgagggaaattgaaaaagagcaaacccataatagaaagcataatgaagaaattgctgaggaattaaaaaaggttggaatagaaaataaatatcagaacagattgaagtataaactatgggaagaactggacggcgacccagcaaaacgatgctgtccatataccgggaagcaaatatcaataagcgacttgttctctaataaatttgaaattgaacatattctgccaaaatccaaaacattcgatgacagacctaccaataaaaccgtttcatattatattgcgaataagtttaaaggagaacgctcaccatttgaagcttttggagaaagccccgaaaattataattgggataaaatccttgaaagatgtgagaattttccaccaaataaacgctggcgattttatccggatgcgatgaaaaattttgaagatcagggcgagttgatctctcgtatgctcaccgatacgcagtatatgagcagaattgccaaagaatatatgagttatgtttgcggaccgaataatgtatgggcaatccccggaaaactgacctcaaaattcagggcaaaatggggtttgaacgaattgctctccgaagacagcaaaaaaaacagagccgataaccgccatcatgctatcgatgcttttgtggttgcctgtacagatagggcaatgcttcagaaggttgcccgggctactgaaagcacgagagaacggtttatagaaaaaatgccgccgcccttcgaagttttctgtcatgacgaaatgcaggaaaaagttaataatatcgttgtatcctacaaacccgaccacggcaatgccaaagctgcaattctaagaaaccaaacagttgggcaattacatgaagagacagcctacggctttgtttccgaagatgaagaaaaaggaaagataacactttctgtgagaaaacctttaattagtttggagagcgttaaaaacattaatgaaatcgcttcatccaaaataagaaatgaacttcttacattagcagaaggtgttcctaaaaatgagatcaaagccattcttgctaattattccgagcgaacgggtattaaaagagttaagctccatgtagaaaaagataagaaaacggtcattcctattaagaataaaaacggagagatatacaaatactacctttccggcaacaactattgcgcagatatttattgcccgaacaaaggtgaaaaagacggaaaatggcagattgaaataattccaatgttcaaagcccataagcaggatttcgaacccgaatggcacaaaaaatatcccaccgcaaagaagataatgcgccttttcattaatgattatgtggcttacgatgatgaaggaaaaagaaaaattaaaagggtaaagaagatgagtgtagatggtagattattctttatagaccccaaaatagcaaaaaccgaaaaagaaccgaatgctacttctgtgaaacaactacaggaaagaaatgctcgtaaaattggtgtagatattttaggaaaaatttacgatagccaaaagaaaaatgaaaatagtcgagataaataagaacaatgtttgcctgagcgtttatcgcggatttattaaaataaaggaaggtactgatgagataggtaaagaacctttgtcagatatagacgcgattatcgtaagcggtttcgggattagttattctcataatcttctgacgaaattatgtgaattgaatatacccctgataatctgcggtaaaaatttcatgccggcgggttatttgctgtcatattgtgcaaactatgaacacacaggaaggttacattatcaactggtgttttcgcttcctcttaaaaaagggctttggcaatccatcattaaaaataaaatcatcaatcaaagacttgtgcttaacgaggttggtgatgaagcaaaagatttcacccggatggttgacaaagtaaggtctggcgatccggataacattgaggcgcaggcagcagtccgttattggaagcgcgcttttggaaaggggtttcagcgagatgtctatattcccgtgataaacagttttcttaattttggctatacaattatacgcagttgtgtggcacgttatcttatcgcttttggtcttatgccttctattggattacatcatcataacaaacttaatccattctgtctagcagatgacataatggagcccttccgtccatacgtcgatagaaaaattattcaaatgaagatacacgataatatggaattatcttccgaatataaaagagagttaggcgatctgttaaacgaaaggttccttatggagaatatgagaatgacactcgataattgtatcaataaaaccgtattgtccttacttaattcattcaaaaataagagcaatatgatcgcatttcccggattttatgataagcggtcttagaattatgtggatgttggttatgttcgacctgcctgttacgaaggtagttgatagacgaagggcaacaaaatttcgcaattttctacttgatgaaggatttagtatgagtcaattttccgtttatttgagattttgcggaacacgagaaagggtttacacatacaaaaaaaaattgaagaacatgtaccgcccaatggtaatgtcagcatactttgttttacggataagcaatacggcaaaattgtaaatttcatcaacaggcatcgaaccgaaatgccaaaaaaatctcaacaatacgtcttatttgaactaaaataatcattttttaaaacaacaatagcggctaaccctctgcttttcggcaggttaggcagccgctaatttagaaaatcaggttttggtgtcaagctgtaacatcgaaggatcaatcaccggcatggcactaaatttagaaaatcaggttttggtgtcaagctgtaactgcttagcgaggatcaggttcattatttgaatttagaaaatcaggttttggtgtcaagctgtaactaagcgttggagctgtgagatgaatatatcaatttagaaaatcaggttttggtgtcaagctgtaacagtctgaagctgatgccaatgatcttgctaatttagaaaatcaggttttggtgtcaagctgtaacggcaggcaatacaatccggttgagtaattaaatttagaaaatcaggttttggtgtcaagctgtaactttgtcagcggcgtatagtccgtcacggtaaatttagaaaatcaggttttggtgtcaagctgtaacagacattcaggagagtcaacgccaatctctctcttctctcctccgttttccttcttctcgcttttttcataaaaatattgccagaaattatacaaaacgaaaaagcttttctattatgaaaacaggaatactctacattgtacccacgcccatcggcaaccttggcgatatgacacatcgtgcagtagaggtgctgcaaaaggtatccgtcatcggcgctgaggatacacgcacctcgaggattttgctcgggcattataatatcagtacaccaatggtgagctatcacaaattcaatgaacgggcacggctcgacgaattccttgaaaagctgcaggcaggagaagacattgcgatcatctccgatgcaggcactcccggaatttcggacccgtcaggtattctcattaaagaagttattgagcacaatgtcgaggtgatcacgcttccgggtgcaactgcatttgttcctgcgcttgtgtcttcgggcttaccagcagaaagattttattttgttggatttctgccggagaaacattccgatcgcagagagcttctgcaaaatcttgaaaatattcaggacacgcttattttttacgaagcgccacatcgtctggaagaaacgcttaaagaattactgaaaaatttcgatgacaggcagatatgcattgcccgggaggtctcaaagaagtttgaaacctattaccgtggagcactctcgcattttgtggaaaatttcgaagagatcacattgaagggcgagttcgtacttgttcttgaaggtgcacaagagaaacattttttggatgaagaaatacgcaaactcatcacagagaaatttcatcaggataagtcggtcagccggactgcgagagagctggcacaggaatgcaagctctcgaaaaaccgcgtgtacaagctggctttacaaatgaagaaagaatcataggttttggacgcatgaagataccgaattcctacatcagcgagatacctcgttttttcacgcctgcggtttcgaccattccgcagaccgttatggagatcacaaaagagatagaggaacttggtggtaaagcatttcttgttggcggcagcgtgcgtgatatgctgctcgggaagaagcccacaaaggacattgacatcgaagtgtacggcatgcagcccgaactgatacaggaaattgtagaaaagcacggaaaggtcatgaatgtgggaaaatcctttggcgtgctgaaatactatgatggtactttagagatagatttttctctacctagaaaggattcaaaaattggtgaagggcacaggggatttgcagttgataccgacccttttatggacatcaaagaagcagcacggcgaagggatttcaccattaatgccatgctttatgatcctatcacggaagtgcttcttgacccattccacgggcttgccgatcttgaaaaccgcgtactgcgtgtagttgataaagatacatttgcagaagatcctctacgtgtactgcgaggaattcaattcattgcccgttttgagctcacgattaatgcggatagtattcacgtgatggagcaggtggttccacagctttccgagctgcccaaagagcgcattcaggaagagtggaaaaagctgctgctcaaagcgatgaagccctcgatgggactgaaagcagcatttgagctcggcattattgaaaagctgcatcccgatctggcagaactcaatgagacggaacaggactcgctctggcatcctgaaggaaatgtgtggttgcatactctgctctgcatgaacgcaggagcgcagatcattcacagggaaaatctttgtgtgagagaggcatttgtgatcatgctgagtatcctgtgccacgatcttggcaaaccggaaaccactataaagaaaggtgatcgaatttccacaccggagcatgaacctgcaggcgagaaaccgacccgggcgttcctcagccaaataggaaccgataatgaaaccaaagaaaaagtaatacctctcgtgaaaaatcatcttgcaccattttctttttatcaagctgaatcccgaaacggcgaaaagatcacagacggtgcaataaggcggcttgcacgacggctctatccggctacaatatatgaactcatactcgttgcagaggcagattatatgggcaaaggcacgcggctccatgatcaagataagaattttaaatccggcgcatggctcataaaacgctcacaggagctcaaggttgaccgcgacaaaccggaaaatatcattgcaggcaaagaccttattgcaatgggattttctccgggtaaaatcttcggaaggatcatccaaactgcgaaccggcttcgggatgagcatgagttctcaaagaaaaaaatcttaaatctgatcaagaagcagagctcggcgaagggtgcattgctgcgtctgcagcaggaaatagaggaagaatagttatgaaaatacgaaccataacccacggcatctcgctctcctatcctgtggatgaatatgctgtcaaagaagcggttgcgttcaacaataatgcgagaaaaatttttgaagaccagggctacgaggtacaggaaccgcgcataaccaccaattcctggcccgattttctgggacatctgagcaaagatgacctcatcgaaactttgcagagttttgaatctatttgtaaacatgaaggagtagaatttacaagtatcggcacagtaaaagagctggagcacatggatttgatccccgatattattcttcatacagaaagaatctctaccacaataactatagtcgatgacattacaggattcagcgtggaagctttgataaaagccgcacaaacgatcaaaactatttcagaaaataccgagaagggttttggaaatttccgatttgctgcgattgcaaactgtcagccggacattcctttctatcctgcaagttatcatattgggaagaagtgttttacactggggcttgaatgcagcgacctccttaacagggcatttttggatcaaaaaacctttgattcagcaagagagagtctgaagagaattttcatacaagaactgcgtcctcttgaagatatcggtatgatgatcgaagatgatacaggtgtgacatttaagggaatcgatgtttcaattgccccttcactggaaaaagaagagagcactgctttcggatttgaaaagcttggattaaataaatttggcgaaccgggcacactggcaattgcggctatggtcacaagcgtccttaaatctttacctgtaagaaaatggggttattgcggtctgatgctgcctgtattggaagatgtcggacttgcagaacgatgnggagatggactgctggatgtccaaaaattgctggcatattctgcggtgtgcggcacaggactggattgcatcccgcttcccggcgatgtcaccgaacaggagctgataaatattctttatgatgttgcgagcttgagctccaagctggataaaccactctctgcacgtttgtttcctattcccggtaaaagcgcaggagagttcacagattttaactcaccattcctgacagaatgcaaaattctggacgggaaataaataaattctaaaaattccaaaaaatcgcaaggagaaatcatggaaaagataatatctgcatgtggaatagtctgttcagagtgcactgcttacattgcgacacttaataatgacgaagatatgaggaaaaaaaccgcagaggattggtcaaaagcttttaatgcaacactcaccgctaaagatatttgctgtgatggctgtatggaagaagatggaaggtatttcgctcattgccttgaatgcgagattagaaagtgtgtgcaggcaaaaagtattcctaattgtgcctattgcgaggattatgcctgcgaaaaggttgaagggctattcaaaatggtgcccaaggcaaaagaagaattagatgcaataagaaaaacactataaaatatctgtttgagcttaattaaaggatgatgaagagaaataaaatactttttgaagaacttgagcaatgggctgatgatctttttcgtgaaaaagcaagcatgcttcataagctgcagtgcatctgcaagctgctcaaggacgaagtggcacattatgactgggtcggattttatcttgttgataaagtgaatcctaaagaactcattctcggatcctttgaaggcgtccccacagaacatacacgaattccctttgggcagggtatctgcggacaggttgctgaggaagaaaaatctcgtattgttcaggatgtggctcaggaagacaactatctttcctgtagcatcgatgtgaaatcggagatcgttgtaccaattttcaagaatgaaaaattcatcggtgagatcgatattgattcctacgagattgctccttttactgatgaggataaaaatttcttgaaaaaagttgccaatatggtatccgaacttttgtagaagccatgaaacgctataaatcagataaaagaattgttatgaccctcgatgcaggcggtacttacctgcgcttttctgcgattaagggtgagaaagaaattgtatctccagtccagcttgatacctgcgggaatgatcttgagatgagcttaagaaatatcatttcgggatttacacacattgaggaacaattgtcagaaacgcctgttgcgatcagtttcggctttcccggaccgacagattacaagtacggcattatcggtgatcttattaacctgcctgcatatagaggcggagtggcgctgggaccaatgcttgaggaaaaatttcagatcccgacctttatcaataacgatgctgacctttttacttttggagaaacagtcgccgggtttttgccttatataaattccttattagaaaaaaacagcaggttgaaaaggtattataatctcatcggcggtactttcggcacaggtttcggtggaggacttgttattcggggagaactcttgacgggcgataactccgcacaggcggaaataaaccgtatgtggaatcatctttatccagattattctgtcgaggagagtgtaagcagcaagggagtgcgaagagtctatgcacaagaagcatgtatttctctgaatgcttcgccttctgcaaaagagatctatgagatcggcatgggcttaatagatgggaacaaaaacgcagctcacaaagcgtatgaagaacttggcctggctgcgggaaatgcctttgcccaggcagcaacgcttatagatggtttggtcgtgatcggcggcggcctttcgggcgcatggaagctctttatgcctgcactcatcaaggaaatgaatactgcattctgctcctttgataatgaaaagataggtcggcttgaaatgaaggttttcaatttgatggatgaaaaagaattggatgaatttctgcaagagcgcatcacgcttataaatgttcccttcagcaataaaaaaattccatataatgaagagaaaaaaacaggagtggggattacacagctcggcaccagcactgcgactgcggtcggcgcttatacgtttgccctacatcgcttagacagctaaacaagacgtatctaagaaaaagatttggttcacgcaaagacgcaaagagcgcaaaggaaaaattgatgtaggaaacaatcgataatctacacccactgtgtgagaaatcctattggaactatactgcaaaagaaaatatttgtatatttcatgcaagatattatttgtattgacataaaaattatttctaaatcaatttgcaaatatggaaaataataaaatgggatatttataaaatgattataaacagcgaagacataagagaattatactgcgaatcttgcagtatatcaagatgttatgcctttaaataaaaataaaataggtttaatattatgaaacgatttataataaattatttttttgtaatattgttaattattactactcctgcctattgtagtataattgatggacctgcagactttagagtatctacaaatggaaagataattttctcattgaatgataatgtatatgttcaaatttctcgttatgaaaatgattgtgttttaattaatttgaagtgttgggtgtctttagataaattagaaaaccttcttcttaacaaaggcgtactacttgaaaacatagacgggaaaataattggaaacatattaaatgatacgccagtacttaaaatgcattttctgtccggtgataaagcatgcatatcaatcaggggatacacagataaatcaaatataagaactattaattcatatccgactttaatccaaccagtcgacactttaaaacttaataattgtattaaatactatcttgaaaatgaatttagaaattggtgtgaacgcggaaagaaattttcagcccataggttgatgggcattgatatagaaaatgattttattaatgtttatctttgggcttatattatggagtattatccagatggagacaatatacgaaaaggatcgggttctagcattccactgaagttaagattaatacaatataaagattcttatatagtgatcggcttcgaaagagcttcttccggtgaaggatacggcgaaagcataaggaaaatatttccgaaaaaatgtcagtataaaatttttaatcatacaaaatattttaaaccgcacgaattggatttggaaacgaagaaacaggcggagaattattacaataaaacgtacaaatctcgaaataattaaataaggttaataacaaaatttaaaatgatgaactaatgcactccataccctggactgcttataactcaaccgacgggtagatggattcacgcaaagacgcaaagagcgcaaaggaaaaattgatgtaggaaacaatcgataatctacacccactgtgtgagaatctactactgtttatagaaataaaaaaaatggttttaaaatttaatagccactaatgttttgccactgccacgattcttcctgcttctcttccaatctgaatgtggaggctcttgttatacacagatactttaaaattttccttcgccacttacctcaataatatattcgcataagttataatgaataaaccgagacaaagccaacctatagccccttctatcatcacaattgctttggttaaattaccaaacggataccaatctccgattccgagcgttgaaaatttggagaaagaaaaatagaaacaatgccagaaaaaatcgaagttgtatcgggattttgatttcatatttaacatttttgttaattcgtcaattccaattgacgatgttatatcttcgattaatttctgtttattggttttgaactcaaaatcgtatagagcgaatttttcttttaattctttcatcttcattttttgaagtttcttcttaattttatcctgcgatattaagtgatcttttaaatttgaaattgattgcggaacaaagaaataaaaaaacgcaaaaatacaaacgataaaaaaagcaaatggaaaaatccataaaggtttaacgccatatccgcaagacaaccaatttaaccaattaaaaatattatacagaacggactcgattagatggagcggattatacaattttttattccggtttttccagaaatcttttaaaaaatttctacgttcaatctgtttccattcgtaataaaagtcatctgcctcatcccagtcaccattgaatttatgtgattttattagttgagtgtacattctatgaatttgtcttaattccattttttcaggatcacccagatgactaatttttatttctctatcataaatattatcaaactttatatcaagcataccctcaagtattacgcaatcaatgaaattaattgtggaattatgacgaaaattagaattatctagactaacaatcaccctagttattatatagtccattaaaggtggggtataaaatattgtatccggtttacttgatagatatataatgctataatctattttcttctttttacttgagagtgtatccaacaatattatattaccattgtctggtttagttgtaagatttattggagcattgatctgacatttaacaaatgagagatttgatccttcatcaaacagaaaattatagaattcagccctccccccaaattccactctaagaaaagtcatattagatttaaaatgattatatgcaaattgtaaaccatgttcaaaattcgaatctataaaggatacatttgtatttttatgaatatttgtccgataa

SEQ ID NO: 1779 - DNA, 18285 bp, synthetic construct
  source 1..18285: mol_type = other DNA
  variation 3817..4036: note = n is a, c, g, or t
  misc_feature 1..18285: note = Synthetic
ccaacgcgccgtgagcagctccatactcgaccgctttttgtgcgtcgttgaactcaaggaacccgaactgcaaaccggaagcaaagctgtcgccgccgccgacgcgatcgaggatctcaagttccgggtacttcttgctctcgtggaatttcccatcgtgccagaggatcgcgctccaatcgtttttcgtcgcggtgatcacgcgacggagtgttgtcgccgcgactttaaagttcggaaactccttcactgcggtctcgatcatcgctttgaatgcatcggtctcgatcgcggaaatgttatgatccaccccttcgacttcgaagccgagcgatgcggtgaaatcctcttcgttgccgatcatgacatcgacatatttggcgatctcacgattcacttcctgagccttttccaatccgccgatcgtcttccaaagcgacggacgataattcaaatcgtaggaaacgatcgtgccgtatttgtttgcggctttcacggcctcaaccgtcaatgccgccgttgtttccgaaagcgcggcgaaaatgccaccggtatggaaccagcggaccccgagtttaccgaagatgtgatcccagtcgacgtcacccggtttcagttgagacgccgccgtatttccgcgatccggatttcccaccgcgcctcgaatgccaaatccacgttcggtgaaattcagaccgttgcgcacattgcggccgatgccgtcatcttcgcgccattgaatgaaatccgtggcgacgccgccttgcatgataaagtcttcgatcaggtgaccgatctcgttatcgacaaatgccgtcaccacaccggttttgtagccgaagcatttccggagtccgcgcgacgtgttgtattcgccaccaccttcccaagcggtgaaattgcgggcggtgcgaatgcggccttcacctggatctagccgaagcatcacttcgccgagggaaatttgatcaaaggtgacttcagacttcggtttgatggtcagggacatggcattgattgatggaagcggaggaattgaaacgtccagcccccatactgtaaagccggagcgtcgagattctgtcgactatcccattcgacattctgtcgaaaacctcaaaacggacaggatgtcctttcaaatggcgttcagaatgaacgcgctcctaatttcgcggcggcggcggttttgagttcttcgattttcgagcggtccggggcggcgccgcgggcttgatccggttttccgccaccttttccgccggcgatcgcggcgagttcttggagcagatttcctgccttcaaaccggttgcgagcgcggcttcaccgcaataagtcgcgaggtgaagtttttcgccatcatcgacgatgagaagcgcggcaccggcgaaattctttttcttcaggccgttttgaagttcctgcagcaaagatccgtcggcttcgaagctgacgatgatcggtccgcctttttcgatcagctccgcgagcgcttcgtcggccattttagcggcggacgacgactggagttttttgaaacgtttttccgcttcgatcaccgcgtctttgctctcgtcgagtacgcggcgcgcttcaccgagcacggcgttgattttgtgaatgtcaccggtatggaaaagcgaatcggcatcgagcgcttcgggaacggcgacgttcaccaccggttcgccgagaccggcgagcttggcgttgactggagaaagttttgactgaatcgccgaagattcttccgaaagttgaatgatcgagtcgcgaagatattccaacgcgctgtgaccggtcacggcttcgatccggcggacaccagacgcgatcgcgccttcggatttgattttgaaaagcccgatctcgcgagtgctgcgaacgtgggtgccgccgcaaagctccatcgaataaccggttagcgatttcggggcgccgccgatttggacgacgcgaacaaactcgccgtatttgtcgccgaagaattgcatcacgtctgcgcgacctttgacatcggcgtgcggaacttccgtccatgaaaccggatcgtttgcggaaatggattcgttgaccttttcctcgaccttgcggacttgctcagcggtcagcgcggcgctgttgaaatcgaaacgcaaccggtcttcgtccacggaagaaccttgctgcgcgatgtccgcagaaacgacttcgtgcaaggcccagtgaagcaaatgcgtcgcggtgtgatgcgcttcgatcggacggcggcgagtttgatcgagtttgagaaccaccgtgtcaccggttttcaccgcagcatcggcagggaccgaaaccgcacgcgccttgccgatttgctgcgccatcgaaatcggatattccgttccgttcactacgagagttcccgtatcaccggactggccgcccatttccgcgtagaaaaccgttttgtcagtgatgacaaaaagtgcgtcttcctgcgggtgaacttccagaaccgtcgcaccggtttcatcctcttcaaagccgacgaattccgtcaccgcttccgtggaaatatccaacgcacgaacgaccgtgctcttctgagccgaacgcgcgcgatcgcgttgttgttccatcagttcctcgaatttgggcatgtccaccgtcaacccgcgttccgcgcaaatcagttctgttagatcgatcgggaaaccgaaggtgtcgtaaagttcgaaagcgatttctccggaaatgttaccaaggagtgttggcgtctcgccaacatgtcctgcacttgttggcgagacgccaacactccttgaagcttcttcgaagcgctttaacccacgatccagcgtctggttgaaactcgcttcttcctgctccagcgtcttcctcaccgatttttcacgcgctttcagttccgggaaaactccgcccatttcggcgacgagcgtttcaacaagcgcgccaaagaatggcttatctccggaaaatccgagctgtctgccatatcgaaccgctcttcgcaaaatacggcgcaagacgtagttgcggccgttgttgccgggcatgatgccgtcggcgatggagaatgaaagcgtgcggaggtgatcggcgatgacgcggaaagcgacggcggttttcagttcttcggtaaaggccgaccggtctgcgccaagctccggataaacatcgacgtaagttttcccggaaagttcttcgagcttgcggaaaagcggttggaaaacgtcggtcgcgtagttggtcggttttttcgagaaatcggtaaaacctttggtgccttggatgatcgagcaggcgcgctcgaaacccataccggtatcgatatgtttcgccggaagttcgcggaacgtgccatcggcttctgcattgtattggatgaaaacgaggttccagatttcgatacaaagatcggaatcgttgttcaccaaattgcgaccggtgatcggatttccttccggcgtgagatcgacgtgaagttcggaacacggaccgcacggaccggtttcgcccatcatccaaaagttgtccttcacatttccatggacgatctgcaccgccggatcgcagcccttcgatttgaaaagttccgcccaaatatcgtaggcgtcctggtcgaattccccaggatcgcccggtttcggcgcgtagacggacgcgtacaaccggtgcgccggaagcccccagcgttcgacgaccaattcccacgcccaagcgatcgcttcctttttgaaatagttgccgaacgaccagttccccaacatttcgaaaaacgtgtggtgataggtgtcgtagccgacatcctcgaggtcgttgtgcttgccnnnnnnnnnnnnnnnnnnnnnnnnnnnnnnnnnnnnnnnnnnnnnnnnnnnnnnnnnnnnnnnnnnnnnnnnnnnnnnnnnnnnnnnnnnnnnnnnnnnnnnnnnnnnnnnnnnnnnnnnnnnnnnnnnnnnnnnnnnnnnnnnnnnnnnnnnnnnnnnnnnnnnnnnnnnnnnnnnnnnnnnnnnnnnnnnnnnnnnnnnnnnnnnnnnnnnnnnnnnngtgtggtgataggtgtcgaggccgacgtcgtcgaggtcgttgtgcttgccgccggcgcggatgcatttctgcgtgtccgcggcgcgtggcggatcgtagggagctttttcaacgccaaggaaatacggcacaaacgggttcatgccggcgttcgtgaacagcagccctggggactgcggcatcagcgatgcggagggcacgatggtgtgctgtttttcgcggaaaaaatcgaggaagctttggcggatcgcggcggcagtcatggggcgcgcctgtgaaaccatgaaacgcgccgtcgagcacggctttttttaccaaccgaccggtcgaaaagccggcaaaccggtttgcctttcccaaccagcctcaggaaaccggcttggattcgtcttttgcaggctcgccttttgcgggttcctcttcggctggattcaggagttcacggaactgtttggtccactcggtcgccgaaggatgggcgatgtatttttccaaatgggcgagcatccgagacgcggcacccacttggtcgccatttttaaaaagatcgacctccatctcccactgcagcttcggcagcgtgtcagcgacgaatttgtcgtactccggcgggcgcatgtcgtcagccatgccgatgcgaggcttggtttctttcccatctgccgcgcccttgtttgcacgggagctcgcggaccaaaactcatgggtcatgccttcctgctggatgcgtttgatccacgtcgccctcagttggctgagcgttccgggtgtccgatacggcggcagaagcagttcattataaacttgctgcaactccagaggcgacatcggccatttctcgattttcagcgaatcgatctcataagctctggcgaaaacgctcgcagtcaccggttttttcagctcctgctggtgacctgcgagttgctccgcatcgcgaaaaatcgcatcgacgagttgttgggcatctcccgccaacttcgtccggtccgctttttccgacgccgcctgaagcgtcagcaccaaccagcggagctgatgacgaagggccagcttaaagccgggtttggaaagtttttcgtcctctttgcgacgccactcgcggaaatcgaggttcttctttttctgatcttcgaaatccaccttttcgacacattttatatagaggtcgtaggccgcctcgtcgctgttcatcgcgcttgcaaatgcggacatcgcggagcgaaagcgggcgtcaacccgctgactcgccgtatcgctgaggttctccagacgctcaagcagggcttcccggtcgacgtcggagagcgcctgggaccatccttggggagccgaagctgccagaaaaagagcgaaaatgggtaaccgcatttctaagttactagcgaatcgaaaggacggcaggcaacaagaattcgcgaaaccttgggatcccgaggaccgccctccggtttccgcgcttggaagttgccagtttttggcccacggtcctgccatcgcatctgattcccgcatgaattctggatttcgcaggctgcttgccctcgccgccgtttttatcatcgcattttccgccgtctccgctctgagagtctggcgagcaggcggcgattatcgcgatctggtgcccgcttttttccagagaaaaggcgaattccgaccggaaaccttcactttgccggaaaaagcaccgctcaccctggatgacgtcgaattgctttcccggcttaatgacgaatacgcgcgcctgacggacgccgtcgtcccctccgtcgtcagcatcaacaccgccggcatccggaccgagcgcctccaggacatctatggccgcacccaactccgcaactcgcccacccaaggcgaaggatcgggcatcatcgtcaccaaagaaggccatgtgatcacgaaccatcacgtcatcgccggacaacaaaaaatccaaatcaccctccacggcggaaaaaccttccccgccacgctcatcggtgaagaccagttgctggacatcgcggtcctcaaaatcaacgcaacggaagaattcgtcccgctcaaacttggcgactcgtcccaagtccgtgtcggccagatggttttcgccgtcggaaatcccttcgggctcggcgaaacggtgacccaaggcatcatttccgccaaagaacgatccctctcggacaaccagcgcgatcttttccaaaccgatgccgcgatcaacccgggaaattccggcggtccgctggtcaatctgcgcggcgaaatcatcggcatcaatgtcgccattctcagcaaagaccgcgaaaatcccggcttccaaggcgtcggattctccatcccgtccaatgacgtgaaagatgcgctgttccagatcctcgaacgcggcagaccggtccgcggttttctcggcgtccaaatgcgcgatctcgatcccgcaatgcgctcggcgattcatttcaccggcgaaaatggcgtcggcattctcggcatcctgcccaattcgcctgcggaaaacgccggattgctgccatgggatgtgatcctcacctacaacggcgaaaaagtcagctcgtcctcgcagctcatcaccctcgtccaacgctcaccggttggcaaagacgcgacgatcgaagtttggagaaaaggcgaaatgctggagctaaaaacccgcatccgcgaaagtggcaccgccgagaccacggcgaaacgcaccccgtccaatccctcaaaatcgctgaactcggacgaagttctcaacgccatcggcctcgaagtccgcgacctcagcgctccggaagcccttcacggatttcgcggcgtcgtcgccactcgcgtcaccgagtccgccatcgtcgccggcaaggttttgcccggggatctgatcgtggccgtgaacaacacccaaatttcgaacacgaacgaattttacctccacctcgccgcatccgcatccgtccaagcgaccacgctgcaaatcatccgccacggcgaatcgcagcgcatcgacatcccggatctgccacgcggagaatgaacctttctgaaatctttgccgttctgcgccgttcttaaaacgagacactgacctccgatcctccgcgatcgatttttccccatgcaccgctccaagattccttacctttttctcattctggccgcgctgatcaccctcgtcgcgatcatcatctttttcaaacgctcggggatcctcgctcccgccacgcccccgccggtcaccgaaaccccacccgcccaagaaccggctcccgtcctcccacccgccatcccttcgctctccggacctgccgaactcgaagatcccgcagccgtcctgaaagacctcggcatcggggtcggcgcggtcgatcccgccgatctcgtcacccgcatcgccaaagcactcgagtccggagatttcgccgccgctgcccgattgatcggaaaagacgcgtttgacgaaaaaacactcgaacaactcaaagcgctcgccgccgccaaagccctccgcctccgcgaacccggcggcgtccgcgaagtcggcgaactcgaactcaatgccctcgcccgatgggcactcgaactcgacggcccggaagccggacgcgaccggatttttctcgatctccgccgcaaggacggcaagtggtcggtcgaaaaattcatgctgccccccgccccaggccagccgattccgaaagccacactcgccgatgcgctgggaatcgccgatacgtttctgcaagcggtgctgcgccaagatttcgaattcgcccgcgaattggtcgaccccgccaccgtctccgacgcgaaaatcgccggcctttgcatcctttttgaagaaggcgaataccggatgcgctcgtcgaaacctctccgtgccatgtttcaaaaacaggacaccgtcggatacctcgccaatgtcgaaaccaaagacggcactcagagcgcccaattttcgatcgccctgcggcaaccacccgctccaggaaactggcgggtttccgaaatcaatctcgatcaactgctcgccgattacgcccgccgcgtcgccggaggggacctgtattactcaccgctggtgaaaaacccccaaggcggtgacaccctcgcgctctatttcgaatttgacgaatccgagatcaatccccgcacccgccgccagttggaaatcgtcaccctcattttaaaagccgatcccggcaaaaaactcaccctcagcggccacactgacgcgctcggaacagacgcatacaacaacgatctgtcctcgaaacgagccgccgtcgtccgcgatttcctcacccagtccggcgtctccgccgcacaaatcgtcaccgtcgccaaaggcgccagccaaccgcgccgcccgaatgccaccgaaaccggtgaagatgatcccgaaggccgacgcgccaacagacgcacggaaatttacttggatttctaggagagtcggcattctgccagcctctctctcgacaccccaaaccggtctagcgacccaaagcggtcgcaatcacccggcttttctcaaccggaaccggttgctgggtttgcgcttcagcggaaacggccggtcgccctaaagtcgggtagcggtgggagggaacttcttgcaaaaaagtggcagtgagccaagcagcgagcagaagcgacgaaccaaaaacgaaattgcggatattcttcaagatcagttaagtaaatttctacccccgcgctggttcttcgatatttcggaacgaattgcaaaccaaaaaccggccccttttgcggaccggtcttgacgagccttcaaaaggggattgtccttcgcacgcgttcacactagcttcgccaccacggaaccgctgtcacccgatcccgcgcgaccgaacctctcctttatcttcatgggcattttcagcaaaccccgcctccgcacccacgaccgccgcgatgacatgccggaaggtctctggatcaaatgtccggattgtgatgcgatgatccacacgcttgaactcaagcaaaaccactacgtctgcaatcattgcggccatcatttcctgatggatgcccgcgatcgcatcacgctcctcgcagacgcagatagcttcgaagaaacggaagtcggcctcatttccggcaacccgctgaatttccaaggctacgccgaaaagacctccatcctccgcgaaaaaaccggtttggacgacgccgtcatcaccggccgcctgtcgatcaacgaccagccgaccatgatcgccgtgatggatttcaaatttttcgccggctccatgggctccgtcgtcggtgaaaaaatcacccgcgccgtcgaaaccgccatcaaggaaaaacgcggcgtcatcatcgtctccgcatcctccggcgcacgcatgcaagaaggcatgctctcgctcatgcaaatggcaaaaacctgcggcgccctcgcccggctctccgaagcgaaactgccttacatttccctcctcacccaccccaccaccggcggcgtcaccgcctccttcgccaccatcggcgacatcaacctcgccgagccgaaatgcatgatcggtttcgccgggccgcgcgtcgtaaaagaaacgacccaccagaatttaccccccggtttccaaaccgccgaattcatgctcgagcacggcctcatcgacgccatcgtcccccgccaccagctccgcgaacgcctcggtaatctcctggcctacatgatgcccaagccctaaccggcctcgctcattccatctcctcaacaaaaaaacagccaccccgtcgggtggctgtttttttataagcgcttttgagcacggtgtgacgaacaggaacgcggcttgcgcttcaaactttgtcttgattcggaagcatcaaaaccgatccaccccacattgtaaataaaattcccagatcgcatcgccatatctcgacaaggcccatctatcatctgtaataacttaagttacctccttcagaacacccatgcccctcactctttcctttgatatcggttacgcatccatcggctggtgcgttctttcagcggatcagccagccccagcggaacctgaatttctaggaaccggtgtggtgaccttcccaaccgacgactgcctcgcatccacgcggcgtgacctccgccgtagccgccgtcacattcgctcgacccggtatcgcatcgaacgactgaaaaaatggctgctccatcggggtgttctgactcgccctgatctcgacaaacccggccatcccgcacctttcctcctcgcggctgctgcgctccaaggccacaaaacccttaacgcctgggaactttggaccgtcctccgctggtacgcccacaaccggggctacgatggaaattcgaaatggtcccgcgaagaagccgccgacgatgacaccaaaaaggaaatcgccgcccgcgcgctcatggaaaaatacgacacgggaaccatgtgcgaaaccgtcaccgcctgcctcggcctcgatcccgcccagcatcacaaaaccatttcctcacatctcccttacaaaaccctcgatgccgcttatcctcgcggcgtggtcgaaaaggaagtcgccaaactcatttccatccacactggaaaaatccccggcttcgatcccgaaacagtccgcctcattttaaaaagcaacgacctgaccccggccgaacgcgatcttctaacaaccgccgatatccgactccccaagcgccaccacggcggtctcctcttcggccagctcatcccgcgtttcgacaaccgcatcatctcccgctgccccatcacttgggccgaagtctacgataacgagatcaccgccggaaaaacggaagctcaagcccgcaaacaggccgaaaaatttgccaaagttcctaccgccaaatccaaagaattcctcgaataccggtttgcccgcatcctcgccaacatcaaagccaacggtgaacctctcgacaaagaactccgcgccaccctgttccaactcgccgaaaaacagggccgcctcacccacaaagacctcgaacgcgaaatcaaatcccactgcggccccgtccccaccaacatcgacgcctatttcaaaatccaccccgatagcgaagaagcactcgtcctcgaccccgtcatggacgaagtccgcaaagccgagaattccccaaccgcgcgactctaccccttctggaaacacctcacggaatccatcaggggcgaaatcatccagctctggctcgccggaaaatccgcctcccttgcctttattctccagaaatccggcgataaccccgagctcctctccgccctcgaaaaaagcttcgccaccctcaaacccaaaaaaggccagctcccttttcgcgacttcgacacctacctcatccaaacgaaagtcgctcccaaaatccccagcggccgcgccccctacgcacgtcccattctccgccaggtccgcgatgaagtcctcgccggctacgatcctaccaaacccgccaaatcccccgcccatcccgaaggtgaggaaaaggccgccgacggcatcctctattccctcctcgacccaaattcccgcacccgcgaactccagaacgaccgccctctcgacaaactcactaacaaccacctcgtccgccaccgcctgctcattcttgaccgtctcttggacgacatcctcgccgaattctgcacccgggaaaccaccatcccccgcgtcatcgtcgaagtcggccgcgacctcaaagaattctccggcaagaccgccaaacaaatcaccgccgagctcaacagccgcctccgagacttcaaatcagccgtcaaatatcttgaggaaaacgcctctcacctcccccttaccggcagcctcatccgcaaatgccgcatcgccatggacctcgattggcaatgccctttcaccggcgaaaaatacgatgctgccgatctccctagtctcgaacgggaacacatcatcccctacgccacccgtaacaccaacgcccttcacgctctcgtcctcacctggcccgaggtcaaccgctggaaaaacaaacgcaccgcccgccaattcatcatcgacgaagaaggaaaaaccgttcccggcctcacccgcctctgcctctttacgctccgccaatacgacgccttcgtcaccgccctcgacaccaaaggccacttcgacgactacaaacggaaaaccaatcgcaaagcccttctcgccaccaccgcgctcgatgacaaagacctcggtttcaccgatggcatgatgacccagaccagccacctcatgaagctcgccatgcgaagcatcaaaaaccggctccccgatacgacctgcgacaccatccccggtgccgtcaccgccgaagtccgcaaatcctggaacctcctcggcacgctcgcctacgcctgccccgaaatcatcgatcccgccaaccacctcccccgcccaaaggacgaaatccgcggactcacccacctccaccacgccctggacgccgccaccctcgccctcatctcccattatttccctttcacccgacacggcgaaaaccaatcgggtaagctgtgggcagcgatgacaaagcggaaccgaaaacccgaagaacaaaccatcttacttcaaacgggccgctacaaatcacgccccgccagaccatctgccgacggctccagatcaacgggaaaaaccgagcttcaaatggtcgatctcgatccttcccttaaacaaaaactttccctctctctctccgagtgccgcgtgatgcagcacgtccccgccgatcgttccggcaccaaagccgaactcaccacttggggcatcaccaaaaccgaaggcgaaggcgaaaacacccgagtcactctccaccaacaaaccaccaccgtcgataacgggaagcgcctcatcaccgttaaaacccgtgaagaacgagcaggcaaactgctcggtcctcatcccaaaaacgacaccggaaaactcgccgatatcaagggcgcgatgatcatcggcgaaaactatggcctcgccctcgatccgacccccaccgtcattcccttccacgacgtctccgctcgccttaaagaactccaacaccaaaaccgcaacaaacccatccgcgtcctccgcaacgggatgctcatccgcctcaaaaccaatcccgctcgctcccagcaggattacacgggaatctggcgaattgcttccatcaaaaacaacaaagggaaattcctcattgatatgattcgccccagctatatcacccctcaaaacggcgtcgcttggtccggcatgaacaaaaccctcggccccctgctcgaatgcggcctggaaatcctcccgcaagtctactcaggccattccgtccggtaaaattcgtcctcacacaaaattgccgcccaccggacaaagccagtgagcgacatcttcccattgaatcacggaatcaactgtgatagcaatgcagccgagcgttgtcttcgcagtaacttttcgtcgagtaaccctgtgatgacgcgcctacctgaacaccgttgggggcaaaccgctgccaacggtgttttccgctaatatcggttccgaagtaccaacgatcggaagatccaactgtactgcagcccccgtaaccatgccgatgcgcatttgattcgcaatccagccggttccaataagcttcactggaagcacctacaatttcaccgttggtcgcagctctgcgccaacgccattgattttggccatcgtgataaatcagccatttggttgtatcattcattgtttgatgctggctctcactttttgatccatatggcgcttgccttcccgtgcccctcaacggagagacacgggatggaatcaaggcgaaagcggctaattatttagatgattagccggtcagcgcttacacaactaacactcctgaaaataaaatcaacatatttattagccctgatattttgagacccgagtcgtttacaagtttaccttcaaccccaccgcccgcgccaacgtttcttgccgatgatcgaacgtccacagccgctccacccccgcctccaaggcaaaagcgacatgccaaatatccaacgaccgaacttttagcgaggcggtgaattgttccgtcagccccaccgcgcgccgccacacttcttgctcatccaccaccccctcgatgaaccagcccaacttttcctgctcctgaaactgcaagcaggctctcctcgcgtgggagggctcgaactccccccttcccacccgctgccacatcgccccccgatactccagccgccccaacggcgaaatcatcaggggctgcccgagccctgaaatcagaaaacgcgccgcgtctgtgttgccatcattgacgaaatggctcaccaaaaaactggtatccgcataaatggaagggccgcccatggcatttgatttctagtaccgctcctcctcgcgcatctccaacaccggattgcggcgggtttgcggtaaatcatgcaacgcctcgttcctcatacgcaccgaatccgcccagcaaaccaccttcggcttctcatcccccttctccatcccaaccagcctcccgaccggtttcccccgacgcgtcaaaacgatttcctccccttgttccacttgaaccatcagtttggataaatgatgctgcgcctcacgaatcgtcgccgttttcatcgttgacacaaatgacgcacgtctgattcactctgtcaattcgagagctacggatgtcctaccacatcgtcagtatcgacgcgccggattgctccttatcttgcaaggatggccaactgacttgcaaaagcgttgagggtgaacgaagcgtacctttggaagatgtggcggcgattatcatcacgtccttctctgcgtcgatccattcgaagctcttgctcgaagccgcccgacacggagtcggtttggtgatctgtgaaaattttaaacccgcctcgctcgttcttcccgcaaaccggtcgagcgataccttactgacgaaatcccaagcctacatttccgctcagcttaaacagcggctctggcacaaaaccatcgacgcgaagtgcatgaatcaatttagcctcgccgccgaattggcacccgacgacgagcgattagcgcgtctggaaaaacttgcacgaggccgctttcccgcaaaagaagcagaatgcgccaaggccttctggcggatctacgccgatcacgtcgcggaaaccgatgattttcgccgcggtcgaaacgaaggcggagtcaactgcctgctcaattacggttacgccgtcctgctttccaccatcctccaaaacctctttgccattggcctggatcccaccttcggcatttgccacgcggtgcgggaaaactcgacacctctcgcctatgatctcatggaaccctttcgaccctgcgtcgattggcgggtcgcacaatgggtgaaaaaccatcgcggaacagaagactgggaagtaacccgcgagttccggcaatgggtaaccggttttcctttagaaaaagtcgactggttcgaactcaccctcgacatccgcggagtgatcgaaggcatgactcgctccttccgccaagccgtcacctccgcacaatccggaccgtaccgtccatggacccgaaccactacaaaatgggatggctaatggtcgcctttgacctgccggtcaaaacgaaagaagaacggaaacgggcaaccgacttccggcaatttcttctcgatgacggcttccaaatgatccagttcagcgtttacgctcgtccttgcgtcacttttgcccgccaggaaacccacctccgccgcatccgcctcgccgtcccgaacgaaggttcaatccgagccatctacatcaccaaggcccaatgggagaaggcatacatcatccacggcaagcccgccgtcgaggtaaccgccgaggaaatgccggagcaaatcatgttatggtgaattccgccgttttcgtcaaaacaacagaacttactcattatcagaggagaggagcgcatctaggatgcgctcctcagtttttgaatcaaggcaaagcaaagcaatcgatgcccagcgtgaaaaagtcaggatgcgctcctcagtttttgaatcaaggcaaagccaaaatgacgacaaggtcaaacttattctgaggatgcgctcctcagtttttgaatcaaggcaaagcatgagaaattatatgactcagcaggatatgaggatgcgctcctcagtttttgaatcaaggcaaagcggtcagttcgccaaattccttgaggaaggcaggatgcgctcctcagtttttgaatcaaggcaaagcgagacgatccgcttgagtgcggcagcttcgaggatgcgctcctcagtttttgaatcaaggcaaagcataattttcctcaaaatatcggcggactctaggatgcgctcctcagtttttgaatcaaggcaaagcaagagcctacgctttgttgcacgctacatgaggatgcgctcctcagtttttgaatcaaggcaaagcaatcacggatcgcttaagcaggatctaggcaggatgcgctcctcagtttttgaatcaaggcaaagctcaccgcctagtaaattcgctgcaccgccgcaggatgcgctcctcagtttttgaatcaaggcaaagcttttacatttacattatctttttcatttggaggatgcgctcctcagtttttgaatcaaggcaaagcatggaaggatgacgcgctcgcctcgatcgcaggatgcgctcctcagtttttgaatcaaggcaaagccggcccgatcttccaaggtcaggatctcaaggatgcgctcctcagtttttgaatcaaggcaaagctctcgtgctcgctgtgctcaagcggtgagaggatgcgctcctcagtttttgaatcaaggcaaagcaacccactgaccggcgagctggaagtgggcaggatgcgctcctcagtttttgaatcaaggcaaagcgtaataggtgcctggacacgcgtaaatcgaaggatgcgctcctcagtttttgaatcaaggcaaagcattgttatcatcagtggcgcaccaaagctcaggatgcgctcctcagtttttgaatcaaggcaaagctacaccgagtggcggtatcgatgggacgtcaggatgcgctcctcagtttttgaatcaaggcaaagcagctaaacgaaaaacctactccgaaaagctaggatgcgctcctcagtttttgaatcaaggcaaagcgaggctgtgcgcgtctttaacgataacgcgaggatgcgctcctcagtttttgaatcaaggcaaagcgacaaagctggagaggtcactgatgcgaagaggatgcgctcctcagtttttgaatcaaggcaaagccgtatgggaagccgcccgccgcaaatgggcaggatgcgctcctcagtttttgaatcaaggcaaagcttagccatccgaccgacccgtcaaaattgaaggatgcgctcctcagtttttgaatcaaggcaaagctgcggagtatcggacaatgtgagaatctcaggatgcgctcctcagtttttgaatcaaggcaaagcaacgtctgcgaaggccacgaaagatgagctaggatgcgctcctcagtttttgaatcaaggcaaagcttgggccaagaagattgcgaaggaggcgctaggatgcgctcctcagtttttgaatcaaggcaaagctgcattcgcggatggcgatccgacttattgaggatgcgctcctcagtttttgaatcaaggcaaagcaaagtctggtcaggctgctggtcaggcaccaggatgcgctcctcagtttttgaatcaaggcaaagcgccctttttcttcttctttttcttgtcggtaggatgcgctcctcagtttttgaatcaaggcaaagcatccaccatggagtccggcggatttggtttaggatgcgctcctcagtttttgaatcaaggcaaagcgctggcgagtggcatggactccattgccgcaggatgcgctcctcagtttttgaatcaaggcaaagcaagatcacctttgacatcgcggaattcccgaggatgcgctcctcagtttttgaatcaaggcaaagcggaaagcctctcagaagacagcgccgaagaaggatgcgctcctcagtttttgaatcaaggcaaagctttccagcggaggtcgctcgctatctagaggatgcgctcctcagtttttgaatcaaggcaaagcctgctggccgttgacctcgacgatggcattaggatgcgctcctcagtttttg

SEQ ID NO: 1780 - DNA, 14752 bp, synthetic construct
  misc_feature 1..14752: note = Synthetic
  source 1..14752: mol_type = other DNA
gtagcggttctccttggccagctcgatggcgtcgagggtctcggtgagcgagccgatctggttcaccttcacgaggatggagttcgccacgccgaggtcgatgcctttgcggaggaagctcgtgttcgtgacgaagaggtcgtcgccgacgagctgggtcttgtcgcccatcttctcggtgagcagcttccagccgtcccagtcgttctcgtcgcagccgtcctcgatggagatgagggggtatttgctttgcagttcgatgtagtagtcgaccagttcggcggcggtcttctcggatttgtccgatttcttgaaaacatatttgcccttctccttgtcgtagaactcggacgaggccacgtcgagagcgatgaagatctcctcgccgaacttgtagcccgccttttccacggcttggccgatggcgtcgagggcgtcgaaagcggagtcgaggttcggggcgaagccgccctcgtcgccgacggtggtggtgaggccgcggtccttcagcaccttcttcagggcgtggaagatctcacagccctgacgcagcgcctcgcggaagctgggggcgcccttcggcacgatcatgaactcctggaagtcgatgggggcgtcggagtgggcgccgccgttgatgatgttcatcatcggcacggggaggaccttcgcgttcggcccgccgatgtatttgtagaggggcaggcgcaactggttcgccgccgcgtgggccgccgcgagggagacgccgaggatggcgttggccccgacgttcttcttgttgggcgagccgtcgatctggagcatcagcttgtcgatggaggtctgctccgtcgcgtcgaggccgacgagttccggccccagcttctcgttgaccgcctcgactgccttggacacgcctttcccgaggtagtgggaggcgtcaccgtcgcgcagttcccaagcctcgtgctcgcccgtgctggcgccgctcgggaccgcggcccggccgatcgcgccgccgtccagttcgacatcgacttcgacggtggggttgccccgggaatcgatgatttcgcgggcccggatgttggtgatggtcgtctcaagcatggtgggatgtctcgtttagtttgcggttgttttggaaatcttcaatataaaaacaactgaaattattgctgttccaagcatttgaagaggtcgggtcttctaagcgaaacggagtcatttgcaagcagcaaacttgccattccgccttgtggtcggggggatcgggcgcgggatcttggagtgaggcggcatgacgccgctttccccacagggcgacatgtcgccccggaacaaagcgcggacatgtccgcgcactccaaatgttgtcgcatcgacgcatcaccgctgcccccacgggaggacgccacggagtctctcttggaaaagaaccagcgcgagaaggagcaggatggtgatgccgagactgacgtagccgatgatgaggccgatcgcgccgagggtgtggccgggggcgggctggaccgggctgtggcgggccttggcgagggcggtgtgcccgcagatgatcgccagcggggcgaagaccgggccacccacgcaggtgacgatgctgagcacggcgctgacgatggagaccgccccccaaatcggcgaaggcggcaggtcgggaccgtcgtcctcgtcctctttcgctttgtccttgctcgcaggctcgggatcgattgcggcacgggcagaccaagcggcgacctccgctcccggttcgagcccggcggcgggaggcgtggaagtctcccgagggggggcggcgtccggtctctcctcggcgggcacgggcgtcggagcctccttcggcggcatctccggggggacggggaggggatggagcgggtcgtcgggcggcctctggccggggaaacggatgtccgacgagcagaccgggcattccaccgtggttccgtaaaagctctcgtcgccggacactttctgtccgcatttcgggcatgccactttgatcgtcgccatcggcagggttcggggtttgcgctcgcgccgcactagggaagccgaaacccgccgcgctgcaaataatattcgcgattccctcggtcaccggagtcttcgccgacaccggccatgagggaggggatgtggccgaagcgtcgagagggtgccacagatcgcttgaattcagcatattcatgccgcatatttgtgcatgagaaccacgatggtgatcgaagacgaactcgttgtctcggccaagaagcttgcggcggagagggggtgcagcctcagcgccttggtcggagacgcgctgcgcgctctgcttgacaagggcgagcggcccgccattagccatccttttcggctccccgtgttcgacggaggcggcaggagggtcgataccccaccgtcggatttcaggaaactggcggaggatgacgaattgaacgcgttccgccaatgacccttttcgatgtcaatgtgctgatctatgcccatcgcgccgatcagcagcatcacgccttctaccgcgaatttcttgaaggcctcgcgagcgggccgcaaccattcggcctttcgatcctgaccgccgtcgggttcgtgcggatcgtgacccatccgggttttcccaatggcccgaccccgctcccgcaagccatctcggtcgttgaaagtctcgcccaactcgactattgccgctggctccttccaagccgccggaactgggagatcactcgcgagctatgctcgaagtgtgcttgcatgggcaagcaggtcgccgacgctcagcacgccgccatcgccatcgagcacgccgccgagtgggtgacacgggacacggatttccggcgcttcgaaaagcaagggctgcggctgcgcctcttggagccgtgagaggcaagaagaagacggggaagggcgatggattccgatcaatgaagatactcaccacttctcgggaaatcgagtccactctcgaacgactcatcgtcaaatcccgaagcatccgatgggcggttgcttgggcctccggcaaccacccattgtttcgactgcttgaaaagcatcggaaaaagatcgctcagcttacagtgggaatccatttttaccaaaccgactcgcagttcatcgaatccttcatcgaccatgcggaggcgaggtttatcatgaatccagatggagtcttccacccgaaactctattttttcgatttcgaagacggcgggtggcaatgcgtcttgggcagtccgaatttcaccaaaggggcgttccttgcgaacagtgagatcgccgtccatctcagcagttccgacaaagacgcctccgaatcgctcgcccggatcaaaggagtcctgagacaatatcgcgaacaaggaaagcagctttcccccatcgatcttgagagataccgctcaatccgccaactccagcagcgcaagcttcaaactctttcagggacctacgcgagcgctgatggaactcatcgcaaaagaacttccccgctcgaaatcccgctgtttatgaacagttgggaagaatattttgcaatgctgaagcgcaaggggaaggaggagctcgaatcccgttggaaagttctcgacgaagcaagacgtctgttcgccgttcacggtcggtttcattcgatgccaatcatagaacggcaggggatcgcaggcacgatcaatggggaaaccttggattggttctggttcggaagcatgaaaggagccgggttattccaacaatcggtcaaccggaataacaggtcgctttccgacgcccttgaggagataccgttcgccgggaccgtgtcagcgaatcattatgagaacttcgtccgtcatttcatcaaggcgtttcgaaaaccgggcattgctactggaacaaggcttctggcaatgaagcggcccgattattttgtttgtctggattcgaaaaacagacgcgagctctgcaaggcgttcggaattggtcagaacgtgacgctggagagctattggggggagatcatcgaacgaattacggagtcgaattggtgggtctccccatcccccaactcaccttttgaaagacgaatttgggagtgccgggccgctttccttgatgctctctattacgacccctgactggaatatcacggaattcagcagaaccgagggcaccgcttgaaacgggtcagctttggcaagtcgctcagcggacaacgtcccttcacccctccagaatctgctccaacacgtagggcaaaatgcctccggcgttgtagtaatcgacttccgccggggtatcgagacgcaccttcagcgggatcgagaggctcgtcccgtcgctcttgtgggccacgagggtcgcggtctgcatgggcttcaactccccggcgatgcccacgatgtcgaaggtcgcgtcggcgaggtcctgcacctgctcgtagtcggcggggtcggcgaagttcagcggcagcacgcccatgccgatgaggttggaacggtggatgcgctcgaagctcttcgtcaccacggccttcacgccgaggaggcgcgtgcccttcgcggcccagtcgcgcgaggagcccatgccgtagtcctcgccgccgatgacgacgaggggcgtgccctcggactggtaggccatggaggcgtcgtagatgaaggtcggctgcgcccccgcgacgggcgcgatctcggtgtcgggtgtggcgactgaggccgctccgaaataccgggtgtagccgccctcgacgccgggacacatccggttcttgatgcgcacgttggcgaaggtgccgcgggtcatgacgcggtcgttgccgcgacgcgcgccgtaggagttgaattcggctttctccaccccgtgttcgagcaggtatttgcccgccggagaggtcggcttgatcgacccggccggggagatgtggtcggtggtgacggagtcgccgaagatgccgaggggacgcgccccgaggatgtcggtgctggagccttcctttttgtcgaagaagggcggggactggacgtaggtcgattgttcgtcccaggcgtaggtcgccccggtcgagccgtcgatctcggcccacttcggattggcggtatcgacgttgccatagagcttggcatagacttccggcttcagggcggcgtcgagctgctcgcggatctccgcttggctgggccagaggtcggcgaggaagacgggttcaccgtcgcggtcggtgccgagaggctcggcggtgaggtcgagatcgacgcgtccggcgagggcgtaggccacgacgagcgggggagacatgaggaaattcgcccggatcgagccgtggacgcgggcctcgaagttgcggttgccggaaaggaccgaggcgcagacgagatcgcccgccttgatcgcctcctcgatggcggggtggagcggcccggagttgccgatgcaggtggtgcagccgtagccgaccgtctcgaagccgagttggtcgagttccttctggagtccggtggcctcgaggtagtcggtgacgacgcgcgaaccggggccgagcgaggtcttcacgaagggcggcacggtcaggccgcgctcgttcgcctttttcgcgaggagtccggcggcgagcatgacgctggggttcgaggtgttcgtgcagctcgtgatcgcggcgatgaggacggagccgtgctggatccgcgtatcgacgctgatcgcggtgatggtctcgcccgcgacgagcgggttctcgaattcgcccgccggggagtcgaggtgcagggccgcgacgctgccgcgcttcgcctcgtccacgccgaagccgccggaagccgccggggtggtgagcaaggtgttgaaggtctcgccgagcgcgggcacgtcgatgcggtcctgcgggcgctttggtccggcgaccgccggcacgatgctggcgaggtcgagttcgaggaggtcggtgtagtcgcattcgccctgaccggggatgccgaagaggccctgggccttgtaatagttttccaccgtggcgtaaagctcctccgaacggcccgtgccgcgcaggtaggcgatggtctcgctatcgacagggaagaagcccatcgtcgcgccgtattcgggcgccatgttcgcgatggtggcgcggtcgggcagggagagcgccgttgctccgggaccgaagaattcgacgaatttcccgacgacgccgtgctttcgcaggatctcggtgacgcgcagggtcaggtcggtcgcggtgacgccctcgcggagttcaccgtggagatagaccccgacgacctcggggacgaggaaggtgacaggctggcccagcattccggcctcggcctcgatcccaccgacgccccagccgacgacgccgaggccgttgatcattgtcgtgtgcgagtcggtgccgacgagggtgtcgggataatagacgccgtccttggaaagcacgcctttggcgaggtattcgaggttcacctggtggacgatgccgatgccgggaggcacgacggagaaggtctcgaaggcctgctggccccatttgaggaactcgtagcgctcgcggttgcggatgaactcgatggccatgttgcggtccagcgcggcctgcgaaccggcgaaatcgacctgcaccgagtgatcgacgacgagatcgacgggcacgagcggctcgaccttcgcggcggcggctccgcgggccacggcggcgtctcgcatcgccgcgacatcgacgaggagcggcaccccggtgaagtcctgcaagacgatgcgggccacggtgaaggggatctcgtattcgccgggcgatttcgcgttccagttggcgaggttgcgcacgtcgtcctcgcgcaccttgcgcccgtccacattgcgcagcaccgattcgaggacgatgcggatgctgacggggaggcgggaaaggttcggggccacgccggattcggcgagagcgggcaggctgtagattttgccctcggctccggaaccggtggtgaaggtgcggacaacgtcgaaactcatctgggtcggtcgatcaagtggtgtgacagggtaaggtcgcggaccgaaccctcttgggtcgcgagggtcggaaaacgcggccccatctgtaaagcacgatccgcgccggggcaagcgcggggattcaggcgaaaagggcggcgatggtcgggaatgtctaccgggttgcgttggggaggggagggtgtcaggttcgccttttcccatgccctcgcgcgaccatcccatctccgccatcgacgaaccgctccgcatcggcgggaaatggttccgtgccggggaggaggcggtggtggtcaaggcggtcgccttcggcccctttcccgccggggcctttcccgacgagggacaggggcagctccaccgcattcgcgaggagttgggggcgaacgcgttgcggctctacgagatcccttcgctcgacttcctccacgcctgcgccggggcggggctgcgggctttcgtcacgatcccgtgggcgcagcacgtcgattttctgaaacgccgcagcgccttggccgaggctgaccggctcctcttggagacgatccgccgcttccggggacatccggcgctcgcgggctatttcgtcggcgacgagatcgagtccaccctcgtccgatggatggggggcgggcgcgtcgtcgaacagatcgaacggctcattgatctcggccacgccaacgatcctgacgcccttttcgcctacgcgaactacccgggcaccgaatacctgctgccgcagaaccaagatttcgtggccttcaacctgcgcttcgaggagcgccccgcctatgcggcctacctcgctcggctccagaatctcgcgggagacaagccgctcttcctctccgaattcggcgtcgattcgcgttcgcacggcgaggaggggcaggcggagattttgaaatgggcggtggaggaggccgccgccgccggggtcgcggggacgacgctcttttcctggagcgacctccggcagcgcggcgcgggtgcggagagggaaggggatttcggcctgacccgcgaggaccagttggccaaacccgccctcgcggcggtgcgcggggtttgggagccgctgcggcggcccaccgacacggtcgtcccggcccggacgcctaggatttccgtgatcgtctgcacggatcgcggcagcgccaccttggtggaatgcctcgattccctcgtcgcgctggactaccccgatgttgaaatcctcgtcgtgaacgacggcggcgacgagcgcgttgccgagatcgccggggcctacgcgacggtgcggcatgtcgcgacggagcacgaggggctcggcgcggcgcggaacaccggcgctcgcgaggcctcgggcgaaatcctcgcctacaccgacgacgattgcgtcgtcgatcccggctggctgcgctggatcgcggcgcagttcgaaaaagaccctgcgctcggcggcgcgggcggcccgaacctgccgcccccgccggagaacgcgacctgcgcccgggtcgcggcggctccgggcggccccagccatgtcctcctttccgacacccgcgccgaatgcctccccggctgcaacctcgcggtgcgtcgcgaggtcttcgacgaagtcggcggtttcaaccccgtcttccggacggcgggggacgacgtcgatttctgctggcgggtcctcgccgccgggcacgggctcggcttccacgcggcggctttcgtctggcaccgccgacgagccaccttccgcgcctacttccgccagcaggtcggttacggacgcgccgaaggcctgttgatgtcgctgtatccggaccgcttccgcggtgtcggggggatcgcgtggcggggccaggcctatgtggcgcggcggcgcttcggggcttccgtccaccacgggcgctacggcgaggaacccttccaattgctgcgtcccggcggcgattcatggttcggcgaggtggccctgcacatcctctggtggatcgcgatgctcgccttcgccatcggcgggatgttcttcgccccgctgctcgtgccggcggggatgatgctgttcggcaccgccttcgttgcctttggccgggcggggcgctcgcccatcgcgccggaacatgacacgacgctctcgcgtttcgccctcgcggggctcatcctcgcgcagggcgcgctgcggagcggcgcgaggctgttgaaaggctggcgtcatgcgacttggggccgcggtctgcggactgtcggcggcactgcggcggccaccctcgccaagggctggtggaagctcggcgacgagcaggaatactggagcgaccggggcgtcggacgcgaagccctgctcgccgcgattttgaaggccttccccggagccgaggacgacgccaccgggaagaccgacatcatcctgcggcgcggctggttctggaactgggccgtcgtcaccgcgacggagcgccacgggagcgaggcgaggctgacccgactgcgcctcctcgcgcgaccgcagccagtgacgaggatgatcgtgctgccgctggcggtcctgagtctcttcgtggtgccgatcgccgggggctatctgatcacgaagggattttcaaaagaagtcttggtcgttttcgccgcctacgccgccgtcggcgtcgtttcccgcttcttcatgtggacaaagcgaccgcgtttccagcgcatcgccaaggaggcggggttggaggtggcacggccctcctccgtcgcggagactcggatggactcgtgagagtttgctgctttcgaccttgggcggaaagctttcgtaaaaaagacggccaccccgtcgggtggccgtctgagaaaagcacttttgagcacggtgtgtcggaacgacagggaagcggcttgtgcttcaaactttgtcttgattcggcatcagtttgcttgccctttccgaggtcgtcaaacgcaatttcgataaaattacaaaatttgatcgacgtttgcgcaaaaaatttataaaacttgcggcattcaactcttgtctatggcagttaccctcacttttgacatcggatatgcatcgatcggctggtgcgtgctttccgctgaaccggagacgcaacatcccgaattcctcggtacgggtgtcgtcacctttccgaccgacgactgtctcgcctcccagcgccggaaccttcggcggacgcgacgccatattcgctccactaggcatcggatcgagcggatgaagcgctggctggtccaccggggattcatcggacgggaggaagcggatctgccgggcgacgcttcgcccttctttctggtggcccatgcgttgcagggcgggagaatcctgtccgctctcgaactctggtccgtgcttcgttggtatgcccacaaccggggatacgacgggaactcgcgctggtcccgagaggaggcggatccggatgacacggagaaggagaggaacgccatggccttgatggagcaggccccggccacttcgacgatggcggaaacggtgtgcaagattctgaacatcgatccggcgaatccgaagaagcgttcttccgaaaagccatacaaaaccctcaacgccgcgtttccgaggtcggtggtcgtcggggaggtgaaagagcttctgcgtttccacttggacaaactcgaagggttggatgcaaagaccgtccggtttctgatggcggagagtcccttgaccaaggaggaccgcgccgaattggaggccgccgacatccgtctgccgaagcgctaccacggcggactgcttttcggccagctcgtcccccgcttcgacaaccgcatcatctcccgctgcccgatcatgtgggcggacgaatacggcaaggccaaggatgcgggcaaatccgacgaagaggcgaggaagcttgccgacaagttcgcgaaagttcccgccgcgaagtgtccggagtttctggagtatcgcttcgcccgtgtcttggctaacttgaaagcagacggcgagcctttgtccaaggaactccggcggcatttgtttgatcgtgcgaaggagcggggacggtttacggaagcggagttgcggaaagaaatcgaagcgcaactcggcaaaatcgggacgaacttggaggcctatttcaagatccatcccgatgccgagaagcagctcgtgatcgatccggcagtggtgttgccgcattccagccgcgttctcaaaccgatctggccgctcctcggcgaaccggcgcggaactcagccttgcgcctttggagccggggaaaagcggtctgcccggcgcaattgctggaactcgcgcataacggcggagatcccgagcaagccgaaacggtgctgcgtgaacattttgccaagctcccgaagaaggaggcgaatgccgccagcttcgacgcattcctgctgaagccgatgcgtgccgactatggcagcggcagggcgccctattccagagtcgtcctgaaacgagtggtggaggaagttctggagggctgcgatcccacgaaaccagcgcggtccgatgcgaaactggacggggaggacaaatcggcggatggcgtgctttatccgctgatggatccatcgtcgagagtccgcgagctcatggcggagcgtccgctcgaccagctcaccaacaaccacctcgtccgtcaccgtctgctcatcctcggcaggctgctggacgaccttttgcacgagttcgaaatcggagctgaggacgagacgcaggtcgtggtcgaggtggcccgcgagttgaaggagttttcgggcatgacggtgaagcagatcaccacggaaatgaacagccgtctcaaaaacttcaaggacgcggtcgcctacttggaggacaatgcgccgaacctcctccaggaatcgtcgggacgtgggggaattatccggaagtgccgcatcgcgatggatctcgactggcggtgtcctttcaccggcgagaaatacgacgcccaggacctgccgaagatggagcgcgagcacatcattccctacgccacgcggaatacgaatgccctccacgccttggtcctcacttggccggaagtcaaccggatgaagggcaaacgaaccgccaagcagtttattctggaatctgccgaactgccatcgcgcgaagttccgaactccaagcgcaggctcaccttgttcaccccgaagcaatacgagaccttcgtcgaagggctcgaaacccgaggacatcccgacgacgcccgccgcaagcgtgcccggaaggccttgctcgacacggcggagttcgaggacaaggatctcggtttcaccgaagggcagctcacccagtcgagccagttgatgaagctggcgatgggcgagatcaagcggaagtttccgcaggcgctcgtcgatcccgtacccggcccagtgacggcggagatccggaaggcgtggaagctgaccgggacactggcgttggcttgtccggaagtgctcgacgagaatggcaatgtcaggcccaaggacgaaatccgcggcctgacccacctgcatcacgccctcgacgcggcgattttggcgctcgccgcccactacctccccttccgcagtcggggcaaggaccagaaggggaagatttggcaggccctcctcaagcggaaccagaacgatgaggagaagcgtttcctgatgaaatttgaatgctgcgtggaaattccgaaaaccgggaagaatgccggcaccgtcgtcggactccgggatctggacgcgaacgtgaaaaacgccttgggtcgctccttggccgaaggacgggtaatgcagcatgttcccgccgaccggtcgggggcgaaggcggagcttacgacttggagggttctcgaaatcgaaggcgaaggggaggaggctcgggtaaagctacgtcagcgctccagtgaggtgaaggagggagtgcggaaggttagtatcaaaactccacccccaaaacgagcggggaaattaatcggtctcaatcccaagggcggtcatggaaagctgaagtcgatcaagggcgccgtggtgatcgaagagaattacggtctcgcgctggatccgaaaccgaccattattccctttttcaatgtctctgctcggttacgcgatcagttcgagagcaatggctgcaatcctttccggattcttaggtcggggatacaaatcatccttcaaggacaaggagaacggaacggtatctggacaattgcgacagtccaagcctcgctaaaaatcgatcttgtgaggcccggaacggttgggtgccctaaaaaaggaaattccgtttggcgtgaagtggctgtgaaaggattgcttgcgaaaggaatcgaaatcctccccctgaaatatacagcgtatccctcagagcggtaacaagagatgtcctaccatatcgtcagcatcgacgccccggattgctccttgtcctgcaaggacggccagttgacctgccggagccgggaaggggaccggagccttccgctcgaagacgtggcggcgatcatcatcacgtcattctccgcctccatccactcgaagctgctgctggaggccgccaagttcggggtcggcctggtgatctgcgagaactacaagccggcttccttggtcctgcccgccaaccgggccagcgacacggtgctcacgcgggcgcaagcctacataccggttcaactgaagcagcgcctttggcgcaagacgatcgatgccaagtgccagaaccaacacagtctcgcctgcgagatcgcgccgggagacgagcgcttggagcgcctcggacaactcgcccaaggccggactcctgcgaaagaggcggaatgcgccaaacttttctggcggatctacgctgaccacgtcgccgagacggacgatttccgccggaagagggatggggacggccccaatcccctgctcaactacggctacgcggttctgctgtcggcggtgcttcagaacctctttgcggtgggactcgatccgaccttcggaatttcccacgtcacccgggagcggtccactcccttggcgtatgacctgatggagcccttccgcccctgcgtggactggcgggtggccaaatggatcagggaccatcccggcgagaagaatcccgaagtcaccaaggagtttcggcactgggtgacggcttttccgctggaagctgtcgattggttcgagttgacgctcgacgttcgaggcgtgatcgagggagtgatccggtccttccgccaagccgtgaccactcgtcaatctggcccctaccggccatggactcgaaccactacaaaatgggctggttgatggtcgctttcgacctgccggtcaaaacgaaggaggaacggaagcgggccacgggtttccggcagtttctcctcgatgacggcttccagatgattcagttcagcgtctacgcccgtccttgcgtgacctttgcgaggcaggagacgcacctccggcgcatccgtctggtggtcccgccggaaggttcgatccgcgccatttacatcaccaaggcgcaatgggaacgggcgtgcatcatccacggcaagcccgcgaaagaggttccggcggaggaaatgcctgagcagatcctgttgtggtgatgcttcccgttttcgcgagatcgacgtaagtggctgaaaatgaattccaagcggggcacgcactgtgccccgcttggaatctgaatcaaggcaaagcggaggcaaccgatggaccgcccggcaaataactgtgccccgcttggaatctgaatcaaggcaaagccttcctacctttcccctt

SEQ ID NO: 1781 - DNA, 14410 bp, synthetic construct
  misc_feature 1..14410: note = Synthetic
  source 1..14410: mol_type = other DNA
ggacggtttggataccgggggtgatcctcctgttagcatggatctgccgtgttgggtgatggaagtggagccacccggaaccaccgatgtttcgcgagtggcggtgtggcaggtcgagccgccgcgccggccggtggcgggagctgagaccagcgtgcgcgtcgtcctccaagggtggggcgtcgatggcagggatattccggtggagttgtggtgcgatggccgcaagctgggtgagaagcgagtgcggttcacccgccgcggcgatgtggtggaggcgatgttgccgctgaagcccgagaaacccggaagttacccctatgaaatccgcgtggaggatccggcggccgatccctcggcgaaatcccagccgtttgtcatcggggtccgccaggaaggacgcagtgtgttgttgctttccaataccatcggcttcgaagggaaattcctccgccgcgctctaacaaccgaccgcaacgtgcgacttgatagtttcgcccgctggcaagacggtcgatgggctagcttcggcgatggtggaaatgccaaggataccctggatttgagtgcatcatcgctggcatcgcgtgccgccgtggttttggcggatgtcagtccggaatcgctcaatcccgcgcagtggcaggccttgtccgactacgctggcaagggtggcggacttgtggtgctgggcgggcccaatcttctggcatcaccgcaggccgcgtcatcgatcggccggattcttcccgtgccgactcccgcaccacatcacgacggacggttcggggtgaaactcaccgatgcgggattgcggcatccggtgtttggtcctttgtttgagtccgtgaaggattttcccgcgttgcagggcgcgaactacgccagcggcattgccggaaacgcgcaagtgctgatggagagcatcgccgatggtcaatcccatccattggtcgtggtgaaacaacaaggcagcggtcgcgtggcagtagttttgagcgatacgctttggcgctggcgcgtcggcgctccgggatggaatgccaggctttccgcctatgacacgttctggagccagatgctcgactggttggcaccggagcaggaagggctgcagagcggtggtcgcatcgaactcaccgcagaccgtccgttttaccggcagggcgacaaggttgccgtgcttgccgagtggatcggcaagggcgcggctccctatcagactctcgatgcgacgatcaagctcccgtccggcaccagcagaccgctggccatgcaggcatcggtttggcaaaacccggagggccgccgggtgaccgggtttcgtagcgaggtcagcgcggatgccaccgggattttcgaagtgggagtccacgccgcatggcagggtggtgaggcggattcctcgatgcgttttgccgtggcttcgtcaacggaggagcgccgtggtgaagctccggatgccgaatttctccgtgaaatcgcaaggcaaagccatggtgcctatttcacccggaacgatggggaaaagtggttggagtctctgccgaagccgcagcgccggagcgagcgcgaagtggtcaccgatgtttggaatcacccgattatcgcgaccctcttgttagcctgcctcagcgccgagtggtggctccgccggaggagaggtctggtttgagatcgaaaacagaagaatctgccacgaaatgaatcgttgagtcatttggcccgcacgatccaatacatgcaacggccggaatgtgcgtatccttttgtcatctccggatcacccagaccggcacaaatgccaagtatcattggtcggtttatgagctggatgttttccgcaagaactagaccgttagccgaaagtttggcctcgaattaatactatgtttcacacatcattggctttcttatcggaatcgacgctcatagagcgacgctacaatcgattgaagagttgccagaatcgatcactctgctggcacgtgaggctcgaaggtcatggcgcgttcgtgttcgcgggctttggcggcctttttcgcgagttgatagaaatgactttgggcgcggaaggattttttgcccttggttttcgcgatgcggagcgaggtgccgtccggttggatgcgggatgcctgggtgttgtcttggaagaaggcgtcgaggatacggaccaggcggcgtttcagtaccgggtcctcgatggggatcatcagttcgatgcgtttttccaggttgcgcaccatccaatcggccgaggagatatagactttcgtgtcgccaccttggtggaaatggaagatgcgtgcgtgttcgagaaagcggtcgatgatggagacgacctcgatgtttttcgagtatttcgggtcgccgggtttgaggcagcagatgccgcggacgttgagtttgatttcgacgccggctctggaggctttgtagagggcgttgatgatgtcggggtcctggagtgagttcactttggcgacgatgcgggcgggcagtccctgtttcgcccgttcgccctcaccggtgatgaggtcgagcagggtgcttttcatcgcggtgggggcggggatcaggcgctggaagcggagcagcttggatcttcccgagacggcattgaagaagagcgaggcatcgttgccgtattccggtttgcaggtaagataggagacatccgtgtagagcctggaggtggtttcgttgtagttaccggtgccgagatggacgtagcggcggaggtggcctgactcgcgtcggacgatcaaacagattttcgagtgggtcttgagtcctttcacgccataaacgatctgggcaccggcgcgttggagttcgtccgcgcggtcgagattgcgggcttcatcgaagcgcgccttgagttcgacgagagcggtgacgtgtttgccattttccgcggcggtgatgagtgcgtcgatgatgcgggatttgcgggcggtgcggtagagaacttgtttgatggccacgacatcggggtccacggctgcctcttccagcaggcgcagcacgggttcgaacgattcatagggatggaacaacaacaggtcgccggaggcgatggtttcaaacatcccacttcccggcgtgatcgcgggagacgcttggcccggccaatcctcggcgcgcagatgttcgaatccggtgaggaatgcgagatccatgaacgaggcgagtccgggcggtccatcgatccgatagatttcctgggttcctgcggcggtgacttcctggatgacgcgggcaaggtcctgtggtgcatcggcgcggagttcgaggcgcacggtttccgcgaagcgtctggcggttagaacatcctccatttcaccggcgagatcgatggcatcttcttcctggacggcgatgtcgccattgcgtgtgatgcggaatgcggtggtggcggccacggtttctccggggaaaaaccgtgcggcgtggaaggcaacgagatcctcgacaagcaggaaggcatggctgtggccatcggatgaaacgggcacgcggcggccgatggtttccggaatcgggattagcgcgtaccgggtgttttctgtttccgggtccagcaggcggcaggcgacgacgatttggagtccgggcactaccggtggcgcgtcgccttcatcgacagccaacggagtgagcagtggatagatcaggtcttcgaatgaggtggaaacctgggaggattgttcgagcgtgagatcctgcgtctgcatggcatggatgccggccttgcgcagggctggaagaagtgtgccgccgaagagagcgtattggtccgccgtcatgcgcagaatccgctgccgcagggctgttaggcaacgcgtaggggtgagaccggacgggtcgttggtcttgagtccgccgcgtcgcagcatcatcaacccgccgatgcgcacctggaagaactcgtcgaggttggaggcggtgatggcgagaaacttgatgcgctccagcagtggtaggtcgtcgcgcaatgcttcatcgagcacgcgctggttgaattcgacccaggaaagttcgcggttgagataaggaatggacatgggaaattttgaattttaaattttgaatgttgaatttccgggttgttcagttgtcttcgtcgatgatgacggctaggccgtagacttgttcgaagaggtcggccttggagttcatggcgaggcgttccacggcggcatcggccaggccgggcagacggagtcggagtttgccggattccctgcggatttcgatttgggaaaccctctgggcgtgggtgcgttcgagtgcatccgcgacgcggaggagcgctgcgagtttcgatacgcggatgcggtcgtcggtattgagggcggcgtatccggggtggtcgagcagcgggcaggaatgacggtggtaacgtgcgaccgatgcgacgatagcgacgtcctggcgatcgagtccgaagacttcggagttgaggatgaggtattccgagtgtttgtgatgggcgcgggggctgacgtaggtgccgacttcgtgaaggatcgcggcgacttggagcaagagtgcgtcgtgcggggtgagttggtggagatcgatgagttcgttgaaaaatctggcgcagaggttggcgacgtgttcgccgtggccggggtcagattggtatcggctggcgaggatgcgagccgagcggatgacttcctcggcaaaggcaccggtgagttcgcgggaggctaacagatcatggagcagtccttgctcgtattcgctgtccgggatgtggacttcatcgagtttgaatgattccgcgatggcgaggttgatttcaagggctggcagcagcgcctcagccgtctgatagtcgaggtggtagcgtttgacgagttccacatcgctcatctccgcggcatttgcggtgaattggcggagttttttgagtgggcaggcatggcccggtttcgcgagggctgcggcaacggattggatttcatatccgatcacgacgatgccatcgatgttgatgtttgagtaatcgaagcggatttgggcgagatttccgaagacatgttcgcggatgacgcgcagcagggtggcaccttcggcgtgggtggcgtccacagcctcgcgggtgcggtgggtgccgagacggtagctggtgtagcggacgatccggccgttctggaacaaaagggcgcgcgtgtttcccgggccgacatgcatcaccagcgtcgagtccttgcgcatcgccggaaggtgctggaggcggcggcgggttttcagatagatcaggcgggtcatctcgccatcgtcgatggtgccgacgcgcaatccgcaggcgatgcggatccggttcatgaccgtctcgtggtttcctgcctcgctgaagatgttgctggcggccgcgcgggtgaattcgtgggtcggcagtccgagttccgcgagtgatttttggaatcccttgatgatcgagacgacgcgctcggtggtggagaggctgatgttgccctggcggaaaatatcgcgggccacgggggcgggttgttggaggaaatcgatcggggtgagcgtgccgtcggctgacttttccgcgaccatcatggaaaccgagctggcaccgatgtgcagggcggtggtgatcgattgcgccgcagggtgcggtaatacaggtttccggattcttggcatcggccaatgagagcgtggaacggcggggttttcaatgccgaatgtgtgacagctctgtcgtgagacaaagcttgtcaatccggtggggccggtggataaagcggacatgccagtcagcggagctttggaacggtatcgggtgaaacccggaaaccgtgtggacctatcgaaaatcgatagcggggagaagtcgttatttgatggggcgaacaagcatgagttcgagccgcaattcaaggaattgcaggaccaactccagaaattgcagaaaatcctctattcgcagaacaagcaccggattttggtggtcatgcaggcgatggataccggcggcaaggacggctgcatcaagcatgttttctcgcacatcgatccgcaggggatccatgtccggtcgttcaagaaacccagcgaggaagagttgtcgtatgactttttgtggagggtgcactcgaaggtgccacaccgtggacaactggtaattttcaatcgcagccactacgaggatatcatcgcagtgagggtgaagaagattttccctgacgaagtgtggcagcgccgccagcggcacgtggtggatttcgagcgcatgttggccgaagaggggaccacgattgtgaaaatcttcctgcacatctcgaagggcgagcagaagcgcaggttggaagatcggctgaaaaacccggaaaaacattggaaattcaatccggatgatctggcggaccgctcgcgatgggacgatttcatgaccgcctacgaagatgtcatggccagcacctccacggaatacgcgccgtggtacattgtgccggccgaccgcaagtggtatcgcaatctttgcgtcgcgcgcatcatgctggatacgctcaaaacattggagatgaagcttccgtcgattgattggaacccgcaatcgatcacgatcgaggattgaacggggcgtcacggatttctatcagggcatgcgtcgggtgatgctgatggtggcggcgagtttgcggcagatatcgaggtgttgtgggtcggccatgatttccgcgagtgtccatggcaggcggaacctccagttgtggcgaccggtggtgccggggtagttgatgcgatcgtccaggctgaagagcgaggtgaccatcaatgaaacgtagcgggaattggagtcaaaaagcgctttgatgagacgtagccggatgccttcggtgaacggcggccacggaccatggccggacatcgggatgcctgcgaactccgagaggacgcgcagtgtgttgtgcgcgccatgggattgccaaccggaggcttccgtggggtgttcatggtgctgctggatgacgcgcaggcagccgcgccaaatcccgcagatcggatcgtgatcgtgggtggaaaacgtggcaaacgagttttccgggaaacaattccccggcgtcgggtggccgtattcattgcagtcccagtggggaatgcggaagccggcgatttccagatcggccagatgcggacgcacgtattcgggcacccagccgaggtcttcggcgatgacatccgcgtcgccagcggcttcgaggatcgctcggagtcgcacatcgccatcggcgcggttggcggctttgttttccatcgtgtcatcgggccgtaggaaccaccggggcaggcgtccgtcattcatcgctgccgcctgatcgtgggaaagtccgatgaattcttgattgcgctcgggcctccacgggaaggcatagatccgatagaatcccaggatgtgatcgagccggaacatgttgaaaatctctgtgagccgggcgatgcgttttttccaccagatgaatccgttagcctccatgtggtcccagcgatagagcgggattccccagttttggccccattgttggaaaaacggatcgctctggcccatgccctccggtggcgatccgccgcaccagtcgagatggaattccttgcggttgaagaagacgtcgcacgaatgccaactgatgccgatgggtacatcgcccatgagtttgacgccgcgcgtgtcggcatgggagcggaggtcgcgccattggcggaagcacagccattggacgaaggcgaaaaagtcgagtcggtaatcgagggtttcggcatcctgggcacgcagttttttgatgaaattacgggcgttttccggggtcttgcaggaattcggccattggtcccaggtcagtgattctccatggtgctccatcaggaatcggaacgagcagtaatcgtccagccaatcgttttctttggctttgaatttttcgaattccccggagaaatccgccggtgcctcatggaatttcgaccatgcgagttccagcagcgtgcgtttgacttgtcgcaccagcgtgtaatccaccccggatcccggtggggtcaccgtcagatggtcacgcgcttttgaaacctcgttttcactcagccatgggatcacggagggttccagcgtgagatagatcggatccagcgcggtcgaggatatcgcgctgtatgggctttcgtccgcgccgttttcattgatgggaagaagttggatgaaaccgatgccatggtcggccgcccagtcgatccattggcgcagggcgagggtgtcaccgatgccgaggtcgccctcgcggcggggcgagaaggcggggatcaagatgccggcaagacgttttaggggagagtgcacgcggcggatgttggcagcacatgggattccgtaaatgctgaattgcgcatggaattgatgagccaaacggcttgacgtggctacggatgttgttacgtttccggtatgacattggaattgaaagtccggaaggtggggaattcgctggggattgtgctgccaaaggaagcgctggcgcatttgaatgtgcatgaaggtgacgtgctgacgctgaccgaggcgcaggatggagtgcgcctcacggcagccgacccggagtttgccaagaccatggaggtgttctcttcgttgaatcgtcgctatcggaacaccttgcgtgagctggcgaaatgaaaacgccatattggatcacccgggaggaatgtctggcactgcatgacatgatgctcatgcattacgggggtggcacgggattgcgtgatgtcggtttattggaatccgcgttggcacgtccccggcaattgctggcttacagcaaagccagaatgacggatttcgctgcggcttacgtgtttggcattgtgaaaaaccatccattcgtggatggcaacaagcgcactggattcatgatgggagtgggttttctggaacgcaacggttgggatttttttgctcccgaggcagatgccgtgacccagacactgggactagcagcaggtgccatcacgcaggaagattacgcggcatggttggcgaaatggtctgttgagagggcggtagagtcataaggtagggcgtgaccgcggcttgaaattgtagcggcgtctctatgagcgtcgctgattttcatgggaagtcggtgtgccgtctttctggtttctttgaattcataaagaaaaaacggacaccccgtcgggtggccgtttttttaaaagcgcttttgataacgatgtgcgaagcagggaaacgctttgcgcttcaaactttgtcttgattcgcgagtgtttttgcatccaaccgtctttttgtcaaacagaaatttagcaaatcgatagattttctcgacgcgggtgttccatctgttatgattccggcaattcaaataaaccatgcctcttactctcgcttttgatattggctacgcatcgatcggttggtgtgttctttcctctgagaaactttccaaacagccgcctgaattccttggcacaggcgttgttacgttcccgaccgacgattgcctagcctcccagcggcgggatcttcgccgcacccgccgccacatccgttccactcgcatgagaatcgagcggatgaagcgttttctggtccacggcggggttctcacccgttccgatctcgataaaccaggccatcccgcaccgttcttgcttgcggcggcggcgttgcagggacaccgcacgctcaccgcatgggagctgtggaccgtcctgcgctggtatgctcataaccggggttacgatggtaattctctttggtcacgcggagaggaggagtccgaagacactgaaaaggtcagcaatgcatggacgctgatggaaactcacaaaaccaaaaccatgtgtgaaaccgtttgtgggtgtctcagcttgaatccgaaggaacacgatcaacgcatttcttccgcactcccctacaaaaccctcaatgccgcctatccccggaaagtcgtttctgacgaggtcgggcgattgctgtcacttcacttcggaaaaattccaggattggatgccgcagtcgtccgaatgctcatgagtgtatcggatctcggggaagaaactcgaaaacaactcgaaagtgccaacgtcagactccccaagcgctattatggcggtctgctctttgggcaacttgtcccccgtttcgacaaccgcatcatcgctcgttgccccgtcacttgggcgaaaacctatgatgaggggatagatgctggaaaaaccgacaaggaagcccgtcacctagccgataaattcgccaaagtcccagccgcgaaatgccgggaatatcttgaataccgtttcgcacgggtcattgccaaccttcgtgccgatggggaacctttgtcacctgaattacgccggcggatctggaatctcgccagcgagcgaggtagtatctcgcctgcggttctggagaaggaaatcaaagcggcccttggcaaagtttccaccaatatcgaggcctatttcaatcttcacccagacagcgtcaaacaacttgtcctcgatcccgcgcaggacgagttccgcaaggcaggaggaagagtctccaaactcgcgccgatttgggaaaaattgcctgattcaactcgcaagtatgcccttgatatttggaatcgtaatggatcagtttcgcttgcatgtcttctggagcacgctggagcaactccggaattggtcaagtcacttgactcagcattcgccgctccgaagaagggcaaaaaggatggtggaggctttcgatccttcgatgattatcttctccgcactcgtgtgactcccgactttccaagcgggcgcgctccctacgcgcgacccgttctaaaacaggtggtaacagaagtccttgcaggcctcgatcccacaaaaccggctcgttccacttccaaaccggatggggaaaataaacccgccgatggcattctatattcgacactagatccgacctcccgcgttcgacagctccagaacgaacgcccgctggatcaactcaccaataaccatctggttcgccaccgtatgctcatccttgatcgtcttctggatgatattctggcggaatttagtaacaaggacctggaggtggagcgcgttatcgtcgaagttgcacgggatttgaaggagttctcaggcatgaccgccaagcagatcgcctcggaactcaacagtcgcctcaaggattttaaggtggccgtggcctatttggagaaacatgctccgcaactggaacaaaatggcggcatcatccgcaaatgtaggatcgccatggatcttaactggcagtgcccgttcaccggcgagaaatacgacgcatatgacctgccaaaactcgaacgcgaacacatcattccgtatgccacacggaacaccaacgctcttcatgctctggttctgacctatcctgaggtgaaccgcatgaaaggtaaacgaaccgcccgccagtttatcgccgacaatgaaggcaaacaggttgatggtaaagccaatctctcgcttttcaccctgcggcgttacgacgaattcgtcgagaaacttgacacacgcggtcatcccgacgacgcgcgtcgtaaacgtgcgcgaaaagcactgctggccactacggacttcgaggacaaggaactcggcttcaccgaaggtcagctcacccagtctagccacctcatgaaacttgcgatgggtgcgcttaaactaaaacttcccaaagccgccattgatccgattccagggccggtgacctccgaaatccgcaaggcatggaaacttgtgggaacattgagtcaggcatgccccgaagtcattgattctaatggcgatgttttgcccaagaatgacattcgaggacttacccacctgcaccacgcgcttgatgctgccactcttgcgcttgcctcacattatttccctctccaatcccgtggccaagaccagaaggggaaaatctggcaagccttgctcaaacgccagcgcactgaggaagagaaaaaattcctgcgggaacttggcatcttcgtcacctacggtcgtctccgccgcgacaaggatggaaacccttacgaggagaaggacgtgcgtctcgcggatctcaaacccgaagtcaaaaacgcccttgctcattctctagccgagtgccgtgtaatgcaacaccttccagcggatcgctccggggctaaagcggaacttaccacttggggagttgtcgggacagaaggcgagggcgaagatgcccgtgtcactcttcgccagcggacttcgaaagtggaggatggtaaacgggttctcgaaatgaaatcccgcgaggaacgtgccggaaagctcctgggcaccaatcccaaaaacggcaacggaaagctcaaggatgtcaaaggagccatgatcatcggcgaaaactacggtctagctctcgaccccgaacccgtcgttattccgtttcacgatgttcaacagcgacttctcgaaattcgtgcggcgaatggtgggaggccggtgagagtgttgcggaatgggatgatgatccgcgtgagtaattggccaggaaaaaatggcatttggagaattctttcatgtaaagcgtctatgaagttggacttggcgaaaccgcaggagatcaaagccagttggagagaggtgttaattccatctttacttgtccgtggtctggacatcctaccccgatgttacactggttattctacgacgtaatgatgaagccaacatgtcctaccacattgtcagcatcgacgccccggattgctcgctttcctgcaaggacgggcagctcatctgcaagagcgcggaaggagagcgcagcattccactggaggatgtggcggcgatcatcatcacctcgttttccgcttccattcattccaagctcttgctggaagcggcgaaattcggtgtcggtttggtgatttgcgagaatttcaaacccgcgtcgctggtgcttccggccaatcgttccagcgacaccttgctcacccgcgcccaagcctacattccggcccagctccgccagcgactttggcacaagaccatcgatgccaaatgtcagaaccagcacagtctcgccgccgaattggcacctggtgacgggcgtcttgagcgtcttgggatgctggctcgcagccgcgcaccttcaaaggaagccgagtgtgccaagttgttttggcggatctacgccgaccatgtagcggaaaccgatgattttcgccgtcaacgggaaggcggaggccccaatcctctgctgaattatggctatgcggtgctgctttccaccatcttgcaaaacctctttgcggtgggcctcgatcccacttttggaatttcccatgtgattcgggagcgttccacgccgcttgcctatgatttgatggaaccgttccgtccctgcgtggactggcgtgtggccaagtggattcgcgaccatccgggcgaggaaaacccggaggtgaccaaggagttccgtcgctgggtgaccggatttccccttgaaaccgtcgattggttcgagctttccctggatatccgcagcgtgatcgagggcgtgacccgctcatttcgtcaggccgtcacttccgcgcaatccggcccctaccggccatggacccgaaccactacaaaatgggctggctgatggtcgcctttgaccttccggtcaaaacgaaggaagaacggaaacgggctaccgatttccgaaatttccttctggatgacggctttcaaatgatccaattcagcgtctatgcccggccctgcgtcactttttctcggcaggaaacccacctcaggagaattcgtttggccgttcccaatgagggttccattcgtgcaatctacatcaccaaagcccagtgggaaaaggcgttcatcatccatggaaaacctgccgtgcctgtctctgccgaagaaatgcctgagcagatcatgctctggtgagtgaattccgtttacgggattcagttgtaaagtattgaaaatgaatgccgaagagtgcatctaggatgcactcttcggattttgaatcaaggcaaagctgcttggcggtgctcttgtttacgcagatgaggatgcactcttcggattttgaatcaaggcaaagcagcatctgcattaccattgcgcggagttggaggatgcactcttcggattttgaatcaaggcaaagccgtaaggccaagcttcagcgtctcgatcataggatgcactcttcggattttgaatcaaggcaaagcagctacggcctgtaatcgtgagtccatatcaggatgcactcttcggattttgaatcaaggcaaagctgtgacggtgttgcggaaaaatagaacgtgaggatgcactcttcggattttgaatcaaggcaaagcgc

SEQ ID NO: 1782 - DNA, 13878 bp, synthetic construct
  source 1..13878: mol_type = other DNA
  misc_feature 1..13878: note = Synthetic
gtgtccttttcatccggatcggcgacgaaggctttcatgttaaacagaatgccctcacctgtatctttggcaacgatgctggcgttggtttgagagaacactggagcatcgtttcgccacagggaagtgatcagaaattcctgctcctcggattggttctgcgcgttgacggcacgcaggaccacacggtgggatttgctacggttgatttgatcacccgaatcgccttcaacgcatgttaccctgttagttttttagtttatcattgaaaatcaatgatttaggtagtttttttgatttctcgggggtggctacactgctgaatccggctggcgggctagcagatcgaggagggtttgaacttcgggggtgggttcggtgagttgctggaaggtggctccgcctacgctcacatcgttgcggcgctggctcttgagggtttccaatacgcccgctatggtgagatctcggtcttttggatgttgcgtctggttggtgagggctgctgactgcgcctcaaacagtggggctagccgcgctttgaggtgccattggaggtagtaggcgagcatgcacaagaagacgtgggcgcggatgcgtgggtcggtcttgtgatgaatagggcgcatttccaagctcacggttttcatgttacggaaggcttgctcgactcggctgaggcttttgtagcgactcacgactcggtctttgtccatggcttggacgctgacggtggttttgatgacgtaacagccgtcaagggcttgggcggcggcgacgctttcttcatcgatgctccattcgagttggccttccgtcacgcgccagtggaggtgtttgcccattttggttttggcgagaagttttccaacttgggctccgatgatttcaggatggctgggctttttccgcgcgacgatgcgggtgagttcttcgcgggtgcgatctagcaaggcagtgcgagtggcggtttcgcgggcggcactgtgggggttgcgacagaggcagtagcggtggccgggggtggtgggatcggtgatttcaacgatgtttttatcgtcaaaaagttcgggttgatgggcggtgcgttctagcagctcaatcatttggcggtgggtgagggcgctgatgattttgaggctttcggcttcggggagggcggcgagtttctcttcgttgctggcggtgatcatgccgcgatcgccgacgagcacgagctcgcggactccgtatttttcgcgcagttctttgacttttccttctacggtggaggcgtcctgggtgtttccggggaagacttcaacggcgatggggcagccttcggcgttggtgagcaggccgatgacgatttgttcgtggccgcgcttgccgtcgcggttgtagccgaattggacgatttggctgtcttcgtattggccttcgaagtaggtgctggtgatgtcgtagaggacgatgcagccggtgtcgttggcggtgcgggtgaggtgggttttggcgagggtttgctggatggcgggttggcgttctagcaggcggtcgagggcggcgtagcagtgttcatcgacgtccacggggccttcggtgccgcaaagttcccagagtgcagtgtttttccactggtgggagagggagagtttgctgccctgatagaggatgcgtccgatgatcatggcgagcgcgtcgccaatccaaggcagggagggcttggagtagagggcgcggtcgaggctgatgtctttggcgagggcaagcaaggcggcggatgcgccgtattctttggaggagaggattttgaaagcggcggggtcatccttggggaggacgtcgtcgcggagggcagcttggacgttgagcagggtgctgagcggtagtccggtgaggcgaccgtgttgctggtgtttgactttaccatcggcgggatcgcggaaggtggtgcgcaggatgccgacgggattcttgcggtggcgctggatttcgaggtggatggggtgtcgagtcttgatggctcaaaatatgagaaaattatcaacggatgcaagaagaatattttaaaatgtatggctacatttaaaacgattatttgaatccatcgctaggtaaatatgggattgcggtgatttggtgtcaaaacgtgcgactaagcccaagggtggcgttggtgatgaacgcgagagccccattcctttcggttagaaaagaatggggaatgccgtctaaggatcaacatcagtgggcgatcggcccgctatctttgctgccaagcgcagcccgtgggaagcgcacgccttcgacaagagcctcgatttctacgggtggcttgggagtcatgtaggaaaccgcgatggccacgacgaaattaatgaccatgccgatgctgccgatgccctcaggagaaatgccgaggaaatattggtctggagttccttgtaggccgaaaatcccgaagctgaagtaaacgatgtatgagatcgtaaatgccatgccagcgatcatgcccgagaccgcgcctttgcaattgacccgttttgaaaatacacccaacaccaacgctgggaaaaatgatgaggctgctagtccgaatgcaaatgccactacctgaacgacaaagccgggcggattgatgccaaagtaaccggctacgatcacggcaacccccgcactgatgcgggcccacagcagctcgcttttctcgctgagtgaaggtttcaaggtgcgtttgaccaaatcgtgagccaccgaggtggaaatcactaacagcaatcctgccgccgtggacaaggccgccgcgaggccaccggcggcgacgagagcgatgacgtagggcggtaaattcgcaatttctggattggccaagaccatgatgtctggatccacatagagttcgttggaaacggccgatggcttattttgcaacaatcgctcacccgccgcgccgctaccttcggcttggaaaacgggtgccgcgcggcttgctccgggcattttttctatcgccgctcctgtggcgttgtaggcgacgatgccgtcttgatttttatcgatccatgcgatcaggccagacttttcccactgtttgaaccatgtgggcaactccgcatacggcttatccgccacgatattgaggaagttagtgcgcgcgaagaccgaaaccgccggcgcggtggtgtagagaatcgcgatgaaaaacaacgcccaaaatgccgagctgcgtgcggtgctgacttttttaaccgtgtaaaatcgcacaatcacgtgcggcaagccagcagtgcccgccatcaagaccaaggcgatggcaaacacatccatcatcggttttttcccatccgtgtaggcaccaaatccaaggtctttcgacaattggtcgaggtgctgcaccactccgatgtccgttcctttcaaatccgaagcgataccaagcatcggcaccggattgccagtaagcatgatcgagatgaaaatcgcaggaaccaaatacgcggtgatcaagacacaatactgcgcaacctgtgtgtaagtgatgcccttcatcccaccgagcaccgcataaaataggacgatgaccatgccgatgagcactcccacttccaccgaggtgccgagaaatctggaaaaaacgacacccacgccgcgcatttgtccggcgacgtaggtgaagcaaatcaaaatcgcgcatgcaatcgccaccaagcgagccgtgcgcgagtagtagcgatcgccaataaagtccggcacggtgaatttcccaaaacgccgcaaatacggagccagcaacagcgccagcaacacaaatccgcccgtcagccccatgagataaactcccccatcgcggcccatcaccgagaccatgcccgccatcgagatgaatgacgcggcactcatccaatccgcgccggtcgccatgccattgacgacggtaggcacgccgccaccagcgacataaaaatcgcccgtgcttttcgcccgtgtccaaacggcaataccaatatataaagcgaaactcaggccaacgagaagatatgtccaaacttgaatactcatataaaaaaaaatggttcgattgaaaaaatgatgggagcaatcaggtatcttccaatccttcagcggaagtccccttcaccaactcgcggtccagccgattcatcgcccatgcatagactgcgatgatgatcacaaagccgatcacgctcccctgttgggcaaaccagaagcctaatttcaggttcgtgcccggtaaattgaagcgatccagaaaatccacccaaagaatgccgcagccaaaagagatgaaaaaccaaacacccaaaaatccatagagccagtagagagtttttttccaataaagagattttgctgcttcgctgggaagttgtttcgaggtcatggtaaattttggaatgagttggcttttataagaatcgatgaaagttcgcgatctgcttgagcaggtggcgtgcctagagtggtggatttgaaaaatccatccgattggatgggctgcgcggtctttgctgccattgccgaaacaaggcggcaagcgtgaagatcatttttgcgcaaataattcctgacataaaaggcagcgagtgccatcgcatccacgggcggtgcaatgctcgcgaccgtagaaaatgatttgcaaatgcaggcgattccatgactcgcgagggaagcattttttcaaatcgcgctcggtttgttcgacgttttttccggaagttaatttccaacgagtcgccaagcggtggatgtgtgtatcgacgggaaatgcaggcacaccaaagcattgcgccatgacgacggatgccgttttatgccccaccccgggcaatgactcaagcgcctcaaaggactgcggcacctgcccgccaaattcaacgactaggcgccgagataactctgaaatggctgccgatttctttggagaaagaccacagggccggatgatcgtgcgtatggcctcgactggcacctgcatcatttcctccggtgtcgctgcgagtgcaaaaagtgcaggcgtgacctgattgacgcgcacatccgtgcattgggccgagagcagcacggcgatcaacaacgtgtaaggatcccgatggtccagaggaatcggcgtctcaggatacatttcctgcaagcgccggaggagatgagctgcacgttctggtttacgcatggggcgatctttcggatggatcgcggtgctggcaagccgagccgctatttttttctgaaaaattaccaacctttgtgcttgccagaccacgccgtcgccttagtctgtcggtccgtttttcatttttctgccaacggatggagtcccggtgttggcagaaaattccttcaaatctgggacaaccgtcggacggaaaacgaaccactaacctaacctcaaccactaaaattacccatggctaccattgccgcacccaccaatactgaactgagcgatttgatcgattccaagttccgcgagttccgcgaaggatcgattgttaaaggcacgattcttgaaattcggccacaagtcgtgctcgttgacattggctacaaatccgaaggcgccattccttcaaatgaatttgaagacgaagagatcgaaattggcgacgagatcgaagtcttgctcgagagactcgaaaacgatgaaggcatggtcgtgctttccaaagagaaagccgcgcacaaacaaaactgggacaagatcgtcaaagtgttccaagacggcggcctcgttcgcggaaaagtcaaatccgtggtcaaaggtggcctcaccgtcaacgtcggcgtggaagcattcctgcctggctcacaagtggacatcatcccacccaaagatctcagcgaatacgttggcaacgtttacgaattcaaaatcgtcaaggtcaacgacgagcgcaaaaacatcgttctgtcccgccgcgaggtcatcgaagcggagcgctccgaattgcgccagcatttcctcaccagcgtcaagattggcgacaaagtcaccggctcgatcaagaacatcaccgatttcggtgcattcgtcgatctgcaaggcatggacgggctgttgcacatcaccgacatgtcgtggggacgcatcaatcacccatccgagttgctacacatcggccaagcggtggatgtggtcatcctcgatgtggacaaagaaaaagagcgcgtctcgctcggcctcaagcagatgtccgaaaatccatgggaagacatcgagcggaaatacccgatcggccacaacgtcaaaggccgcgtgaccaaactgctgccatacggcgcattcatcgaaattgagcgcggcgtcgaaggcctcgtccacgtttccgagctcagctgggtcaagcgcatcacacgcccatcggatgtgttggaaattggccaagaaatcaaagccgtcgtgctcggcatcagcattgaggagcaaaaaatctcgctcggtgtgcgccaactcgatgccaatccgtgggacgaaatcgagctgcgctacccggtgggcgcgacgatcaagggccccgtccgcaatctcaccgcctacggtgcatttgtggagctggaagaaggcattgacggcatgatccacgtttcggatatgtcctggactcgcaagatcaaccatccatccgaagttctcaaaaagaacgacgaagtggaagcgatcgtgctcgccattgataaggcgaatcagcgcgtttccctcggtgtcaaacaaacggaaaacgatccatggagccaaatcgacaagcacttcaaagtgggtgacttggtcaaaggcaccgtcgcgaaaattgcttccttcggcgcattcgtcagccttgaggatgatatcgacggcctgattcacatttcgcaactcagcgaagaccacgtagaaaaagtcaaagacatcatcaaagtgggcgagcaaatcgaagcccgcgtgatcaaagtggataaagttgaacgcagaattggactttccatcaaagccgtcggatactccgaagagcaacttaagaaagaaagtgcgagcttcgaaagcctacgcccatcttccgagatggtcggcctagagcaagccttcaatctggctgccgccgcatccgaagactggagccctggccaaaactaattcaaattcctgccatatgaacacaatccatttggcataatcatttagcaagccgggtgagagtcatactcatccggcttttttcatcttcattccaaaaaacctcaccgataccatgctgaaactatttttcccattatgccgcgtgttgatagtgctcttcacctgcgccatctcggcaaaagcgcaactcaatgcaccgatcaattgctacgcatttgctgattcggaaggagccacgataggaactcgctttgtcagggttttttggacggacaattcgaccaccgaaacacgctggcaggttcaagtgagcattaatggagcaaactacgtcaatctttcaagctccttcgcttcgaattccacttctgaccgtggggatgaattttccgtaccttgggatcgagcacctgcaaattctaacctgagatttcgcgtttttgcagaaacatcatctcgcaggtcagcctcctcgaacattggtgaagtaggcaccaaagcatttgatcctcctttcaatttggtcgcaactgccatcagtcctttccatatcaggctcacttggtcagaagactcgacgactgaaaccggctttgcgatcgatcaaaaaatcggatccggtccatggatctacgttggcaacactgctaaaaatattatatcacgcgactacaaatttggcatcattccctccacgtcttatcaatttcgagtgcgaacctacaaaggcagcgaaccgacgacgcccggaagcccgagtggctcgaatgtcacgccttacgccgcgcccgcctcagtcaccactccggcttacacattcaccgcagcggctgtcggaagtgaagaacgcatccgccttacgtgggcaagtgttccaggtgcgacgtcctaccaaattttcatgcgtgattcagaagtggagccattcacacgaatcctgaccgcttcctccggggccaccaccaccgatgtgattgcaccgctcgtcaagcgcgggagaacctacattttctatatcaggccgatggcgagtgcaatcccaattggtgattcaaataccgaatttgccacgatcgacggcatcacgagtaggcgtaatttggtcggcatcactggcgcaccactcacccacatctttaccgaaaatatcagttcgtccatcacctcgaggactcttgtgccgctgccagccggcctcacatttgatccattattactcactctcagcggaaacttcccagcgccaggcgtttatccaatgacttacacagtcaacttagaaaccggctcaccgctcactcaagccttcaccctgcgggtggaaaatcaatccggctcccccaccctgcttgcgccaatccccgcgtggaatacaacgcccacctcgcaaaaaatcatcgatctcaccccgattttcgcgtccaatttagaaggcccggccatgcggatatccaccacccttggagatctcgactgcattttacttgatcacatcgcaccgcaaaccgtcagccgtttcactgccaacagcagcaacggaaaatataacaacaccgctttccaccgccgcaataccgaccgatggttagaaacaggcctttatcgtggcaccggcatcggcggcaattttagcaccaccatcaatgacatcgcggctcaaaaagaagccggctatccgaacattttgggcactctttcgatgattgaactcgctggcactcccgaaaatcagcggactcaattccgcatcaacaccacagataactcagccgaattggatgaactcaatgatgggcaaaccgtcttcgcgcgcttggccaccgcatcattggccatcgcagatctgattcactcaaaaccgattggcagctactctctcaccatcaattcggcatctccggccgtgcttttcccgcaatttccgatgaatgcaagctccgcaccagccagcatggtgcaagccaacgtcatcaaaattctatctgtcctgcccgttgcgccgctacgctatgaagttttccaaaatagcaacccagccgtcgtaagtgccacgatcgctggatcacagcttgaattaaatacgctgagtatcggcagcagcacgatcaccctcagagccaccgatctggatggattgattgtggatacttcattcaccgtcaactccgcgagcgcggctatcacttacgatacttggaaaaccacacaaacatttcctaacagcatggacgcaatgcttgcggatgccgatgaagatggtcttaaaaatttagaggaatacgcatttttgggcaatccgggcactcccgaccgtgcgaaacttcctgaactgggccgcactaccgatctcgcgtttcaaaccatgaaattcaaagtgcgcaaaggaaccgcaggcctccgctacgtggtggaagccaacaacaccctcagcggctcatggctgcccatttgggcatccgaagatggctttgcccacagctcagtcgtctccgccactgatttccccagccacacagaaatcaccatcaaagacaccctggccatctcgagtgaaccaaagcgcttcatgcgcgtgcgtgtgatccacgattgatttttagtcacggggcgaaaaatgacacgtctccatggcgactttcttagcacacatcttaagtgatcccgtcgagatgcaaaaaacggccaccccgtcgggcggccgttttatgaagagcgctttttatttccggtgtgcaagcagggacacggtttgcgcttcaaactttgtcttgattcgtcttcagaatactaacgcatcgattcccgtcaaattttttcttaaaatttggtagatcatttctcgacctttgatgattagagtctaacataaacgcaatcgtttaagttatggcaatcaccctctcgtttgatattggatacgcatccatcggctggtgcgttctcaatgcagaaccatctcagtcctctgaacctgaaatccttggaactggggttgtcacgtttcccactgacgactgcttagcctcaaagcgtcgggatcttcgccgcactcgtcggcatattcgctcgactcgagttcgcatcgaacgaatgaagcgttggctcgctcatcgcggagttctcacaaggggggatcttgaccgtccaggacatcccgcgcctttcctgctcgctgctgccgcacttcaaggacacaaaaccctaacatcctacgaactctggactgttctgcgctggtatgcccacaaccgcggctatgatggaaactccctgtggtcgaatgagcaatcaaccgacgacgacaccgaaaaggaaaccaatgccaaggggctgatggagaaacactccaccgcgaccatgtgcgaaactgtttgcgcctgccttgagcttgcccccgcaaaatacgctgatcgcatttcctctgctttaccctacaaaacactcaacgcagcctatccgcgggaggtggtctatcaggaagttggaaagcttctttgcaaacactgcggggtgcttcccggtcttgataccgaggcggtccgttacctcctcaagaattgcgtgctcactaccgaggaacgctcaaaactcgccgccgcgggtatcaagctgccgcgccgataccacggtgggcttctctttggccagctcgtccctcgcttcgacaaccgcatcatctcccgctgccccatcacttgggctcccacttacgacgcggccattgccgaaggcaaaaccgactcccaagcccggcaacttgccgaaaaattcgctaaggtccccgcaaaaaaatgtgtggagtttctcgaataccgcctcgcccgtatcctcgcaaacctcaaagccaatagcgcacccatcgcgaaggaactacgccagactcttatcgcccttgcccgcgaaaaaggcagcctaaccgccaaagatcttactcgcgaaaccaaggcgttttacggaaatgtcccgaccaatatcgactcctatttcaagcttcaccctgacagcaaggatgctctgttgctcgatccagtggccgacgaagtgcgcaaagccagcgaatccagcgccaaactctcaccgatttggaagctcctgagtcaagaaagccagtcagagatcattgctacttggagaaaagggaaggcagtttctctcgcagagatcattcatcgtgagtccgcaaaacgtgtggagctcctaaccgcgcttcagcctgctttcgagaaggcgaacaaacccaaacaaggaaaaaccaaatacgcgaacatcgatcactaccttcacaaaactaccatcactcccgatgttccatctggccgtgctccttatgctcggccagtcctcaggcaggtggtcgcagaagttctcgcaggctttgatccgacgaagcctgcccacaaaacctctgcttcagaaggcgaagataagccccaagatggcattctctatcaattgaatgacaaaaattcccgagctcgcatccttcaagaccaacgcccgcttgatcatctaacgaacaaccatctcgttaggcatcggatgttgattctcgatcgcttggtcgaagccatcgtttcagagtttatcacctcggaaaggcaagtcacccaagtcgtggtcgaagtcgcgcgagagctgaaggaattctcaggaaagaccgcaaaagaaatctctgtagaacttaaaaaccgcctcaaagactttacctccaccatttcctacttggagaaaaacgcacccgatatgcctttgaatggcagtctcatccgcaaggcccgcatcgccatggacatgggctggaagtgtcccttcactggcaaagactacgacccaacaacactcaaaagcctcgaacgcgcccacatcatcccttacgccagccgcaatagcaatgcccttcacgctctggttctcacttggccagaaatcaacagcaagcagggtaagcgcacctgcaaacagttcatcatggaagaggaagccaatcgagaatccggaaaatccaatctcaaccttttcaccctgaaacaatacgaatcttttgtcgaaaatctcgataccaaaggccaccccgatgatatccgccgcaaaaaagctcgtaaggcattgctgcttactctggagatggacgatcaagatctcggtttcaccgatggccaactcacccaaaccagccatctagccaagcttgcaatgcgaggtctaactaaacgctttcccagtgcggcagttgacccgattcccggtgccgtcactgcggaaatccgtaaagcatggaaattggcaggcaccctcagcctcgtttgcccggaagtcatcgaccctcagacccatgagccacgcccgaaagacgagatccgtagcctcactcacatgcaccacgccttagatgctgccacccttgcctttattgcccattatttccctttacgccgccacggcgaggaccagaaaggcaaactctggaaagcactactcaagcgcagccgcacgccagaagaacaaaaaatccttcaacaaacgggcctcttccaaacttatccgaagtcccaccgcgatccgcttgggcgagtgatcggaacccgcccggaactcaaactcgctgatcttcccaagcctctcaaacaatccctacgcctgtcccttgccgaagccagagtcatgcagcatcttcctgcggatcgatcaggcacaaaagcggaactcaccacttgggggattgtgtcgattgatggtgaaggagaggaaggaaggatcacccttcggcagaatgcaaccacagtggatgaaaatgggtgccgtaaacgtctcaccaagacccgcgaggaacgtgctggaaagcttctcgggcctaatcccaagcatgggattggaaaactcatcaatgttaaaggagccatgatcattggggaaaactatggactcgctctcgatccaattcctcgagtcctaccatttcatgatgtcactgcgtgtcttgcgaagttgaggcaagagaatggggataggcctgtgcgagtgctgagaaacggaatgctcattcatttagaaaaaaatccagctcgttcacagcaggactacacgggaatttggaggattacttcaattaagaacaataaggggacttttcttctaaatatgatccgtcccgcttatgtcacgccgcagaacggtgtgaaatggtcaggcatgaataaaacacttgagccattgctcgaatgtggtctcacgattctaccacaagattattcttcatgcccgagctgaaatgccctctttgaaagattcaaagagggcatctaggggttgtttaattcaattagccatggtaacaatgaagccgtgcgttgagttcacagctactttttgtcgagtatccctgcgatgatgcgccaacttggacaccgttggaagcttgtctcttccagcggtgttttgagttggtatctgtgtaaaacgtccatttgtctgtaaatccagcgctgctgcatccaccatacccatgtcgctgtgcgttgctctcgcaatctattcggttacgatacccttcgctcgaagcagcaattgtctctccattggccgcatttctgcgccaacgccattcgttaaggttatcttgatagattaaccatgttgtcagaactgttcggcatgctccttgcttgcaggttggatgatccaatgtgacaaaactgtcacttgtactgttagattatttctgtttttctgcgagtgtgggccgcgccaaggaaaagatcgacgag
